United States Patent Application Publication US 2004/0029129 A1 - sequence listing, part 8

SEQ ID NO: 21578 - DNA, 810 bp, Enterococcus faecium
atgaggaatacactaaatatagagaaaaattcgctggatttattacgctattgggctgcagtaatggttatgttggggcactttttaaggttttcaaattcgggggggggggatattaaagaaatactgtggaagattacagactttatgcccggtgttgttatatcattggcgttaagtgggtatctaatctcgtattcaattgagaggacaagtagcactaaaacatttattgtgaaacgaataatgagaatatatccagagttatggctatctacaattataaatattgttgtaatattagtattggtaccacatttaatcgatacatcatttataatttggatattaacacaattttttggtgttgcgaacacgcctaaatgccttaaaacatttgctacagggagcattaatggcgcactttggacaatatttgtcgaaatacagttgtatttgattgcagtattagtttataggtggataaagaaagggtcgaagacaattcactgtgtgggtgcattagtggccgcatttttgaatgtgatcataggttttcttgcggaacaacaatatgattggaaattgttgaaaatagtagatagatcatttattccgtattttctttggttttacatcggaatgctcatatatttatatagggatatactgattttgtttttgcgcaaattgacacctatgttgtttgtgttacaaattgttctgaaaataacgaattttcaagctcctggatattacgcatcgattatagatgggaacctgtgcttacaattggagcaggatactata

SEQ ID NO: 21579 - DNA, 1469 bp, Enterococcus faecium
ggcggtgtcgtgttgacaaagatcgatgaccaaagcggggaaatcctgcaaggagctgtttttgagttacagaaccgagaaggagaaacgctacaaaccggtctaactacaggagaagatggaaaactggcaattgacggtttagcaccaggagcatatcagctggtagaaactcaagcgccaatagggtatgaattagatgcgacaccaatcgagtttgagatcgaaagaagtcagacagcggtggtagaattaacgaaagaaaaccgacttacaccaggcggtgtcgtgttgacaaagatcgatgaccaaagcggggaaatcctgcaggagctgtttttgagttacagaaccgagaaggagaaacgctacaaaccggtctaactacaggagaagatggaaaactggcaattgacggtttagcaccaggagcatatcagctggtagaaactcaagcgccaatagggtatgaattagatgcgacaccaatcgagtttgagatcgaaagaagtcagacagcggtggtagaattgacgaaagaaaaccgacttacaccaggcggtgtcgtgttgacaaagatcgatgaccaaagcggggaaatcctgcaaggagctgtttttgagttacagaaccgagaaggagaaacgctacaaaccggtctaactacaggagaagatggaaaactggcaattgacggtttagcaccaggagcatatcagctggtagaaactcaagcgccaacggggtatgaattagatgcgacaccgatcgagtttgagatcgaaagaagtcagacagcggtggtagaattgacgaaagcaaaccgacttacaccaggcggtgtcgtgttgacaaagatcgatgaccaaagcggggaagtcctgcaaggagctgtttttgagttacaagatgccaatggaaccgttctgcagtcaggtctaaccacaggagcagatggaaaactggcgattgacggcttagcaccaggagtgtatcagctggtagaaacccaagcgccaacggggtatgaattggatgcgacaccaatcgagtttgagatcgaaagaagtcagacagcggtggtagaattgacgaaagaaaatcgacttacaccaggcggtgtcgtgttgacaaagatcgatgaccaaagcggagaagtcctgcaaggagctgtttttgagttacaagatgccaatggaaccgttctgcagtcaggtctaaccacaggagcagatggaaaactggcgatagatggcttagcaccaggagcatatcagctggtagaaactcaagcgccaacggggtatgaattggatgcgacaccagtaactttcaagatcgaaaaagaacaagaagtggcgatctttttaacaaaagagaatagaaaagttgctgatagctcagatataagaggaaacaatccaacaagcagtggaaataagcatcttccaaaaactggagaaaccatc

SEQ ID NO: 21580 - DNA, 867 bp, Enterococcus faecium
atgtatacaacattgaaagaagtaacaaaaacagcagaagagttgaattttacagttggagcttttaatacgcataacctagaaatgcttcctgctatgctaggcgcagcaaaagaaatgggttcgccgatcattattcaaacaagtgtcgataccgctaaatatatcggcatgcatgtgttagtcaatgtaatgacagctattgcagaagaagaaatggttgatgcagtcttgcacttagaccacgcccgagactttgatgatatcaaagaagcaatcgacagcggatatacttctgtcatgtatgatgggtcccatctgcctttcaaagaaaatatcctgaagacaaaagcagtagtagaatatgcccatgcgcacggtgtttccgtagaaggagaacttggaacaatcggcggtacagaagaaggaatccatgtcgctgaaaatgacaaggtatatacaagaccggaagacgcagtgaaatttgtagaagctacaggcgtggatgcattagctattgctatcggtacgaatcatggacaattcaaatcaaaaacagaagtaaacattcccttgctgaaagaaatcgatgcagtagttgatgtccccctagttatccatggaggaacaggtgtgaaagaagaagattatcctgaattgatcaataacgggatccgcaaattcaatgttggaacggagcttttagtcaactggacgaaagtagctaaagaaacctttagtgaaacagaaatcaacaagtctcttcgccataatgtgattccagcaaatgaagcagtaaaagaaattgtcaagcataagattggactgtttatgaacttggaaagtccaattaacttaggaaataaa

SEQ ID NO: 21581 - DNA, 1044 bp, Enterococcus faecium
atgtcgtctaaaggaacgaaaactaaaatcattctgaatctgcttttgctgattgtgatttttgccattatttattatttaatcaatcaatcatttgcagatatctttgccgaattgctgtctaccagtgttgttgttttggcagcggctgttatattagggacagtttaccaaatcgctgaagggcgctcaatcaaagaaattgctgaacctttcgcgccgaattttacaacgaaagatgggttcttgacctctagctatattgcgttttaccgaatcgtttcgtttggtacaggaacgctgatctcggagatttatttttataacaaaaaaggaatgaagctatcccagggagcaggggtgacagcactccatatgattatgtacaaactggcagtgatcacttatgcattagctggcttggtcatccaattctctcttttttattctaatggtccatcaatgatctggtttatcatcgctggtatccttttgacgatcgtgattgttgcctttttattggcgatgtccgtcagcttgaatgttcaaatattttttgtcagcttatcgaataagttatttaaaagtgagcgtttgcggaaatgggtggatacatgcaatcagcagatctactctttaagggaaacggtccaaaccattatccaagacaggactgcgctattgcggatttatctatggaatatgttaaaacttgtattttggtatgtacttccttatttgattctgattgaaaaccatcctaaaatagattttctactgaccatttcgtttatcagctttgcagtagtgctttcaggggttattcctacgcctgctggtattggttcctttgaatttgtctatttgttattattcagaccagttgttggaacagttgacgcagtttcttcgcttttactgtatcgtttcagttcctttatcttgccatttctctatggatttgtgtatgtgattgctgaacggcgaagagtgatcaaagaagaaataatagaagtaaaaaaagagaataaagaaaatcaaggg

SEQ ID NO: 21582 - DNA, 156 bp, Enterococcus faecium
atgaacatcaaagatgatttaaaagctgattcaattagtattatggaattcgttttagagcttgaagatgaattcggtacggaaatttcagatgaagacgctgaacaaattgaaacagtcggtggcgcagtagattatatcagcagccatcttaaa

SEQ ID NO: 21583 - DNA, 2607 bp, Enterococcus faecium
tttcgcgcatcctttgctcttcacaattctcttgaacgtttcaaaaatagaaacggtcttcatacaaatgcaatctatgcattcaatacgatgtttgaaaatgttatgcaaaaagagcaaccgactcatgttctggttgcgttcgatgcaggaaaaacgacttttcggacagaaatgtatgcggagtacaaaggtggaagatccaaaacacctggcgaattcaaagaacaaatgccatatatacgtgatttgttgacaggactaggggtacagtattacgaattgcccaattatgaagcagatgatattatcggtactttggcagaaaaagtagacaaagatcaatttgatgtcgtcgtgctttcaggtgatcgggatttgactcaattagctagtaaagaagtaaaagtggatatcactgtaaaaggtgtcagcgatatcgaaagctatacaccagaacatgtagcggaaaaatatgatgggttgacgccaaaacagattattgacatgaagggactagccggagatgcctctgacaatatccccggtgtgactaaaatcggtgaaaaaacagcctatcaagctattgaaacaatatggctcagtcgaaggaatttatgaacatatcgatgaaatgaagcaaagcaaaatgaaagaaaatctgataaatgacaaagagcaggctttcttatcgaaaaaattggcgaccatcaatacttcagcgcctgtggatgtctctatcgactcattgaagtatgaagggaaaaatctcgataaactcgttccgttttataaagaaatggatttcaatcagttcctttctaaattgaatatcgtagaagaagaagtaaaaatggatgatattttgtttgaagtcgttcatgaattcaaagaggaaatgtttactacggatatggcgttgtacgtggaaatgatgggcgacaattatcatacagaggaaatcgtcggagtagcgtgggggacagaaaagaaaatttatgtcacgaacgatctatctgtattcgaaaaccgagcgttccattcttggatcactgatccgactcggctgaaaaaagtatatgatgcgaaacgaacttatgttgctttaaaccgctatactggaaaaacgaaaggaatcgattttgatgtcttgctaggtgcataccttctcgatacgaatgaaaaaagcacagatatcgaaggaatagctgctcattacggatacaacgatatccaatcagatgaagctgtatacggcaaaggggcgaaaaaaggtttaccagaagaagaggaactcttttttgctcatttagcgcgaaaagtagctgcaatcaatgcgttgacaccaaaattgagccaagaactggcagaaaaaaaccaagaagatcttttccggaaaatggaactgccattgtctatcattttggcagagatggaaataagcgggatcaaagtagatgcgactcgcttacaagaaatgaagggcgagttctctgctcgcttaagagagatcgaacaaaaaatctacgaagaagccggcgaagaattcaatttgaattcaccaaagcaattaggagtgatcttatttgaaaaaatgggattacccgttatcaaaaaaacaaaaactggatattccacagccgtagatgtactggaacagcttcgtgaacaagcaccaatcgtagaggatatcctcacctatcgtcaaattgcaaaaattcaatctacctatgtcgagggactgctgaaagtgatccaatcagatggaaaagtgcatacccgttatgtccagacattgacccaaacaggacgattaagctctgttgatcctaatttgcagaacatcccgattcgattagatgaagggagaaagatacgtcaggcatttgttcctagagaaaaagactggctgatttattcttctgactattcacaaatcgagttacgcgtacttgcgcatatctcaaatgatgaacatttgaaagctgccttcctagaaggtcaagatatccatgccagcacagcgatgcgtgtatttggaatcgaaaaggcagaggatgtcacaccaaatatgcgtaggcaggcaaaagcagtgaattttggtatcgtgtatggcatctctgattacggactttcacaaaatctaggaatcagccgaaaagcagcacagcaatacatcgatacgtactttgaaaaatacccaggtgtcaaagaatatatggaaagaatcgtacgcgaagcaaaagaccaaggctacgtcgaaacgctgtatcaccgccgtcgatatctgccagacatcaattcaagaaattacaatatccgttcttttgcggaacgaacagctatcaatacaccaatccaaggaagtgctgctgatattttgaaaatcgcgatgatcgaattggataaacgattaaaagaaacaggtcttcaagctacgatgctgttacaagttcatgatgaacttgtcttcgaggtaccggaaaaagaacttgaatcattagatcacattggtcgaccgaagttatggaacaagctgtttctcttcatgtaccactgatcactgacagcagttggggaaaaacgtggtacgaagcaaaataaaca

SEQ ID NO: 21584 - DNA, 939 bp, Enterococcus faecium
atgaatatcatcaagatcagacatccttaccaatcagaacaaattccagaagacgatgtcgttttagtgctgggatttttcgacggcgtgcatatcggacaccagaaagtcataaagacaggtatggaaattgcacaaaaagaaggattgaaattagcattgatgactttcaatcagcatccatctattgtctttaaaaagatcgatcctagcagcgtgaaatatttgactagccttaagcaaaaagaagaaaaaatggccgctttgggtatagattatttatatgaagttgattttacttcttcttttgctcatttagcaccgcaggaatttgttgatcaatacatcgtagggttacatgcaaaatatgctgtttccggttttgattatacgtatggaccaaaagacattgcagatgtcgctcattttcctgaatatgccaaaggaagattcaaaatcgtcacagtttctaaagaagaagaacaaggtgaaaaaatcagctctacccgtattcgtggattactagacagcggacaagtaaaagaagcagcaaaactattaggttgcacatatgaggtagaaggggtagttgtccatggcgatgcacgaggcagactactaggattccctacagcaaatgtcaaagtaaagagcacggttcatttgcctaaagaaggtgtttatgtgtcggaaataaaaattggggaaacatggtatccagccatgggttcaattggacataatgatacattcggtgaaggacgggagctgactgtagagttgtatattttggactttaatcaagatatctatggtgaacatgtcgcggtacgctggaatcaatttttaagagatcaagtgaaattttctagtgtagaggaattgattgaacaactcaaggaggatgaacaagcaacagctgaatatttttctcagcaa

SEQ ID NO: 21585 - DNA, 813 bp, Enterococcus faecium
atgctggaggaaatgcccatgatgaataaattgatatttggtcgttatatgcctggagattccttgatccatcgattggatccccgagctaaattattagccagtttttattttatcggaatcatttttttagcaaataattgggaaacgtaccttttgttggcatttttcacattactttctgtcttcttgtcaaaagtagatttgaaattttttatccgaggcattcgcccattgatctggctaatcctcttcactgtagctttgcaggtcttgtttacaagtggcggagaaacttattggagttggggtgttttccatatcactgaatttggtgtgatgaacggcctctttattttctgtcgattcgtgttgatcatttttatgtcgactctactcacgcttactacaccgcctttggaattatcggatgcgattgagtacttgcttcgtccattgaaagccgtacggttcccagtccacgaaatttcattgatgctgtcgattgctcttcgttttgtgcctacattgatggacgaaacagaaaagatcatgaacgctcagcgcgctcgcggtgttgattttggtgaaggaaacctagttcagaaaatgaaagcagtcattcctttgctgattcctttatttgtcagcagcttcaaccgtgcggaagatcttgcgactgctatggaagcaagaggctacaaaggtggggaaggaagaacgaaatatcgtgtattgcattggcataatagagacacgatggttatcattgcttttgtattattaactgtgctactgatctttttaagagga

SEQ ID NO: 21586 - DNA, 1155 bp, Enterococcus faecium
gtgaactttatggaacaactaaaagcatacaaattcagaatctatccaacagaggaacaagaaatcttctttgccaaatcttttggttgtgtccgtaaggtctacaatctaatgcttgatgaccgaaaaaaggcgtatgaagaagttaaaaatgattcttctaaaaaaatgacttttccgacaccagctaaatacaagaaagaatttccgtttttgaaagaaattgatagccttgctttagccaatgcccaacttaatttagataaagcatacaagaatttttttcgggataaatccgttggatttccacgtttcaaaagtaagaaaaatcctgttcagagttatacaacgaataatcaaaatggtacagttgctttgattgatagtaaattcatcaaagttcctaaattgaagtcattagtaagaattaagcttcatagacaaccaaaagggattatcaaatctgctacaatatcacgtcattctagcggtaaatactatatttctttgttgtgtaaagaagaaattatcgaattacctaaaactaattccacaattggtattgacttaggtattatggactttgcgattctttctgatggacaaaaaattgataataataaattcacgtccaaaatggaaaagaaactaaagcgtgaacaacgcaaattgtctaggcgtgctttattggctaaaaataaaggtaccaatctatttgaagctaaaaattatcaaaaacaaaaacgcaaagtagctagattgcatgaaaaagtaatgaatcaacgtactgattttctgaataagttgagtacagaaatgatcaaaaatcacgatattatctgtattgaagacttaaacacaaaaggtatgttgcgaaatcataaattagctaaaagtatttctgatgtttcttggtcaaagtttgtgactaaattacaatacaaggctgactggtatggacgaaaaatcatcaaagtagataaatggtttccgtctagtcagatttgttcagagtgcggacataaagatggcaagaaatctcttgaaattcgagaatggacttgtcctgtttgtcatactcatcatgatcgtgatatcaatgctagtatcaatattctgaccgaaggtctaagactacattctatgggattggct

SEQ ID NO: 21587 - DNA, 1119 bp, Enterococcus faecium
atgacagacaacagcaaaacacgcgttgtcgtagggatgagcggcggtgtcgactcatctgtaacagcacttttgttaaaggaacaaggatacgacgtgatcggaatattcatgaaaaattgggatgacacggacgaaaacggtgtatgcacggccacggaagattataaggatgtagcgaaagtagctgctcaaatcgggattccttattactctgtgaattttgaaaaagaatattgggatcgtgtatttgaatatttcctagccgaataccgcgcaggacgtacacctaacccagacgtgatgtgcaacaaagaaatcaaattcaaagcattcttggattatgcaatggatcttggcgccgattatgtagctactggacattatgcgcaagtcactcgcgatgaaaacggcgtggtccacatgcttcgtggagtagacaataataaagatcaaacttacttccttagccaattatcacaagaacagctttcaaaaacgatgttccctctaggcggcatggaaaaatcagaagtacgggcaattgctgaacgcgcaggccttgcgactgctaagaaaaaagattcaacgggaatctgctttattggtgaaaagaacttcaaacaatttttgagcaactatctgccagcaaaaaaaggaaatatggtcactcttgatggtgaagtcaaaggacaacatgctggcttgatgtattatacgattggtcaacgtcaaggactagggatcggtggcggaggagattcgcaagaaccctggtttgttgtaggaaaagatctagcgacaaacacattatatgtggggcaagggttccatcatcctgcattgtatgccacaagcttggatgcaagtgaaatccactttacgacgaatgaaccaatgccaaaagaattcaagtgtacagcgaaattccgttatcgtcagcaagacgttcctgtgacagttcgcttattggatgataatcgtgcagaagtcgtattcgacgaacctgtacgtgcaatcactcctggacaagcagttgtattttatgatggaatggaatgtctgggtggtggtttgatcgaccacgcatatcaagaaacaaaagttttacaatacgtt

SEQ ID NO: 21588 - DNA, 534 bp, Enterococcus faecium
gtgagccgtatcggaaataaagtcgttgttatccctgaaggagtaacagttactcaagacggaaacaacgttacagttaaaggaccaaaaggtgaattgactcgtactttttcagcagatatcaaaatgaatatcgaaggaaacgaagtaactttcactcgtccaaacgacagtaaagaaatgaaaacaattcatggaacaactcgtgcgaacttcaacaacatggttgtaggtgtcagcgaaggtttccaaaaagcgttagaactaatcggggttgggtaccgtgcacaattacaaggatcaaaacttgtattgaacgttggttactcacatccagtagaaatcacaccaccagctggagtaactgttgaagtaccagctaacacacaagtaattgttaaaggtgcgaacaaagaagaagttggcgaattagctgcaaacattcgtggaactcgtcctccagaaccttataaaggtaaaggtattcgttatgttggcgaatatgtacgccgtaaagaaggtaaaactggtaaa

SEQ ID NO: 21589 - DNA, 1293 bp, Enterococcus faecium
atgttagaacgttatacacgccctgaaatggggaatatctggacggaagagaacaaataccgtgcgtggctcgaagtcgagattttagcagatgaagcttgggcagaacttggtgaaatcccgcaagaagatgtgaaaaaaattcgtgagcatgcatcatttgatatcgatcggatcttggaaatcgaaaaattaacacgccatgatgtcgttgcgtttacacgagcggtttctgaaacattgggagaagaaagaaaatgggtccattatggtctaacaagtacggatgtcgtagatactgcttatggctatctcatcaagcaagcaaatgatattttacgggaagacttgaaacgttttacggaaatcattggcgaaaaagcaaaagaacacaaatatacagtgatgatgggtcggacacacggtgtccatgctgaaccaactacttttggattgaaacttgccacatggtattcagaaatgaaacggaacatcgaacgatttgaacatgcggcaaaaggagtagaagcaggaaaaatctcaggagcagtgggaacgttcgcaaatatcccgccatttattgaagagtatgtatgtaaacaattggggatccgtccacaagaaatctctactcaagttctccctcgggatctacatgctgaatatttctcagcgatggcgcttattgctacaagtattgaacgttttgcaacagagatacgcggattgcaaaaatccgaaacacgtgaagtagaagaattttttgcgaaaggtcaaaaaggttcttctgctatgccgcacaaaaggaatccgatcggttcagaaaatatggctggtctagccagagtggtgcgcggacacatggtcactgcctatgaaaatgtcacattatggcatgaaagagatatttctcattcttcagcagaacgaatcatcttgcctgataccacgattttattgaattacatgttaaatcgttttggcaatatcgttaaaaatctaacggtctttcctgaaaacatgaagcggaatatgtctgcaacatttggtttgatttatagccagcgcgttatgctgaaattgatcgataagggaatgacaagagaagaagcttatgatcttgttcagccaaaaactgcgtacgcttgggacaaccaagtgcagttccgcccgctgttagaagaagatccaaccatcacatcggtattatctaaagaagaaatagacgatgcctttgattatcatcatcatttgaaaaacgttgacgtgatattcaaacgagtaggtttggaa

SEQ ID NO: 21590 - DNA, 1290 bp, Enterococcus faecium
atgagtttccaaagaccaaaaggaacaaatgatattttgccaggcgaatcagaaaaatggcagtttgtcgaagaaacagcacgtttattattcagagattatcagtataatgaaatgcgtacaccgatttttgaacactatgaagtgatatcccgaagtgtaggggatacaacggatatcgtttcaaaagagatgtatgatttttatgacaaaggggaacgccatgtgacgcttcgaccagaaggtacagcaccaatcgttcgttcttttgttgagcataaattgttcggcccagagtatgcgaaaccgttcaaaactttttatatgggaccaatgtttcgctacgaacgccctcaaaaaggacggttacgtcaattccatcaaatcggagtagaagcatttggatcagaaaaccctgcaactgatgtggagagcatggtgatggcacttgatttcttcaaacagttggggatcacgcaaatccggctagtcatcaattcattaggtgataaagaaacgcgtcaagcctatcgtcaagcattgatcgactatcttttaccttttgaatcagagctgagtgaagactctaaacgccgccttcatgaaaatccattacgcgtattggacagtaaagacaaacgagatcaaaaatttgtggcagaagctccatctatcttagattatctaagcgagcctgctcaaaaacattttgataccgttgtttccatgctggatgcattggctgttccttatgaaatcgacagtaatatggttcgcggactagattattacacacatacgatttttgaaatcatgagtgacgcaccaaaaatgggggcacaagcaacgatttgcgcaggcggacgttatgacaatctagtggaagaactaggtggtccttcaacacctggcttcggatttgcaatgggtatcgagcgattactcttgactatggaggcagaggaagtagttatccctgcatttaatgagttggatgcttacgtggtcgcactcggagacgaaacaaatatcgaagcattgaaagtggtccaagcgattcgaaactttggtttttcagctgaccgcgacttcatgaaccgtaaagcaaaagcgcaatttaagacagcagataaagcgaatgccaaattagtattggtgatcggtgaagatgagcttgctagtcaaacgattaatgtcaaagcaatggcaagccgaaaagaaaaaagttttccattagaagagatatatgaacattttgatgaagtctatgatgaaatgactttattcgag

SEQ ID NO: 21591 - DNA, 756 bp, Enterococcus faecium
atggttcgggtaaagggattgaatataggaagcggtagaccaaagatttgtgcgcctcttatcggggccgtccgagaggaagtattacgtgaagcagttcttgcacgtgaagcaggggccgatttagtcgaatggcgagtcgatcattatcgtgaagttttttcttttgatgaagtagcagaaacattggttcttatccatgagatgcttgatggactgccgttattatttacgtttcgtaccttagctgaaggcggagaacaagacatatcgatccgtcagtatcgcgacctttatgaacatgtgatacacacaggattagtagatatggtcgatatcgagttgttcaaagtagaaagtctaggaaaaagactgatagaggaaatcaagtctttaaacattcctttaattatcagtagtcatgattttaaagaaacaccagcagaccctgtcttgctttaccgattgaatgttatggaacattttggagccgatatcggaaaactggcagtaactcccaataatgaacgagatgttttgcggttgatggagttgactagacgggcaaatgcttttgtctccatgcctattattacgatgtccatgggaaatcttggtaaaatttctcgtctggttggcggaacgacgggttccgttatgacatttggttccttaagcagcgattctacttctgctccaggacaattaccggtcaaagcattgaagcaaattattcaattattaaatgaaccgttg

SEQ ID NO: 21592 - DNA, 1119 bp, Enterococcus faecium
atggataagtataacgtaaaaacctcatttcaaaaatggttttctgcaataaatttttctggtttatcagaaaactctcaaagcttaattagcgactttgatttctacagtaaaaaactagacttccaaacgacgcttaaagtgttacttcatgcggtttatgaagaattgccaagctatcgcgagattgatcgcgcctttttagatcagcgcctctgcaaggaacttggcattgattccctgtgttacagctcgttatctcgtagagcgccagaaatcaagcaagaagtattgatggaaatttttacgcaattagtcgccagaatttctgctcagcagccaagctcaaaaacaaccagtctacaattgattgattcaacgactattccgttgaacaaagcatggtttccatgggccaagtttcggaaaacaaagtctggcatcaagctacatttgaatctctgttatcttgataaaaccaatcagtatcctgaaagttttacgatgacaaatgcgagtgagcatgaccgtaatcaccttgaagttcttgttgataaaacgcaagcaacgtatgtggtggatcgcggctactttgattacaagttgttagacaaactaaatcgtgacggctatttcttcgttacacggacaaaatctaatacaaaaattaccatcttggatcaaattgaagtagcagatacaacaacccgtgatgggacgataatcagtgaccaacaagtgattcttgtcggcggtgtcaaccatgtgacagagcgttttaggttggtaacggttcttaccaagggacaaaaaatcctgcgaatggtgaccaatctctttgatgtatcgccaaacgaagtggccgacatgtatcaagcccgttggcagattgaattgttgttcaaacacttaaaacaaaatctgaccattaaacgactatattcacatagtgaacaaggggcgataaatcaagtcatcctcaccttaatcgcaacgcttctcacttatgtgataaaaattgagttgaatacgacagcgacgctgtttcaattgaaacgtaccttccattacttaatgtttgagcccgcagaagagtggttcaaacgttacagacctgga

SEQ ID NO: 21593 - DNA, 1398 bp, Enterococcus faecium
atgcttaaattaccagaagattttatttttggcggagccacagcagcctatcaggttgaaggagccactaaggaaggtggcaaaggcgctgttgcttgggatgactttttagaggaacaagggcgattcagtcccgatccggcaagtgatttttatcatcaatatgcaaaggacattgaattgtgtgaacgttttggtgtaaatggtctaagattatccattgcttggagccgcatttttcctgatggagctgggaaaccaaatccagaaggaatcgctttttatcatcgtgtgttcgaagaatgtaagaaaagaaacgtaacgccgtttgtgacgttgcatcattttgatacccctaaacgtttgtttgaccatggagattttttgaatcgagaaacaatagaagcatttgtttcctatgccattttttgttttcatgaattcaaagaagtcaaggtgtggagtacctttaatgaaatctatccagttgcaaccaatcaatatttgttaggtgttttcccaccaggaatcaaatatgattttacaaagatcgtcgcctgtcttcataatatgatggttgctcatgcccgtgtagtgaactatttcaaagaaaacgaacttccgggtgaaattggtgtagttcactcattagagacgaaatatgcggcaacagacgcgccggaagataagcatgctgcctttttagacgatgcattgtcgatccgtttcttattagatgctacctatttaggctattattcaactgaaaccttgactgctcttgatgagatatgtgaagcaaatcaggccagctatcattttcctgaagaagatttcgttgaattgaaaaaagcatccacgcgtaatgactacttagggatcaatcactaccaatgccattttgtcaaagcttacgatggagaaaatgcaatccatcataacggtacgggtgaaaaagggacctctgtttataaagtgaagggaatcggagaacgtatttataaagaaggaattcctcgaactgattgggactggctgatttatccagaaggtctatatgacttgttgctgcgaattaaaagcgattacccacattacaacaaaatctatatcactgagaacgggatggggtataaagatcagtttgaagatggcattattatggatcagccgagaatcgactatttgagagtctatttggaatccttaagcaaggcgataacagccggggtaaatgtgaaggggtattttttgtggtcgcttatggatcttttctcatggacaaatgggtataacaaaaggtatggcttgttttatgttgattttgaaacccagaagcgttacccaaaagaatcagcttactggtacaagttggtcagtgaaaccaaaacgattatt

SEQ ID NO: 21594 - DNA, 219 bp, Enterococcus faecium
ttgatccgcttccgtaaatatttgacggaaaaaggactttggtctgaagaaaaagaagaacaagtcatcgaagcaactaaagaagaaatcaaagcagctattgctgaagccgacaaagtaccaaaacaaaaggtttcagatttcttgaaaaacatgttcgaagtatctccacaatcaatcaaagaacaaattgcaatttatgaagcgaaggagtcgaaa

SEQ ID NO: 21595 - DNA, 471 bp, Enterococcus faecium
atgcagaccttagcgcaggcaaagcagaatttcgtttatcaagtcgaacgaatcgaaacagaagaaaaaacaaaacgccatttgcaaaatatcgggatcgttgccggaagtaaaatcgtcgtcgtcaatttatcaggcaacaatgccattttactggtaaaaagtcatcgagtggcagtaagtcgggaaatactaggtcaaatctttgtcaataaaaagactgcttcctctgaaagctggacttctcttgatcaattaaaagcaggagagactgggatcgtcgtagcaatccacggacaaggcgcagtgaagcgacggttaatggatatgggattgacgcgaaatgtaaaaatagttatccgaaaactagcccctctgggagatccaatcgaactgacagtgcgagggtatgaactgacgttacgaaagtcagaggccgaactaatcttgatacaaagggaggaaaaagaa

SEQ ID NO: 21596 - DNA, 1176 bp, Enterococcus faecium
atgaaagtaaaagtaaaaaaaagagcaagcaatcgattgaaaaaaggatatccactgatccaaaaagaagaccttgctcatccccaaaaagaaaccacgcaatgggtggaattagttgattcgcaaaaccaatttatcgcaaaaggatatctaggaaagcagaataagggaatcggttgggtattgagccagcagaacatcccatttgatcaatctttttttgaagaattttttgtgaagtcaaaagaaaaaagaactttctttttttcagatgattctactaccgcttttcgtatattcaatggagaaggagacgggatcggcggtctgattgttgattattatgcaggttatgctgttttttcttggtataacgaaacgttatatgcacatcgtgaattattgattcaagcttttcgtgaaatctacccggaaatcataggaggctatgagaaaattcgatttgaatcagtaaatctgcctgagagccagttcatttacggaaaagaggcaccggaacccttgatcgtaaaagaaaacggagtaaaatttgccgtttatttaaatgaaggattaatgactgggatctttttagaccaaaaagaagtacggggatcattagcagaaggtttcgcttctgggaaaacagttttgaacatgtttagttataccggcgccttttctgttgctgccgcaatgggaggggcaatcgaaacaacaagtgtcgatctagcaaaacgcagtttaaaaaaaacacaggaacagtttgaagtgaatggtttggatgtcgatcagcaaaaaatcattgttatggacgtattcgagtatttcaaatacgccaaaagaaaacaatttttatatgacatgattgtattggatccaccaagttttgccagaaataagaaaaaagtctttcgcgtagcaaaagattatggggaactggtcaaggatagtctggatattttagcagaagacgggatacttattgcgtctacaaatgctgcgaatgtctcgatagaacaattccaaacaatgattgaagaggaattccatgccaaaaatgtttcttttgaacaacttgctttatatcgtctgccaaaagatttccagacgacggatacctttttagaaggcaattatctgaaagtgtttgtttatcaaattaaaaataaccat

SEQ ID NO: 21597 - DNA, 900 bp, Enterococcus faecium
atggaaattggtgtaattggtttgggaaaaatgggattgaatttagctttaaacttaaaagagcaccatcacaaagtacaaggactcgacatttcaagtacagctgttagtcaggcaagagaaaatgacattcctgcttatcaagagatctctgaatttctagctacttttgagcagaaaaaaatcatctggttaatgcttcctgctggagagataaccgaaaacatgttaagaaaactttttccaaaactcggaccaggagacattattattgaaggcggaaactcttattataaagattcaatccgtcgagcagaagagtttcagaaaaatgaaatcggttacttggattgtgggacttctggaggaatcgaaggagcacgacatcaagcctgcttaatgattggaggagataaagaaacttttctatccgtggaacaattattcaaagatgtagcaattgaaagaggatatctgtatgctggtgcatccggaagcggacacttcttgaaaatgatccataatggaatcgaatatggaatgatgcaagcaatcggtgaaggattccaacttgtacaaaaaagtgagtatgcttttgacttggaacaagtcgcacgtgtttggaatcatggttcggtgattcgcggctggctgatggaaatcatggaagatcagttaaacgaacatcccaatttaagtaattatcggggaatcgtttctgcatcaggtgaagcaaaatggacggttgaaacagcgctagaaatggctgttccagttccagtaattgcaactagtttgttcatgaggaatctttcacaggaagaagatagtttttcagcaaaagtagtttcagcactaagaaatgggtttggcggacatgaaatagttgaaaagggtgag

SEQ ID NO: 21598 - DNA, 357 bp, Enterococcus faecium
atggcacgtgttaaaggtggaacagtaactcgtaaacgtcgtaaaagagtgctaaaattagcaaaaggttactacggttcaaaacacactttatttaaaacagcaaaagaacaagtaatgaattcatacaactacgcatatcgcgatcgtcgtcaaaagaaacgcgacttccgtaaattgtggattgctcgtatcaacgcagcagctcgtatgaatggcttgagctactcaaaattaatgcacggtttgaaagttgctgaaatcgacatcaaccgtaaaatgttagctgacttggctgttaacgatgcagcagcatttactgcattggctgaccaagcaaaagaagctttggctaaa

SEQ ID NO: 21599 - DNA, 606 bp, Enterococcus faecium
atgaattcatttaagaaaattgttttaggtacaacttttgctgctggtgctactgcaatgtttgtaggaactacaaatgctcacgctgatgaagtttatacagtaaaatcaggtgattcattatctaagatctcacaaaaatttgcaggagacaactcaatgatcgatgcaattgctgaaaaaaattcgatcgcaaacatcaaccgcatttatgttggtgaacaattaacaatcccaacttcaaatgattcttcagcaacaacagaaaacaaaacaacagaaaatacagcatctacaactgaaacagcaacgcaagaacatacatacgttgcacctgttgaaacagttgaagtagctcctgctgccccagctgctgcaacagcgccaacttcaagctctgcaaaagaatggatcgcacaaaaagaatcaggcggttcatacacagctactaacggacgttacatcggccgttatcaattagatgcttcatacttaaacggcgactattcagctgccaatcaagaacgtgtagcagaacaatatgtaacatctcgttatggttcatgggatgctgctaaaacattctggttagcaaacggctggtac

SEQ ID NO: 21600 - DNA, 1005 bp, Enterococcus faecium
gtgtttaaaggaaaaacaatattagtaactggcggaactggttccattggaagtgaaattgttcgtcagcttttaaaatatgaaccaaaagctatcagaatttatagtagaggtgaagaaaaacaattttatatgcaacaagagctctcaaatcacactaatttgagatttttaattggtgatatcagagactctcaaaggattgattatgcatgtcgtgatgtggatattatttttcatgctgccgcaatgaaacacgttccagcaagtgaatataatcctatggaagctgtaaaaacaaatgtgatgggaactcaaaatgtaatagatgcagcgatcaaaaataatgtaaaacattttgtaggtatcagtacagataaagtagtgagtcctactaacaccatgggtgcgacaaagttattgagtgaaaaattaataatagctgccaatcagtataaaggaaaaacagaaacaatattttcttgtgtaaggtttggaaatgtcatggggtcaagtggatctgttattcctctttttagtaaacaaataaaaaacaataaagatattactttgacagatgttgatatgacacgatttatgatgtcaataccggatgctgcaagattagttctgtctgctgctatgaattcaaaatttggagaaacatatgtcttaaaaatgccggcaatcaatattttaactttagctcaatcattaataaaaatatataatgatacacatgatgaaaaatatagaggtgaaataaaagttgtaggtatcaggccaggagaaaaattatatgaagagctaatgactacagacgaaattgaacgctcatatgaaaatgataaaatgtatatcattccaccacactatcatgctactgacgaactgtacaaagattatgaaaaaattaaaatcactgcatactcttcagatgcaacagaattaatgagtggacaggaatttattagaatcgcaaaagagaataatgtcgtgacttgg

SEQ ID NO: 21601 - DNA, 1500 bp, Enterococcus faecium
atgtttaaaaaattttcacaattaggacgcgctttcatgttaccaattgctatattaccagtagccggattactattgggactgggaggagcgttaacaaatgagagtgctataaatgcttatccatttttagatcaaccgtggttgcatacaattttaagtattatgagttatgctggaaatgcagtttttgcaaacctagcactaatttttgcaattggtattgctgtaggacttgcaaatggagataaaggaacagctggtttagctggtggagtagcttatttagtatatactgcaactattagtgggtttcttgaacttttttcagcaaaagatgcaacactagatacaggtgtagtgggatcaattgttgttggtggtactgttgcatttttacacaatcgttatagaaaaattgaattaccacaattcttaggtttttttggaggatcaagatttattccgattgtttctagtttagctgcaatcattattggttctttcttttatttaatttggccaccaattcaaaatggtttagtagttgctggtgaacaaattgcccaaatgggtagtttaggaacttttttatatggttttttattgcgtttaacaggtgctgttggactacaccacaccatttaccctttgttctggtatacatctttaggtggtaccgaaactgtagctggatcaacaattgctggagcccaaaatattttctttgcccaactagctgatccaaaccacactggtctgtttacttatggtactagattttttgcaggaagatttgcaacaatgatgtttggattaccagcagcatgttatgcaatgtatcgtgcaattcctaagaaaaatcgtaaaaagaatggtgggctttattttagcggggcccttacatcatttttaactggaattactgaaccagttgaatatatgtttttatttgttgctccttggctttatgtgattcatgcattcttagatggattatctttttattttgctgatatcttaaatattcgtgtagggaattccttttcaggtggtttgatcgactttttattattcggtgtacttcaagggaatgacaaaactaattggttaaaattaattccttttggtattgcatgggcatttatatatttctttgtttttacattctttatcaaaaaatttaaggtagctattcctggaatggaagaagaatcagaagttcattctgaaaaagtaataaacaaaaatacatcattacatgaagagtctcttatcattattgaagctcttggtggaaaagaaaatattgagtctgttgaagcttgtgcaactcgtttgcgtgttgctgttacgaatggggagattattcaaaaacaaacaataaaagacactggtgcaactgctgtcttcgaagtgaagggtggcatccaagctgtttttggagggaaagctgacttattaagtcaagaaatcaatcaaatattaggaaaagataat

SEQ ID NO: 21602 - DNA, 597 bp, Enterococcus faecium
atgaatgatttaaaggaaaatatgatttttgatttatcaaaaactgcttttgtcgcgatcgacatgcaaaaagagatcgtaaataacggtacactctctccacacactgcagcatctattctgacaaacaatgatttgttagtaagaacattgaaacgtaccgctgccttgaaagttttagtgaacgtagacatctccactttcccttatttgagtcaacaaactgatatgggtggaatgactgcttctgtacctccagaattcactgatttacttttgaaggattctttgaaagatacagataatatgttgactatcacaaaatacaatccaagtgctttttttggtacttctcttgatcttcaacttcgccggcgtggaatcgaaactatcattttaagcggtgtagcgacaacaaacggtgtatatgctactgcattagatgcctttcaacacgggtaccatatcgtgcttgctgaagatgcttgcagtgatcgtgacaaagaatcccatcaattgttcataaaaaagatatttccgaaaactgcacgagtacgctcaacgaaacaaataatcgaagctatccaacaaagcaaa

SEQ ID NO: 21603 - DNA, 972 bp, Enterococcus faecium
atgaagaaaacagcgaccgtattatttgttattcttgggctgagtataattgcagcaatgattggaatcagtacttctgcaaatgaacgggcaaatgagaatctttcatttactgtgaaaactgatcggattgtttatgacatgacacaacaagtcattactattccagtcaaaccaaacaaaagcgtgaatgctagtgatgtacatgctgttctaacatatggttgggatggtaatggaagttcagaaaaagttattggggaagtttatttaaaagacgtacaatggaccgctggtattgagtatacaataatgatttctgcagaactatcgattgatgagatcaagagtaaagataaagttgatttgattgttttttatgatggacagatgacgatcacggagaatttgaaaccaagcagttggacagttgttggaccgccaagcagtacggatagcacaagtagtgaaagcagtacagaaaacacgagcggtgaaagcagtacagagagtacgagcagtgaaagtagcacagaaaacacgagcagcgaaagcagtacggagagtacgagtagtgaaagtagcacaggaagcacgagcagcgaaagcagtacggagagtacgagtagtgaaagtagcacaggaagcatgagtagtgagagtagcacaggaagcacgagcagcgaaagcagcacaggaaaagtaaataatgaacttgatttggtacctatcataccaactaaggaacaaaagagaaatgcagggagcaacctaaaaagtgtgctaaaacagcctgattttgtttctcgtggaattgatcatcaagaaaaagcgaaagaaacagataatagaaaaagcgatttaccagaaactggtagtagaaccttgaacaagctaattacatggatgggtgtgttactcattttgattgtaggagcaagctattttcgttctctcttccatcgagtgaaa

SEQ ID NO: 21604 - DNA, 654 bp, Enterococcus faecium
gtgggtcaaaaagtacatccaattggaatgcgtgtaggcatcatccgcgactgggatgctaaatggtatgctgaaaaagagtatgctgagttcttacacgaagatttaagaatccgtaaatttatttcaactaaacttgctgatgctgctgtatcaacagttgaaatcgaacgcgcaacaggtcgcgtaaacatttcaattcacacagctaaaccaggtatggttattggtaaaggcggttctgaagtcgaaagcctaagaaaagaattaaacaaattaactggtaaaagaatccatatcaatatcgtggaaatcaaaaaaccagatctagatgcaaaattagtaggtgaaggaatcgcacgtcaattagaaaaccgtgttgctttccgtcgcgctcaaaaacaagccatccaacgctcaatgcgtgctggcgctcaagggatcaaaactcaagtatctggtcgtctaaacggagcagatatcgctcgttcagaaggatactcagaaggaactgttcctcttcatactttacgtgcggacattgattacgcatgggaagaagcagatacaacatacggaaaactaggagttaaagtgtggatctatcgtggagaaattcttccaactaaaaaaaacactgagaaaggagggaaa

SEQ ID NO: 21605 - DNA, 2106 bp, Enterococcus faecium
atggccaaaatccaagaattatctgaacgtttagctaatcagatcgctgcgggagaagtagtggagcgaccagcttccgttgtgaaagaattagtggaaaatgcaattgacgccggcagtactcagattgatatcttagttgaagaagcgggactgcggacgatccaagtgattgataacggagaaggcattttggcagacgacgtagagaatgccttcaagcggcatgcgacaagtaagatccataatcgcgacgatctttttcgcatacgaacgctgggctttcgaggggaagctttgccaagtattgcctctgtttctgaaatgactctggaaacggcgaatcaggaagaaaaacaaggcacctatctgtcgctgaaaggcggagaagttattgagcatcgaccagcaccactgcgtcaaggaacgaagattaccgtcagcaatctgtttttcaatacgccagcccgcttgaaatacgtgaaaacactgcacacagaattagcgaacatcggggacatcgtcaatcgactggcattgagtcatccatcgattgcttttcgtttagtacatgatggaaacaaaatgctggcaactgctggaaatggcgatctgaaacaaacaattgcgggaatctacggattatctaccgcaaaaaaaatgctgaaaatcgaaggaaaagatctagattttgagttatttggctatgtttcattgcctgaggtgactcgtgccagtaggaattacttatcgacgatcatcaatggacgttttatcaagaacttttccttgaataaagcaatcgttgcaggttatgggtcaaaattaatggtcggtcgtttccctattgctgtattggaaatcaaaatggacccgcttttagtagatgtaaatgttcatccgacgaagcaggaagtccggctgtcgaaggaaaaagaactaacagagctaattagtaacgccattcaaaaagcattgtctcaagaaaatctgattccaagtgcagcggataatctacggtttaagaaaaaagtacctgatcagcctaaaacagaacaaatcgaaatcgatttgtcctacgcttttgaagaagaaaaacctaaaaagccaagtagtttgaattttgatcgagagacaggtacctttttcgtagaagaactaaagaacacatttgttgacagaattgttgataagtctgtggaaaatgttgaaaactattctggtttttctgaagaaaacaccacttatccagaaaaaacagcgaaaacggtggataagtttggtgaaaatgttgataactttgtagaaaaaacagtggaaaaatctgaaaagaaagaatttcccattgtggataacatggagaaaacaaatgaagaacaagcagataaatccgtagaagaggatgaaaagatttacgaggaagaattgacactccatcctgaatttgatttcactcaaggaaacgacaaaacattagaacaagccatcaagaaattagaaacggaaaaaccagtacaacgttttcctcagttggaatattttggacagatgcacggaacgtatctttttgcccaaagtagcgatgggttgtacatcattgatcagcatgctgcccaagagcgcattaagtatgaatatttccgggaaaaaattggggaagtatctgatgatctgcaagaattgcttgttccatttgtgttagactatccaaacagtgatgctttgaaattaaaagagcaaaaacacttgctagaagatgcagggatttatttagaagaatttggtcaaaacagctttattgtacgggcccatcctacttggtatcccaatggagaagaagaatcgattattcgggagatgatcgatatgctgctgacaactggaagtgtgagtgtaaaaaaattccgtgaagcaacagcaatcatgatgagttgcaaacgatcgattaaagccaaccattatttgaatgaagcacaagcacgtgtgctgctgaaggatctggcacgatgcgaaaatcctttcaattgtccccatggccgtccagtattgattcactttaccaattcggatatggaaaggatgttcaaacgaatccaagacccgcat

SEQ ID NO: 21606 - DNA, 795 bp, Enterococcus faecium
gtgcgggtattgtttattggtgatgtagtaggttcaatgggacgagagatgattactgaatatcttcctagattgaagaagaagtaccgtccgcaagtaacgattgtaaatggtgagaatgccgcttctggacgtggaatcacagaaaaaatctataaaaaatttttgcaagacggcgtagatgtcgtgacgatggggaatcatacgtgggacaaccgcggaatctttgagtttgtaaatgaagctaaaaagatggttcgtccggcaaattttccggaagggacgcctggacaagggatggtctttgtcaaagtgaaccaagtcgaactggcagtgatcaacatgcaggctcgttcttttatggtggacttggatgatccttttcgtaaaatgaatgagctggtagaagaagccagaaaacgtacgccgatcatttttgtagattttcatggagaaacaacaagtgaaaaacaagcaatgggctggtttttagatgggaaagtttcagcagtggtcggtacacatacacacgttcagacaaatgatgcgcgaattttgccaagaggaacagcgtatctgacagacgttgggatgacaggtccctatgatggtattttgggtatgcgcagagaacctgtaatcgaaaagtttctgactgcattaccaaaacgttttgaagttgtggaacaaggccgatcgattttaagcggctgtatcttggaattggatgatacgacaggtcatgcaaaagaaatccagctgattcagatcaacgatgatcgaccgttcatggag

SEQ ID NO: 21607 - DNA, 855 bp, Enterococcus faecium
atgaaaatggataaattacttgctctttacccacaagcacagaaaaaaaactctccagcatcagaagcggatatcctttcttttgcaattgatgatgcttttatctggatcaaacaagattcattatctcaacaagaaaccagccttttgaaagcgttattccctgtaatcaacgatcaaaaaaaacacccatggtatcactatctttttaaagatgcttcttgtgttcaagaaaaaagctttcgtttgatccagcttcacgtcgaatcaaaaggagaattcttaaaaaaagaatggcaagatactattttggaattatttcgctattctgctgatttctttttttatacagacacagatgcgctcttagtcgaacaaataaaccgtgattatcttgatgctactgaaatcaacggtatttttctatctttagatgctgattttgatacgacaacgtctgtattcgttggttctttccattcacctggcaccgacctcgtccctttgtttgctgaagaaagaaaaatttttttaacagagcaaaacaatctttatactcacagccgtactttttctatgcaagatgtggctttacattactatacaaaagatactgtaaaagatagtaagttgatcaaaagttacatagaactgatcaaacaaaatgaaatggaagtgatcattcaagaattatggaatgaattaggcaatgtcagctctgctgcaaaaacactgtttcttcatcgtaatactctaaaatatcgaatcgaaaaatttcaagaacagtctggtttcaatctaaaaaaagccaacgatttactgttttgctatcttttattgcttcatgaacataat

SEQ ID NO: 21608 - DNA, 1167 bp, Enterococcus faecium
atgatgaatttatccaatcgatttagtcctaggctttctagaatagaagtatcaaaaatacgacaattcgatcagcaaatatcgtcgataccagatgtgatcaaactcaccctgggagaaccggattttccaactcctgaacatgtcaagcaagcaggaatagcagcgattgaagaagacttttctcactataccggaatgagaggattagaggaactgcgggaagcggcttgtatatttcagcaacagcgttatggattaacttatgatccgcaaacggaagttttgacgacagttggtgcaacggaagcgattgcctctgcgttgttatctgttttggaagaaggagacaaggttcttattccagcgcctgcttattcaggatatcagccattagtggaactagctggtgctgaattgatcccgatagatacttctgacacagggtttgtctgtcagccggaacaatttgaacgagcatttgaacaatatggatcagctgtcaaagcagtcattttaaactatcctaacaatcctactgggacgacattgtctgcaaaacaattgaaagcaatcgctgaggttttaaaaaaatatccggtatttgttataagtgatgaagtatatgctgaattgacttatagtggaacgcatatgtccatagctacttatcttccagaacaaacaatcgtgataagcgggttatccaagtcacatgcgatgactggttggcgagtgggctttatttttgctcaaaaagcccttattgacgaactaattaaagtccatcaatatctggtgactgccgctacaacgatgtcgcaaaaagctgcggctgaagcgctaataaatggggtgaaagatagcgagaatatgaaagagcaatatcaaacacgaagagactatctggtccagcaattggcgcctttaggatttgaagtgacccagccaaacggtgcattttacttgttttgcaaactcccagctgccattcaaactgactcttggcagttttgtgtagaattagcggaacaggcaaaagttgcgtgtatcccaggaattgcatttggcccagaaggagaaggttatatccggatttcttatgctagcagcatggaaaaattacatgaggcctgcaaacggatcaaagactttttaacagaacag

SEQ ID NO: 21609 - DNA, 858 bp, Enterococcus faecium
atgttatatacaatgaaagagttattgaaagtggctaaagagaatcaatttgcagtaccagccttcaatatttgcagctatgatatgatgaaagcaatcatcgaagaagcagagagattagaagcaccagtaatcttagaaattcatcctgatgaaatcgcctatttaagtgatgagtttgttgcggcagtaagagcctatgcttatacaagtaaactgccgatcgttatccacttggatcatggcggtacgatagaagatgtcttacgggcgattcgaaacggctattcttccgtgatgatcgatgcgtctttgaaatcattcgacgacaatgtacagattacgaaaaaagtggttgcgttagctcatgcggtaaatgtctcagtggaggctgagcttggaacgattgggaataatggttctgctgaaggaggtgctgaaacaatcatttatacagatcctgatcaagcgaagatttttgtgaaagaaacaggaatcgatacacttgctgtagcaattggaacagcgcatggcttgtatccgaaaaacagaactccaaaattaaatatcgacttactgaaagaattgaaccaacaaatcgatcttccatttgttttacatggcggttcaggtaatccggacgcagaagtcagcgaagcagtaaaatacggagttgccaaagtgaatttgagctcagatcttaaaagcgtctttttcaatgctttgagagaaatattgagtgaaaatccatcgatgtacgagccgaatgcaatttatccagcagctaataaaaaggtacaagaagtggtcaaacataaaatggaaattttgaacacagtaggcaaggctagtttatac

SEQ ID NO: 21610 - DNA, 1779 bp, Enterococcus faecium
acgaaacaagaattatttgaactattccatgcatcagcaaatggattgacagaagaacaaatcgaacgttcaagagaaaattacggtgaaaatgcgatttcatatggcaaaaaaacaccattcattgtagaaatattgaaagcatacatcacgccatttacattagtgttgatcgcattaggaattatttcattcatcacggaatatgtattagcagctcctggagataaagatcttttcggtgtagccattatcttcactatggttatcgtcagcgggacaatgacgttgattcagtccgtacgttccaatcaagcggctgaaaaactgaaatcacttgtgaaagtaacggcagctgtaaaacgtaatggaaagtacacagagattcctatggaagaaatcgtctgtggagatcttgttcggctttcagcaggggatatgataccagcggatatgcgtttattgtccgcaaaggatttattcatttcccaagcagcattgacaggggaaagctatccagtagaaaagcatgcgaaagtatgtgaagacgatcagcaaagcgaaacaagttacgaaaatcttgtctttatgggaagtaatgtcatcagtggaagtgcggaaggaatcattgtttctgttggaaatgaaacactatttggtcatgtagcagaaacgctatctgaaaaaccaattcaatcaagctttgaattaggcatccataaaacatccatgctactgatcaaatttatgtcattgatggctccagcagttatcgtcatcaatgggcttacaaaaggggattggctagaagcttttctttttggactatctgtagcagttggtctaacacctgaaatgcttccaatgatcgttacgacgaatttggtcaaaggagcaagtgtgatggccaaaaaaggaacagtgatcaaaaatttgaatgccatccagaactttggtgcaatcgatgtgttatgtacggataaaacggggacattgacacaagataaaatcattcttgaatatcatatggattgtgaacgaaatgaagatgatcgtgttttgcgccatgcgtatctaaatagctactatcaaacagggctgaaaaatttgttagatgtggctatcattgatgaagcaacagaaactttagatacagataagatcaattatcaaaaagtggatgaaattccttttgattttgaacgtcgtcgtatgagtgtcgtggttgctgatccagctggtaaaacacaaatgatcacaaaaggcgcgattgaagaaatgctgaacatttctaaatttattgatcttggcggtactgttacaccattaacaaaagaatcaaaagaagccgtacttgcaaaagtacagtcacttaatgaagatggcttacgagtgattggtgtcgcacaaaagaccaatccaagcgtcgttggagaattttcagctcaaagatgagtcacactatggttaagatatgtgttatcttgctttccttgatccaccaaaagaaacaacgaaacaagcgttgaacagctctgaaagaacatggtgtagctgtcacaagttctgactggggacaacgaattagttacacgttcagttgtgcctgtacaagtatagtctagagatcaattgaattggttaccaggtgagaaaatctcggaaatagagtgatcatgaattaccacacagtagactgacagaccatgaagtattcagtaaaatttgaatcctcagcaacaaatgcacggatctttgaccgaccagaatataacgata

SEQ ID NO: 21611 - DNA, 1932 bp, Enterococcus faecium
atgatattattacaagccaatcagattgctcgccattttggtgcagaagtcttatttgaaaacatacatttagaaatcagtacaggcgctcgtgtcgctttagttggcagaaatggcgctggaaaatcgactttattaaagatcattgctggaattgaagcacctgatgaaggaaagatcgctaaaaataaaacagcgactctcggatacctcgctcaggacacaggacttgattccaatgaaacagtttggaacgagatgctgaaagcttttgaacaagttagacaaatggaagagcggatgcgcgagctagagattttcattagcgaaggtacgccagacacacctgcttatagttcttatttaaaagaatacgaccggctgcaacacgatttttcagatcgaaacggctatggttatgaaaatgaaattcgttccgtattgcatgggtttaaattcgattcttcattttatgatcagaaaatcgatactttatcaggcggacagcgcacacgtttagctttagctcgcatgcttttgcaacaccctgacattttgattctagatgaaccaacgaaccatttagatatcgagacactttcctggcttgagaattatctgcaaagctatactggtgcattattgattgtttcccatgaccgttattttttagataaagtagtcaatgaagtctatgaattaagcagaagaaaaatgcgccattacaaaggtaactattcgaaatatctagatttgaaagcagaacagttagcaagtgaatggaaggcttatgaaaagcagcaaacagaaatccataaattagaagacttcgttgctcggaaccttgttcgcgcctctaccacaaaacgagcgcaaagccgcagaaagacattagaaaaaatggaccggctggatcgtcctcaaggggatgaaaaacaagcaaactttctattcagtatagaaaagccttctggaaatgtagtcttgcaaatcgaagatgccgctatcggatatgataatgtcaccttatctgaaccaatcaatctagatatccgtcgtcaagaagcgattgctctagtaggtccgaatggtatcgggaaatcgacgttgctgaaatcaatcattcaccagatcccttttatccgtggaaaagaaacgctagggacaaatgtcaccatcggctattacgatcaaggtcaagctgatctgcatacaaacaagacgatcctagcagaattgtgggatgagcatcctaccactccagaaaaagagatccgaagtgctttaggtgctttcttattttctggcgaagatgtagaaaaaccaatccctctgctaagtggcggtgaaaaagcacgggttgctttagccaagttagcgatgaacaaagaaaattttttgattttggatgaaccaacaaaccatttagatattgacaacaaagaagtattagaaaatgcattgatcgattatgacggcacactgctttttgtttcccatgaccgatatttcatcaatcggatcgcgacaaaagtcgtcgaactctctgaaaatggcagcaaagtctatctaggagactatgattattatttagagaaaaagcaggaagaagaagaaatcgccgaattgttggcacaagatgagccagaatctgctcctgctcccacgaacaaatctgattattaccaaagcaaagaacagcaaaagcttatccgtagccttcaacgaaaaattactcaggttgaagaagaaatggcgcggatcgatgaatggatcgatcagttggaacaagaaatggtcgcgccagaaaacctggaagatcacgtaaaactcaatgagctgaaccaagatttagaagctgctagacaagatcaagaaacaaaattgacggaatgggaagaactaagcttggaattagaagaatatgaaaat

SEQ ID NO: 21612 - DNA, 816 bp, Enterococcus faecium
atgagttatatctatttaattaaagaaaattatccatttttaacgaagtctgaaaaaaaagtcgctgattttattttaaattctgggaaaactattatttatagtacgatgagtgatattaagaaaaacacaaaagttggcgatgctactattattcgcttttgtcaaaaaattggtttttctggtttttctgatttaaaaattgaaattgcaaaggaagactttagtcaaaaaaaagaacatccgactagtgtaaagtactatgatgaaattgctaatagtttaacagaagctctctattccactattaggcttttagacgaagaaaaattgaatgaagccattaaaatgatcactcaatcaaaaaacatatatatatttggagtgggatctagtggaaatactagtcttgatttagaaaatatgtttcttcgcgtaggagttcaagcaaaagctgtactagaccctcattttcaagcccaagtcgcttctttattaacagttaatgatttagtaatcattttttctttatctgggaaaacgaaagatacttatgattcattgaaaatagctaaaaaaaatggcgcaaaaattattgctataactaactatattcattcacctataggaaagtctgcagacttagttttacaaacagccattgaagaatttcttaatggtggatctttagctggaaaaatatcacaactttatatttgtgatctattagttcatggttatgaacaaaacaataatattgattcagttgaattaagagaaaaagttttgcgctctattattgataaaagtattgag

SEQ ID NO: 21613 - DNA, 2061 bp, Enterococcus faecium
atgtactttacgattgcaggcaataccaaaacagataaagagttaataaaaaaagcaacgaaggaagtaggaaagcgtacttcttttttaccgaaaacaattaaatattctgtcattgaaacggaagaacagctacatgtgttagggaaagtactggaacacgaaagtcgatcttctgttaagttgactctcacgttacatgacacagaaggaaaaatagagaaagctggtacagaatacgtttttgggcaactggattatcaaatttcagaaggtttctatcctacattgatggatttaatccgccttgatgtgtttaaagaaacggatgaaactatgagtgtggaagagtcttatcgaaacgaaaaacttttacaagttttagaagaagagttagagagcgaccaaagaaaagtgaatcaagggagtgaagtcgaagtaaatgaagaagtaccatgggaacgaccaatatttccaaagaaggagtcaaaagaaaaagagacagtctatgttgacgaacaagctgatattccgactcagaaatcgatatttgaggaagagaacgatgtgatgggtcaattggaggtagatccctttgaagaaacaatggaggatgaagagacggccgaagtagaagttgatccagttgaagctaatgaagagtcaacatggactgaaggggattctcaggaatatattgaaccacttatcagtgaagaagtagaaaaaaacgaaatagagatacaaaaggcaactgtatttgattatattttggatcaatatccgccagagcatgaatggatgaaagaaaaaaacaaattatttttaaatgagctttattcgaaatatcaattaccccaaacctatcaagcatttttagagagtaaagaagaattaatctcacagggtaaaggcacacttttagaacagttagagtctgtccaatcaacaaattggcatgagcttgcacaagaagatttattagccacctttgaagaacgtcaacaagaaacagatcaagaaattaatgagtatgcgacggaacagtcgtctaattgggagaaagcaaaagaggaactaaataaagaagaacagcgagtgattgaagaagaagtacaaaaaattaaagagcgatacgaaaagaaacgcgacaatgcgtattccttgtgtgtagcaaagatcaataattttactcagacgaatcaagaagcgttatcgaaagaaaaagaaaacttgttaaaagaacgtattaaagaacgaaaagaagaattttaccgaggtttgcgtacagataagctaaagattagcaaagaattaaatgaacaactgaataagctatatcaaacaacgactgaagttcttatggaaaaacacgaaaagatccagcaagaattacaagtgcaaattccaaaatggaaaaaagagtatgaaattcaacaacaagaattgaaagaacaagaagaaaaacaacggcaaaaagaaaaagagcgcgaacaattagaactaaaaaaacgtgaacaggatcttgcggaacaacaaatggcaatagaaaaacaacggttaaaccaagaaaaggaaaaagaagcagctgctcgtaaggaacgtcaagaacaaatggatacattgcgacaagctcagttaaattatctagcacaacctcaaccaacgccttcagtagctgctgttcaaaccccaatgaacaaccaaacaaatctaactccttcaccacagcgttcctttaacggatggatggtgggatgtattgcaagtttaagcttgcttctaggtggaggaacagtatttgcttttaatcatatcaatcaatcttcacaggctgattctgtggccacaacgacgtcaatcaaggaagaagcccaagaacaagcaagaaaagagtatgaacaacaattagaagaattattgaatcgtaccaatcagtcaacaacagaatcaagtatggaaaatagcaaagagagtgatcctagtaaggctaaagaaggatcaagcgattcaactgtacaatcaaacacttccgaaagttcagaatcaaatgaggtgaaa

SEQ ID NO: 21614 - DNA, 1395 bp, Enterococcus faecium
atgattaggataaaaggaggcggtacaatggcaaaaaaatcaaaagtacaatttgtttgccaaaattgcgggtatgtgtcgcctaagttcttgggacgctgcccaaattgcggaaaatggaatacgatggtcgaagaaatcgaacaagatacaacggaccgcagaactcggacaagtttgacaggagaaaaagcaaaaccaacaaaaatcgcagacgtcgtccctaaaaaagaacctcggatcaaaacaaaattagaagaactgaaccgtgtgttaggcggaggtgtggtgccagggtctatggtcttgattggtggcgatccaggtatcgggaaatccactttgctgttacaagtttctcagcaattagcagccataggcggaaaagtcttatatgtatccggcgaagaaagcgcagagcagataaaattacgcgcggaacgcctcggaagtatcaacacagaattttatctatacgctgaaacagatatgaacgaaatcagtcgtgccatcgaacatatctcccctgattatgttatcattgattccatccaaacgatgacgcagccagacatcacaagtgtggcaggaagtgtcagccaagtaagagaaaccactgcagaactactcaaaatcgctaaaacaaatgggatagccatttttatcgtcggtcatgttaccaaagaaggctcgatcgccggcccaagaatgttagaacatatggtggatacggtgttatattttgaaggtgaacaacatcatagttttcggattttgcgagcagtaaaaaaccgatttggctcaacgaatgagattgggatttttgaaatgcatgagcatggattggaagaagtcgctaatccttcacagattttcttagaagaacgcctagacggtgcaactggctctgctatcgttgtggcaatggaagggacacgtccaattttggtagagatccaagcattagtcacacctactatgttcggaaatgccaaacgaacaacaacaggtcttgatttcaatcgggtatctctgatcatggcagtgctggaaaaaagagctgggttgcttcttcagaatcaagatgcttacttaaaagctgcaggtggggtaaaattaaatgaaccagcgattgatttagctatcgctgtcagtattgcttcaagctataaagaaaaaggaacacagccaacggaatgtttcatcggtgaaattggactgactggagaaatcagacgtgtcagtcatattgaacaacgagtcaaagaagtccaaaaactcggcttcacaaaagtatacctacctaaaaacaacttaggtaactgggaagcgccaaaaggaatcgagatagttggagtagcaactttggctgaaacgttgaagcgtgtgttccgc

SEQ ID NO: 21615 - DNA, 2358 bp, Enterococcus faecium
atgaataaccgaatccttgaaacattggaatttgaaaaagtcaaacagatggtcagacaatttgtagtgactgcacaaggaaaagaagaactggcagaattggtaccagtgagtgagaaacaaacgatcacaaactggcttcaagaaactgaggatggattgaaagtgcaacgtctgcgaggcgggatccctatacctaaacttgaaaatatccgtccccatatgaaacggatcgagatcggagcagacttgaatggagtggagcttgcacaagtttccagagtattgtctacgacaagcgaattgaatcgtttcattgatgatctttctgacagtgaaatcgaatttgcacgtttgtatatgtgggcagatcagttagtcacgatccctgttttgagccgccgtttaaaggaagcaatcgatgaagacggacgcgtgactgatgacgcttctcctgagttaaagagcataagacagaacattcggcgaagtgaacaagctgttcgtgaacagttagatgggatcgtccgtgggaaaaatgcaaagtatttaagtgatgcgatcatcaccatgcgaaatgaccgctacgttatcccagtcaaacaagaataccgcggtgtatttggcggtgtagtccacgatcaaagtgcttcaggacagactttatttattgaaccaaaacaagtggtggatttgaataatcgtttgcgtcaataccaaatcgctgaacgaaatgagattcaacgtattttaagtgaactttctgctgaacttgttccccatcgtcaagaaatcatccacaatgcttatgtgattggtaaaatggatctgatgaatgcaaaagcacgatttggtaaagaagtaaaagccatcgtgccgggaatcagtgaagacaatcatgtcgtcttgaaacaagcaagacatccactgatcgatcaggaaaaagtagtttctaatgacatcacaatcggaaaagactatcaagccatcgtcattacaggacctaacacaggtgggaaaacgatcacgttgaagactttaggtctgttacaactgatggggcaagcaggattaccgattcctgcaggtgaagaaagtcaaatcggtatttttgaggaagtatttgcggatataggagacgaacagtcgattgagcaaagtctatcgaccttttcttctcatatgacgaacactgtagatattttatcaaaagtcaatgaaaaaagtctggtattatttgacgagctcggtgcaggaacagatccgcaagaaggtgctgctctagcaatcgcaatcttagatgatcttggtaaaaagtctgcttatgtgatggcaacaacgcattatcctgaattgaaagtttatggatacaatcgggcaaatacgattaatgccagcatggagttcgatgtggatacactaagtccaacgtatcgtttgctgattggcgttcctggacgaagcaatgcgtttgaaatctctagccgattaggtcttgatacagaagttattgatgaagcgaagcagttgatgaatgatgagagccaagatttaaacgaaatgatcacagatttagagaatcgccggaaaatggcagagaccgaatatctggaaatgcgtcattttgtttctgaggcacaagaacttcacgatgatttgaaagaagcttacagctatttctttgaagaacgtgaaaaagaaatggaaaaagcaaagaaaaaagcaaacgaagtcgtgtcagaggcggaagaaaaagcagaaaaaatcattgctgatattcgtaaaatgcaacagcagattgggcaaggaaatgtgaaagagcatcagttgatcgatgcaaagacccaattagcaaatctacatcaagaagaaactttgaagaaaaataaagtattgaagaaggcgaaagaacaaaaaacgttgaaaccgggagacgaagtgttggttacgacttacggccaaagagggacgcttttacgtaaaaacgggaatcagtggcaagtagaaatcggtatattaaaaatgaatgtgtccgaagacgagctgacgcctgttgctcctcaaaaagagccgacacaacgagttatccatgctgtacgatctgaatctagtagtcacgtgccgaatcaattggaccttcgaggaaaacgatacgaagaagcgctaagtgaggtagatcaatatttggattctgccattctagctggttatcctcaagtgactattgtccacggaaaaggaacaggcgcacttcgcaagggaattactgattatcttaaaaaccatcggagcgtcaaaagctttgagtttgcaccggcaaaccaaggcggaaatggtgcgacaattgttaaatttaag

SEQ ID NO: 21616 - DNA, 1233 bp, Enterococcus faecium
atgaatcgagtggtaattactggctatggagtcacttcacctattggaaatgacgcagacagctttttgaatagcttaaaagaggggacgaatggcatcgcaccgatcactaaatttgatgcttcagaaacagggattaccttagcgggtgaagtcaaagatttcccttacgataaatattttattaaaaaagatagcaaacgaatggatatgttttcgatctatggaatctacgctgctttagaagcaatggagatgagcggtttagataaagaaaaaatgaatcaagaccggtttggcgtcatcatcggatctgggatcggtggtcttccaacaatcgaaaaccaagttattcgtctacatgaaaaaggtgcaaaacgagtttctccaatgttcgtaccaatggcgattgccaacatggcagctggaaatattgctttgcgtgtaggtgcaaaaggtatttgtacagctatcgtaacagcttgtgctagcggaacgaattcaattggggaagcattccgtaacatcaaacatggctattctgatgtcattcttgctggaggaacagaagcaacgatttgtgagatggggattgctggatttgcagctttaacagcactctcagaatcaactgatcctaatcgtggttcgattccgtttgacgaaaatcggaatggttttgtgatgggtgaaggagcaggcgttctagttcttgaatctttagaacatgcacaagctcgcggtgccaaaatctatggagaaatcgttggatacggtgcaaactgtgacgcttaccatatgacagctcctactccagatggttctggtgcatctaaagcaatgaagcttgcgatggaagaagctggtgtacagccggaacaagtcggatatatcaatgctcacggaacaagtacaccagccaatgaccaggcagaagcaaaagcaatccaaatcgcattaggtgaaaatttcagagatacttacgtcagcagcacgaaatcgatgactggacatttattgggagcagccggcgggatcgaagccttggcaactttgctggcattagaacatcaatttatcccacctacgatcaatgtagaaaaacaagatcctgagattgacttgacagttgtcaaaaacgaaagcaaacctgcaagttttacttatgcaatgagtaattcattagggtttggcggacataatgcggttctgtgcatgaaacgctgggaggaa

SEQ ID NO: 21617 - DNA, 1074 bp, Enterococcus faecium
atggaacgtttgcttatattagaagatggaacagttttcgaaggaaaggcttttggtgcagatgctagtgtcttcggagaaatcgtttttacaacaagtatgactggttatcaagaaactatcactgatcaaagttttaacggtcaaatcattacatttacctatcctatggtgggtaattatggggtaaatagagatgattatgaatcgatttctccaacatgcaaaggagtagtagtaaaagaacatgcacgtgtagcttcaaactggcgaaaccaaatgacgctagattcatttttgaaacaaaaaggaattcctggaatatcaggtatcgatacgcgcgcccttactcgcaaaatccgtgaagtcggaacgatgaaagctagtatcgttgatgctggagattccttcgaacatgcatttgatcagctgaaagcaaccgttctagcaaccaatcaagtgcagcaagtctcaactaacaaaccttatccaagtccaggaacaggtcggaaagtcattgtcattgacttcggcttgaaacatagtattttacgagaattgagtaaaagaaactgtaacctcacagtacttccctataacacagatgccgagacgattttagcgctatcaccagacggagtcatgctgacgaatggacctggtgatccaaaagatgtgccagaagcaatcgaaatgatcaaaaaaatccaaggaaaagtaccgatttttggtatttgtctcggtcaccagttatttgctttagccaacggtgcagatacctataaaatgaaattcggacatcgaggattaaatcacccggtacgagaagtagcgaccggaagaattgattttacttctcaaaatcatggctatgcagtcgatgaagccacgattgatccagaaaaactcatcgtaactcatgtagaagtaaatgacggaacagtagaaggagtcaaacacagagattatcccgctttcagtgtgcagtttcatccagatgctgcccctggtccgcatgatgcactacatttatttgatgaatttatggaaatgatggacgcaggaaaggagcag

SEQ ID NO: 21618 - DNA, 1563 bp, Enterococcus faecium
ttgacaaacgttgccgatatgacgaacgttgaaaagattatcgtattagactacggtagtcagtataaccaattgatcacaagacgtattcgtgatcttggagtcttttccgaattattgagccaccgcattactgcagaagaagtaaaagcgatgaatccaaagggaatcattctttctggcggaccaaacagtgtatatgatgagaatgcatttgggatcgatcctgagatcttcaatttaggtattcctgtattagggatttgctatggtatgcaattgatcacgtacaaacttggcggttccgtagagcctgctaaaaaccgcgaatatgggaaagccttgttagaagtaacaagcgatcaagctgtcttgtttaaagaaacaccaaaacaacaaacagtatggatgagccatggtgacttggtaactaaagttcctgaaggctttgaaacagtcggaacaagcaaagattgtccgattgcttctatccaagacacaacacgtaatttttatggtatccaattccatgcagaagtacgtcattccgaatacggaatcgaattgctgcgccactttgcctttgatgtttgtcactgtgaaggtaactggacaatggataactttatcgatatgcaagtagaaaaaatccgtgaacaagttggtgacaaaaaagtcttgcttggtctttcaggtggcgttgattctagtgtcgttggggttcttttacaaaaagcgatcggtgaccaattgacatctatctttgttgaccacggtctgctacgcaaaggcgaagcggaacaagtaatggaaagtctaggcggaaaattcggcttgaacatcatcaaagtcaatgcaagagatcgcttcttagacaagttgaaaggtgtatctgacccagaacaaaaacgtaaaatcattgggaatgaattcgtatatgtttttgatgacgaagcaacaaaacttgctggtgaagaaggcgtctctttcctagcacaaggaacgttgtatactgacgttatcgaatctggtacagaaacagcacagacgatcaaatctcaccataatgtaggtggactgccagaagatatgcaatttgaattgatcgaaccattaaacacattattcaaagacgaagtccgtgaattagggactcagttaggcatgcctgattcaatcgtttggcgtcagccattccctggtcctggtcttggtattcgtgttcttggcgaaatcactgaagacaagctagaaatcgtacgcgaatctgatgctatcttgcgtgaagaaatcgcagctgctggacttgaccgtgatatctggcaatatttcactgttcttccagggatccgctctgtcggtgttatgggtgacggacgtacttacgactacacagtcggtatccgtgctgtaacttcaatcgacggaatgaccgctgactttgcccgtatcccatgggaagtcttgcaaaaaatctctgtacgtatcgtaaacgaagtagcccacgtcaaccgtatcgtgtatgacatcacttctaaaccaccagcaacagtggagtgggaa

SEQ ID NO: 21619 - DNA, 654 bp, Enterococcus faecium
atgaaatataaaacatcatttcaggtggctggtagcttctttcttgtcctgtttttcattttgggctggatcgtaaagttccatctgtcgtggctttctggtttcgatcagtggtttacaggcattgtcagagcttcttatcctgatctgaacagctaccaactctttatgactaaattcggtaatcctcttaccgtcatcattttatttgcttgtgcggctttatggatgtggtataagaaaaaaagggcagaaacattttggttcgtttctggatttattgtaattgctggaatcatcaacccggtgatcaaactatttttcatgcgagagcgtccttcattggcgcacttagtagttgaaacaagttacagtttccctagtggacatgcagcaggcagtatgattctttacggttctttactatttctgcttccagcttttgttcaaaaaagaaccttacgcacattgcttcaattgctgatgatgtttattatagtaagtgtcgggataagccgcatttatctgggcgttcattttcctactgatatcatcggcggctacttactcagtctttcttggctgtgcctgacttatccagtgtatagagaaaaaagaaaacaaatagataactcttacagaaagaaggacttt

SEQ ID NO: 21620 - DNA, 741 bp, Enterococcus faecium
atgattgaattcatcaatgtaagtaaaagttacgggaaaaaacaagcattaaaagacttgtctctctcgataagacaaggggaaatttttggatttttaggacataatggtgccggaaaatcaactacgattaaaagtttagttagtattattgaaccatcatcgggaacgattttagtagatggaatgaaattgacggaaaatcgattgagtatcaaacaaaaaatcggttatgtgcctgattccccagatatttttttacaattgacggctggagaatattgggacttgatttcagctgcctatgaattagacacacaaaaaaaagaaaagcgtttagcagaattgacagcgctttttgatatgtatagtcatcaaaatgaaacaatcgcaagtttttcacatggaatgcgtcaaaaaacgattttgatcggcacgttgctgccagatccagatatttgggtattggatgaacctttgcaaggacttgatcctcaagcagcatttgatttgaaagaaatgatgaaggctcatgccgcaaaaggaaaaacagtcattttttctacacatgtattggataccgcacaacagttatgcgataaactggctattttgaagaaaggtgaattgatttatcagggggcagttagtgaattattgaatggctcacctgatgaaacgctagaaaagatttatttgaaaatggctggaaggcaagcgacaggagatggaccgtatgta

SEQ ID NO: 21621 - DNA, 1359 bp, Enterococcus faecium
atgaaaaaaatatcaacatatgaaaataagaaagtgcttgtcttaggactcgcaaaaagcggagtaagtgcggccaaattattacatgaattgggcgcacttgtcaccgttaatgatggaaaaccttttgacgaaaatccggaagcacaagagctgctttctttagggataaaagtaataacaggtagtcatccaatcgaattgttggatgaagaattttcattgatggtcaaaaatccagggattccctacagtcatcctttagtagcaaaagcccaagaaatgggtattccggtaattacggaagttgagctagcttacgaagtagcggaatgcccaattattgggattacaggaacgaacggaaaaacaacgacaacaacgatgacaggactactactgaatgcaggagcagatcaaggaattgcacgtttagcgggtaatattgggtatccagcaagtggtgtagcgcaagaagcaaaatcagaagataaaattgtgatggaattgtctagcttccaactcatgggaatcacagatttccgccctcatatagcggtgattaccaatatctatgaagcacatattgattatcatggtacaagaaaagaatatgtcaaagctaaatggaaccttcaaaaaaacatgacagaaaaagattatctgatccttaactggaatcagtcagaactacaagaattagcgcaaagaacaaaagcacgcgtactgcctttctcgacaaaagaagtgttggaagacggtgtgtatgctgacgattactcaatatactataaaaaagaaaaaataatggaaatatctgaacttggcgtaccaggtaagcataatgtagaaaatgcactagctgctatttctgtagcaaaattgtatggtatatcaaatgaagctatacgagaaacgttgcattttttccatggcgtaccacatcgtacgcaatatgtaggagaaatccaaggcagaaaattttataatgattcaaaagcaaccaatattttagcgactaaaatggctctaagtggatttgaaacgtctaaggtcgtgttattggctggcggattagacagaggaaatacatttgatgaattaattccttcattaaaaggaatcaaagcaatggtcgtatttggccaaacaaaagaaaagttgatggatgctggaaaaaaagcaggcatcgagacaatagtaacagccgattctgtagaacaagcagttcctttagcattagaaaacagtacagatggtgatgtagttttattatcaccagcgaatgccagctgggatcaatacccaaattttgaaactagaggaaacagattcatggaagctgtgaaccgattaaaa

SEQ ID NO: 21622 - DNA, 1074 bp, Enterococcus faecium
ttgaagattactttactatatggcggacgcagcgcagagcatgaagtgtccattctttccgcattttcagttttaaatgccatttattataattattaccaagttcaactcgtatttattacaaaagaaggacaatgggtcaaaggtccattactaacagaaaaacctgccagcaaagatgtcttgcatctttcatgggacccaagtggacagacagaggaaggctttacaggaaaagtgatcaatccgggcgaaatcaaagaagaaggagccatcgtttttccagttttacatgggccaaacggggaagatggaacgatccaaggcttcttagagacattgaatatgccttatgtcggcgcaggcgtattgaccagtgcatgtgccatggataaaatcatgaccaagtatattttacaagctgctggtgtgccgcaagttccttatgtaccagtacttaagaatcaatggaaagaaaatcctaaaaaagtatttgatcaatgtgaaggttctttgctttatccgatgtttgtcaaaccggcgaatatgggttctagtgtcggcattacaaaagcagaaaaccgagaagagctgcaaaatgctttagcaacagcctatcagtatgattctcgagcaatcgttgaacaaggaattgaagcgcgcgaaatcgaagttgctgtattaggaaatgaagacgttcggacgactttgcctggtgaagtcgtaaaagacgtagcattctatgattatgaagcaaaatatatcaataataaaatcgaaatgcagattccagccgaagtgccagaagaagtttatcaaaaagcgcaagagtacgcgaagttagcttacacgatgttaggtggaagcggattgagccggtgcgatttctttttgacaaataaaaatgaattattcctgaatgaattaaactctatgccaggatttacggagttcagtatgtacccactcttatgggaaaatatgggcttgaaatacggtgatttgattgaagaactgatccagttaggaatgaatcgataccatcagcgtcaatctttttttgaaaaaaatgaa

SEQ ID NO: 21623 - DNA, 1008 bp, Enterococcus faecium
atgacagtaaaagtaggtattaacggatttgggcgtattggccgtctggctttccgccgcatcaaagaagtctcagatgatattgaagtagtagcaatcaacgacttaacaagtccaactatgttagcacaattattgcaatttgactctactcatggtacttatcctggcacagttactgcaacagaagactcaatcgtagtggatggcgaagcaactcgtgtttatgcagaacccgacgcaagcaaaatcccttgggcaaaagaaaacggtgtagatatcgtactagaatgtactggtttttatacatctgaagaaaaagcaaaagcgcatttagatgctggtgtcaaacgagtagttatttctgccccagctggtgctatgaaaaccatcgtctataacgtcaatgatgatacattagatgaaaacgacaaaatcatctcagcaggttcatgtacaacaaactgtttagcacctatggcttatttcttaaataatgaatttgggatcgaagttggtacaatgacaacagttcatgcctacacttccacacaaatgctcttagatggacctgtaaaaggcggcaatttgcgtgctgctcgttcagctgctgacaatactatcccacattctactggtgctgcgaaagcaatcggcttagttatccctgagctacaaggaaaattacaaggacacgcacaacgtgttccagtcgttgatggttcattaactgaattggtttcagtattgaaaacaaaagtaactgctgatcaagtaaacgaagcaatcaaaaaacacacagttgacaatccttcattcgggtatgatgaccgtcaaatcgtttctagcgatgtcattggaacaactcaaggttcgatctttgacccaacgcaaacagaagtaacaactgctggtgatttccaacttgttaaaactgttgcatggtatgacaatgagtatggatttacttgccaaatgattcgcttactagaaaaattcgctaacttg

SEQ ID NO: 21624 - DNA, 2226 bp, Enterococcus faecium
atggagaatttctcactaacagaaaaccgaaccttttcacggctagaaaagcaaatgatctggaagaaaccgaaaagccatcggacaagtgcagaagaatggcggatcgcctccgaaatcaaagggaattggcaagatcctgaaatgaaaatcagtaacgtacttttggaaggagatgccgggtcggggaagacacaattagccaaagcactatctgctgatctgcaacttccctatacaaaagtgacctgttttgcagatatggacaaatcagatgttttcggagccttattacctgtagtagattctaataaggaacaagaccaagaattactagaagctatttaccaaacagatacacttgaagctgtactgacactgatccagaaccattacggcattgatcctttttctgctaaagaaaaattagcagagctagttcaaaggatcgaagctgattatccagatgcaatccattacagctattacccttctgaaatcgttcgagcgattgaaaaaggatatttattagagattcaagagccgactgtcatccgagatgcctctgttcttgtggcacttaactcagcgctcgaaccaaatgggatgttgaatttaccgacaggaatcattcgtcgccatccagattgcgtcattgtgatcactacaaatcgaaattaccaaggaaatcgcccattaaatgaatctttaagagatcggatgcaacatgcggaaaaaatggatcttcctgccttagaagtcatggcagaacgtgcgatggcgaaaactatgatccaaaaacaagaacttctcttaaagatggcagagattatccgtttgttggatgaaactgcaaaagctaacgccatcaaaggtgtagcaggaatgcgttcttatttttattgggcaaatacctataagcaaggacaagatttactccagtcgatttatccaaaagttttgtataaattatccactgattcagatgaattggcaattcttgaacaagctttgtctgacagtggattgctactggaacttcaggacatattgagaaaagaaaaatggggtcatcctcaatctgagcatacaaaaggaagaaccattagcgccgaagaagcaaatgaacgaaacatcactgaaaatgctgaagaaattctgcgcttagatgaaaagaaatcgttgtctgctgaagaaccaaatgagggagaagagaaacaagaagaaacaatagaaaaaaacgagattcctcctcaaatgcaaaaagaacgcagtagcgatatcgaaggaaaaaatcaaaaagaacaacaaacaggagatgattctcaagaaatgtctgcttctgacatggaagcacatgataaggaaatcaagaagcaactgaataaagaagcgcgacaaatcatgaaggaaacgattcatgaaaaagaaggtctcatcgttcaccgaccagctttccaaggaaaaacgccggaagcacgtgagctacacatgcaagtaatgccaatagtagaatcacttagccggcaaattttagagttactggataatgaacaaacagagacgtaccaaaaaggaaaatacgaaggtcagcggttcaatgcaagcaaagtagcatatggtgatttgagaaattttgacaaaaagaacccgccacatgagcaaccttctttagcggtagctgtacggatcgatgaatctgggtcaatgatacgggatgatcggatcgaagcggcaaaaaaagcagcgattgccattgccgaattttctaagaaagtcgatatcccattgttgatttacggagatacagcagaccgttcgtcaagagaaaagacttctttgttttcttataaagaatttgaagacggatttcaatggttaaatgaaaaattagtcactatgaaaccaaggcaaaacaatcgtgatggtgctgcacttcgtttagcagcagaaaaattaaacagacaatccgcaacaaccaaactgttgcttaatattagtgacggtcagccaaaagcgttgccggattatacaggcaaaaaagcaaaagaagatatccagtctgttttgaaagaatatgaacgtcaaggaatcctatttgtctccgcagctattggccaagacaaagaagaaatcaagtcgatctacggtgaaagtcgttttgtagatattactgacttgaatgaatttcccaagcaaatgattcaactgattgcccgctatcta

SEQ ID NO: 21625 - DNA, 2007 bp, Enterococcus faecium
gtggcagaaaaggaaactttttatatcactacgccaatctattatccaagcggcaaacttcatatcggcaactcgtatactacgattgcatgtgacgcaattgctcgttataaacggttgatgggctttgatgtgttttatctcactggagtggatgaacatggtcaaaaaatcgaaacaaaagcagaagaactaggtgtaaaaccgcaagaatatgtagataaaatggcggctgatgtcaagaaattatggaaaacgcttgatatcagttatgataaattcattcgcacgacagatgattaccataaagcagctgttcaaaaaatatttgatcgtttattagaacagggagatatttacttaggtgaatatgaaggctggtactctgtttctgacgaagaattctttacagaaacacaacttgcagaagtgtacaaagatgacgaaggtaacgtgatcggtggtaaagcgccaagtggacacgaagtagaattggtaaaagaagaatcatacttcttccgcatgagcaaatacgcagaccgtctattggaatactatgaagaacatcccgaattcatccagccagaatctcgtaaaaacgaaatgatcaacaactttatcaaaccaggattagaggatcttgcagtttcacgaacaacttttacttggggagtaccagtcaagagtgatccgaaacatgtggtgtatgtatggatcgatgcattatccaattatattactgcactaggatatggctccgaagatgaaagtctattcgaaaaatactggcctgcagatgttcagatggtcggtaaagaaatcgttcgctttcatacgatctattggccaatcatgctgatggcccttgatttgcctctacctaaaaaagtatttgggcatggctggctattgatgaaagacggaaaaatgtctaaatcaaaaggaaatgtcgtttatcctgaaatgcttgtggaacgttatggtttagatgcactccgttattatttgcttcgtgctgttccgtttgggtcagatggtgtctttacgccagaagattttgtttcccgtgtcaattatgatctggcaaatgatctagggaacttattgaatcgaacgattgctatgatcaacaaatattgtgatggactcgttcctgactatgcctcacttgtcactccatttgatagtgaactgtctacgacggctgctaacgttgtcggacgttaccatgatgcaatggaaaaaatggaattcaatacagcattggctgaaatctgggtgctgatttctcgtgcaaacaaatacattgatgaaacagaaccatgggtattagcaaaagacgaagaaaagaaagctgaattgaatagtgtcatgatccatttagctgaatctttgcgtatcgcagcgatattacttcagccaatcatgacagaaacgccagagaagatcttcaatcaactaggattggactctgaaacaatgaatcttgaaggattacactttggcgaatttccttcaggaacaaaagtagttgcaaaaggtacaccaatcttcccacgtttagatatggaagaagaagttgcttttattcaagaaaaaatgtctgaaggtactcaaacaaacgaagatacagtcaaatgggatccagaagaaacagaacttgtttcaacgaaagaaaaacaaatcaaatttgatgtatttgaaaaagtagaactaaaagtagcagaagtcatcaactgtcaaaaagtagaaggggcagataagttgctgcaattccgactagatgctggagacagccaagaccgtcaaatcttgtcaggaatcgctgaattttatcctgatccaagcgaattgatcgggaaaaaagtcgtcattgtagcaaatctgaaaccacgaaagatgcgtggacaaatcagtcaaggaatgatcctttctgcagaagcaccagatggctctttacaagtaatcgaagcaccaaaatccatgccaaatggctcagaaatcgca

SEQ ID NO: 21626 - DNA, 903 bp, Enterococcus faecium
gtggagcaatcgatttttttaaaaaaggaacatcaacaagtagaaaaagaattgtattttgatttttgtggtttctctaaaacgatgccgtttcattcttttggtcctgctattcgcaatgattacatcctgcatgtcgtgatggaaggcaaaggatcttatcatgtgaaaaatcaacaattccaattgaaaaaaggtgatctgttcttgattcgtccaggagactcgacgttttacttatcagatggagaagatccgtggatgtattgctggctttcatttggtgggagtgctgcagaagaaatcattcggcagtcgcttttcagagaagaccaatacacgatggtctcttctgacatacaaaaatatatcgacattattttagaatgcatgaaagatacggaagaaaccttggaaaatgaattacagttaacagcattaacctaccgttttttatcagtccttttaaaagatggcggaaaggtcagcggtggtgtacaaaaggttcattcctctttagctgttgaaacagtcaaatacatcgaggcacattatgctgaaaaattgtctgttgaggaaatcgcccagcatttagcggtcaatcggagccatttgtcgcgagtattcaaaaatcatatgggtaccagtatcaaggaatatttgatcggggtacggatcaatcgaggggcgtttcttctttctctgacggatgaatccgtggaaagtattgcctatcaagtagggttcaatagtctagtcgtatttagccgaatgttcaaaaagagtaccggagaaacggctacgaactatcgtaaacgtatgaaaaacgaaaattttaagaatattgctttggataccttgaaaaaacagttggaaaaacaaaccgcagtttcttggacaacc

SEQ ID NO: 21627 - DNA, 2796 bp, Enterococcus faecium
atgaaaatgaaagaaaccttgcaattaggaaaaacaaaattccctatgcgtggtaatttgccaaaccgagaaggcgagtggcaaaaagaatgggaagaaaatcgaatctaccaaaaaagacaagagttgaacgaaggaaaacctagctttgttcttcatgatggacctccatatgccaatggtaatatccatttaggacattcattgaataaaatcagtaaagacattatcattcgttcaaaatcaatgtctggctatcgtgcaccatatgttccaggatgggatacacatggattgccgattgaacaagtattggctaataaaggcgtgaaacgtaaagaaatgtccatggcagaatacttggaaaaatgtcgtgaatatgcactttcccaagtagataagcaacgagcagatttcaaacgcctaggagttgcaggagattgggaacatccttatgttacattagatccttcttatgaagctgcacaagtacgcgtatttggtaaaatggctgaaaaaggctatatttacaaaggattgaaaccaatttactggtctccgtcaagtgagtcttctttagcggaagctgaaattgaatataaagatgtaaaatctccatctatttttgtagctttcaatgtcaaagacggcaaagatattcttgatgaagatacagcttttgtcatttggacgacaacaccatggacattgccagcaaaccaaggtattgctgtaaatccaaaatttacgtatgtattggtggaagccgatggccgtaagtttgtcgtagcgaaagatttgctagaaacagtccaatcagaaatcggttgggaaaatgtaacagttctaaaagaatttgctggacaagaaatggaatatatgactgcaagtcatccattctatgaacgtgaatcacttgtgattttaggcgatcatgttactttagacgctggtactggattagtccatactgctccaggacatggggaagatgactatatcgctggtagcaaatataaactatctgtagtgtcacctgtagactcaaaaggattgtttacagaagaagcacctggatttgaaggtatcttttatgacaaagcaaatcctatgatcactgatctattaaaagaaaaaggagctttgctgaagctagatttctttactcatagttatcctcacgattggcggacgaaaaagcctgtgatctatcgggcaactccacaatggtttgcatctatcgataaattccgtcagaatattttggatgaagtagaaaaagtagagtgggttatcccatggggtaaaacacgtttgtataatatgatccgtgaccgcggcgattgggtaatttcccgtcagcgtgcatggggagtaccacttccgattttctatgctgaaaatggagaagcaatcatcacaccagaaacaatcgaacatgtggcaaaattatttgctgaacatggatcaattatctggtttgaaaaagaagcgaaagaacttcttcctgaaggatttacccacccaggttctcctaatggcgaatttacaaaagaaaaagatatcatggatgtctggtttgattctggttcttctcatgaagctgttttacgtcagcgaccagaattatcattcccagcagatatgtatttagaaggatcagaccaatatcgtggctggttcaactcaagtatcacgactagtgtggctatcaatggtgtagcaccatacaaatcagttatttctcaaggatttgctttagatggtgaaggccgtaagatgagtaaatctttaggaaacatcattgcaccagaaaaagtgatcaaacaatttggtgcagatatccttcgcttatgggtatctagtgtagattatgaagcagatgttcgtgtttctatggatatcttaagtcaagtggcagaagtatatcgtaaaatcagaaatacgatgcgtttcttattagcgaatacagaagatttcgatcctaaaaaagatactgtttcgtacaatgatttacgttctgtagacaaatatatgaccgttcgattgaaccaagtaatcaaagaaatccgagaagaagggtacgacaaatataacttcatgcatatttaccgtacagttatgaacttcttgacggttgatctatcgtcattctacctggattttgctaaagatgtagtttatattgaagcagaagatgattatcaacgtcgttgcatgcaaactgttttctatcaaacagctgtagctttgacaaaattattgactcctatcattccgcatacagcagaagaaatctggtcattcctgaaagaagaagaggagtacgttcagttaagcgagtttcctggttatgaagagtttgcaaaccaagaagaattgatggatacctggactgctttcatggacttccgtgataatgtcttaaaagcattggaagaagcaagaaacagcaaattgattggtaaatctttggaagcaaaactaactgtttatccaaaacaacaagttcgtgaaatgttaaaagctttggatgcagatattgcacaattattgatcgtttcaccagactactttgaagttatggcagcagatgaacaagtgccagataacgctatggtatttgatgatgttgctattacagtggaaaaagcagacggggaaacttgcgatcgctgtcgccaagttcgtaaagatgtaggagtagatgaaaaacttcctcatctatgcggtcgttgtgcaaaaatcgttgaagacttctatcctgaagctgtagctgaaggattcgaagaaaag

SEQ ID NO: 21628 - DNA, 879 bp, Enterococcus faecium
gtgaaggtcaaaaaagcagtcattcctgccgctgggctaggaacacgttttttgccggcaacaaaagccatggcaaaagaaatgcttccaatcgtggataaaccaacgatccagtttattgtggaagaagcattggattcgggaatcgaagacatcttgatcgtaacgggaaaagaaaaaagacccattgaagatcactttgatgcaaatatcgaattggaaaacaatttgcgggaaaaggaaaaaacagaattactcgctttagttgaagaaacgactcaagtcaatcttcacttcatccgtcaatctcatccaagaggactgggggatgccgtgcttcaagcaaaagcatttataggaaatgaaccgtttgtcgtcatgctgggggatgatttgatgaaagatgatatcccattgactcaacaattgatgatggattatgaagaaacacaagcttccgctgttgccgtcatgcgtgtaccagaaaatgaaacatctaaatacggaattattgatcctaaaacagatagcgaaaagggtcgttgcagagtaaaagggtttgtagaaaaacctgaaatgggaaaagcaccaagtaatttagccattatcggacgttatctactgactcctaaaatatttgagatattagaaactcaagaaccaggagcaggaaacgagatacagctaacggatgcacttcagactcttaaccagacagaggcggtctatgcgagagagtttaaaggaaaaagatacgacgtaggcgataagttaggatatatgaagacaaatattgaatatggacttcaacattcggaaattgggacttcattaagtgcatatattatccagttgagtaaaaagctaagaacagaaagt

SEQ ID NO: 21629 - DNA, 942 bp, Enterococcus faecium
atgaaaaaaattcgtgatttagtaatcgatgagcagtttgaacaatttgtcctgatcaaaagtgcagatgtaagaatcgctaaaaacggaaaaaaatttattgcttttactttccaagatacttcaggtactatcgatggtaaatactgggatgcttcggaggaggaaatcaataaatttacagccggcacagtcgtttttctaaacggtaaaagagaggtttatcaaggaaaccctcaagtaaagattcttcatatgcgcttaacaagggtagatgagccaggagagcctagtttatacatggaaagagcccctttgaagaaagaagaaatggaagaagaaatcaatcaattgttgtttgagatcaccaatgcgcattggaatcgtattgttcgctatctacttaataaatatcaaaaacaattttttgagtttccggcagcaaaaagaaaccatcatgcatttgccagtggattagcttatcatactttgacaatgcttcacttagggaaatcaatcgccgatgaatatcctgagctgaatcgagcattgttgtatgctggtatcattttgcatgatttaggaaaggtgattgaactttccggtcctatgtcgacagaatatacgcttgcaggaaatttgatcggtcatctggtattgattgacgaagaaataactaaagcctgtcttgcgttgaaaatcagcgaagctgacgaagatgttctcgtattacgtcatatggttttagcacaccatggcttattagaatatggctcacctgtacgtccaagaataatggaagcagaaatattacatcaaatcgacaatatcgatgcttcgatgcagatgatgttgacttcgattcgtcaaacagaaccaggaaaatacaccgatcggattttcggtatggacaaccgaagtttctatgtaccaaaagattta

SEQ ID NO: 21630 - DNA, 699 bp, Enterococcus faecium
atggaaatcattcgtgtaaaaaacgctgaagaaggcggaaaaaaagcatttgaaatcatcaaagaaggtatgaacaaaggtgcaaaagtattaggattggcaacaggaagcacaccagttactttatataaagaaatgacttcaagcgatttggatttcagtgaaatgacttctgtaaacttagatgagtacgttggactaggcggttcagatgaacaaagctaccgtcatttcatggatgtccaattatttgataaaaaaccattcaaagaaacgtttgtaccagatggaaaagcagaagatctggaagcagcatgcaaaaagtatgatcaaatcatcgatgcacatccaatcgatatccaaatcttaggaatcgggcaaaatggacatatcggtttcaatgaacctggtgcttcatttgacggaacgacttcagtagttgacttaacagaatcaacaatcaatgcaaacaaacgattcttcgataaagcagaagatgtaccaacaaaagctgtttcaatgggaatcggttcaattatgaaaagtaaagaaatcgtcttgatggcatttggcgaaagcaaagctgatgcaatcaaagggatgattgaaggacctgtaacgaatcatttgccagcaagtgtattgcaaaatcacgacaatgttgttgtgatcatcgatgaagaagcagcaagtaagttg

SEQ ID NO: 21631 - DNA, 1299 bp, Enterococcus faecium
atggttatcaatttcattattttatttttgatgattgcaattacttcattttttgtagcaagtgaatttgctttagtgaaaatcagacgatcaagattggaacaactagaaaaggaaaatgtaaagaacgccaagctagctcttcatgttacacaccatttagataactatttatcagctagtcaattaggaattacgctaaccggtttgatcatcgggtgggtcggtgaaggatctgtcgcggctttactagaaccagtgatcggtaaactaccttttagttcggctattagcagtacaatctctgtggcgctgggatttattttagttacgtatatcgatgtggttattggcgaactgcttcctaagagctatagtatcgtcaatacggagaaggtcgtcttgttcgtagttaaaccacttcattatttttataaagtaatgtttccttttatttgggtattgaatcattcagctgcagggctagggaagctattaggtgtgcgtctcgtatctgaaggagaagagacattgtctcaagaagagctgacattagtcgcattgaattcttatgaaaaaggagagttgaccaaagaagaatatcattatttggaaaacgtgtttgaatttgatgataccttggcaaaagatatacaagtagaccgtacgtccatgcaagtattcgaagcttcagaaaccgtcaaagaagcgataaaagcttcgattgaacaaggacatactcgctatccggttatcttagaatcaaaagacaatgttttaggttatgtcaccttgccagatttgatcaagcaatcttataaagatgaccagctgacagtagaacagttgattgaagagccgatcgtaacaactgaaacgatccctataaaaaaattattgacgatcatgcgaaaaaagggaaagcatattgctatcttaaaagatgaatacggagggacaagcggcttagtgacgattgaagatattttagaagaaatcgtcggggaaatccgagatgagacagatttggacgaagcattgatagcggaacagtcagatggctcttatatcatctccggcaaactaacattagatgatttccagcgttattttcatgtagagattccagagtttgaagaaacgaattttactacacttgcgggctttgcttctagccgatataaagaaataaaagcaggaacaatcattgagattgcatcattccgtttcacggtattagaataccagcatgcacatatcgattatttcaaagtagagtccacggaaagaaaaatagaa

SEQ ID NO: 21632 - DNA, 945 bp, Enterococcus faecium
atggccaaacgaaaagtagttgtcgctttagggggcaatgccatcttgtctacggatgcaagtgcaaaagcccaacaagaagcgttaatggaaacagcaaagtatttagtgaaatttatcgaacaaggagatgaattgatcatctcccacggaaatggtccgcaagtcggtaacctattgattcagcagcaagctgctgattctgagaaaacaccggcaatgcctttagatacatgtgttgcaatgacagaaggatctatcggttactggttacaaaacgccatgggcgaagtactgaaggaaaaagggatcgataaagatgtggtttctttagtcactcaagttattgtggatgaaaatgatccttcattcaaaaatccaagtaaaccagtcggtccattctacacggaagaagaagccaaagaacaaatgaatgctgactccactgtgacattcaaagaagatgctggacgtggatggagaaaagtagtcgcttcccctaaacccatctcgattaaagaagcacgtgtcatcgaaacgctggtcgatcaaggagttatcacagtctctgttggtggcggtgggattcctgttgtagaaacagctactggattagaaggacgagaagccgtaatcgataaagattttgcttcagaaaaattagccgaaatcatcgatgcggatttgctgatcgtattgacaggagtagacaatgtgtatgtcaattaccaaaaaccagatcaaaagaaattagaaactgttactgtttcagaaatgaaacaatacattgatgaaaagcaattcgctccaggaagcatgcttccgaaagtagaagcagctattgcatttgttgaagcaaaaccaaacgctaaggcaatcatcacttctttagaaaatatcgagaatcttttagcttctgaagaaggaacgattatcgtagctgat

SEQ ID NO: 21633 - DNA, 1014 bp, Enterococcus faecium
atgaatgaagaattgattctggcgattgaatcaagttgtgatgaaacgagtgtagcggtcgttagaaatggaacagagatcttatctaacatcgttgcttctcaaataaacagtcataaacgttttggtggcgtagtacctgaagtagctagccgccatcacgtagaacaaatcaccttatgcttggaagatgcactggtagaagctggtgtgtcggcagaagatttatcggcagtcgctgtcacttatggaccaggacttgtcggctcgttgctgattggtatttctgcagctaaggcttttgcttgggcacaccaattgccgcttattcctgtaaaccatatggcagggcatatctatgcagcccgtctggttaaaccattccagtttccattgatggcacttcttgttagcggaggacatacagaattagtctatatgcaagaagatggatcatatgaaatcattggggagacaagagatgacgcagcaggagaagcttatgacaaagttggaagagtattaggtctttcttacccaagcggaaaagaaatcgatcagctagctcatcagggaaaagataattaccattttccgcgagcgatgatccatgaagataattatgatttcagttttagcggattaaaaagtgcatttatcaatttggtgcataatgcacaacagcgtggagaagatctagacaaaaatgatttagcagctagctttcaagcaagtgtgatcgatgtattgattactaaaacacttcgagcttgtcaaaattatccagtcaagcaactgattatagctggaggtgtagcggccaatcaagggttgcgtgaaggattgcaggatgctttggcagctaaactccctgaggtagaactagtgattccccctcttcgactttgtggagataatgctgcaatgattggagcagcagcacatgtggaaatgcaaaaaagaaattttgctagctatcagttgaatgctgatccaagcttggttttatctgaa

SEQ ID NO: 21634 - DNA, 522 bp, Enterococcus faecium
atgctgaatcaattggcaattgcagaagttggcaatgcgatgttaggaaatgtcatcgttgtcagcggctcatttttgatactactggctctcttgaagcattttgcttggggaccaatcagcgatattttgaaaaaacgtgaagacaagatcgccaatgatttggattctgcagaacaatctcgcatcaactcagcgaaaatggaacaagaacgcgaacaacaattgttagcctctcgttctgatgcagctgatatcatcaaaaatgcgaaagaaagtggagaattaagccgccaaaatattttgaaggatgctcaagaagaagcagctcgtctaaaaagtaaagcccaagctgatatcactgtagaacgtgattcagcgctgaactctgtaaaagacgatgttgcagaactatctcttcaaatcgcggaaaaaatcttgaacaaagaattatctccagaaatgcacgaatcattaatcaatcaatatatcgaaggtctaggttcttcaaatgaaactaga

SEQ ID NO: 21635 - DNA, 399 bp, Enterococcus faecium
atggcagaattaaagaaaatgcaagattacgaatatgatttacctgaattggtggatcagccggaacaacaaatgcctgattcttcttcgaatcaagaaatcattcttccacaatcaccggcaaaacgattaaagcagatttctgctttggaaaaaattgctgtggcaagcgtggcgattgctattgttgctttatgtgttttaacagttatgctgcgcacaaatatcagcggagctgaaaaagaaatcacgtcaatacaaacagaaatcaatgataaaaagcaagaaaaaacgagtttagaacaagaaaaaaacgaactttctcgtactgaacggattaaacaaatcgcagaagaaaaaggattgtctattaatgacgacaatttaaggaaagtgaag

SEQ ID NO: 21636 - DNA, 510 bp, Enterococcus faecium
atgtatattcggcaaacaaggaaagaagaagtagaagaagtggtagaaatcattaatgccgcagcggatttcattgcttcgcaaggctctcctcaatggcaaaacgggcagaaaccaacaaaagaaacgattttgaacgatattgaaagaaaagaaagctatgtattaatagtggaagatcaaattgctggaacagctgcattagtctcaagcgtggatcccgtttacacaaaaatagatggtagttggaaagaatcaactggtccttatttatcgattcatcgtgtcgctttagcagaaagtactcgaggaaaaaaactagcaaaaccgttcttagaacatttgttgacgattgcagccagcaaaaatatccaagatatccgtatcgatacttatccagctaatgaaccgatggaaaagaccatctattctgctggattcacttatcaagggatgattgaatttccttttgaacacggcgaaagaaaagcatatcaaataatcatcaat

SEQ ID NO: 21637 - DNA, 1005 bp, Enterococcus faecium
atgttaccagaaaaaatggaacaagggtttaatcaaaacctggaagctattcagcttttacagaatgcattgggaacttcctttttagaagcctatgtcgaaaatgcagaaaatttaatagatgattatcaagtacgtgtggtggatggagtgccgacaaaagagacaacgcaacggatcacagctctttatgaagagttgaagaaactttctttcgagccagaagaatggcgcagactgtctcaattacttttattgaagggcagccagacagaacatttgcaggcgaaccatcaactcactcctgatagtatcggttttttatttgtttttcttattgaacaactatacacaaataaaaaagcaccggttaagattctggatattgcggcaggaatgggcaacttgttattaacagttcttttaaacctatcgaatgcggggtaccaaacagaaggaattggtgtggatattgatgatacattgttggctgtcgcagcttctacaagtgatttgacacaagcaaatgttcaatactttcatcaagacgggttgcaggaattattaatagatcctgtcgattttgcaatcagcgatttgccaatcggttattatccgaatgacgaaaaagcaaaagagtttttaacaagtaccgaagaaggccatagttatgcacatcatttattgctagagcaatcaatgaaatatgtgaagccggatggttttggtttgtttttgatgccgagtggatttttagaaacggatcaaagtgaagaaatcaaaaaatggtttaaagaagaaggttatcttcaaggaatgattcaattgccagatgaattgttccgtaataaacaatcgcaaaaaagtattttgatcttacagaaaaaaggaccacaagcacaacaagtaaaagaagtcttgcttgtgaaacttgcttcattaaaagaaccagagaaggtgacggaatttttcaacgagtttaaaaactggaaatcatctgctctg

SEQ ID NO: 21638 - DNA, 981 bp, Enterococcus faecium
atgactactaatttttggaaagagctgccaaagcctttttttgttttagcaccaatggaagatgtaacagatgttgtatttcgccatgtcgtaaagcatgcagcagcaccggatgtcttctttactgagtttacaaactcagacagtttctgtcatccagatggaaaagacagtgtacgaggaagattaacatttacagaagatgaacagccgatggttgcccatatttggggagacaagccagaattttttagagaaatgagcattgctatggcagaaatgggcttccaaggaatcgatatcaacatgggctgcccagtccctaatgtagcagaacgtggaaaaggcagtggcttgatccttcgtccagaagtagcggcacaattgattgaagcagctaaagctggcggtttgcctgtcagcgtcaagacgcgtatcggctatacggaaatgtctgagatggaagaatggatcagtcacctacttcatcaagatatagccaatctttctgtccatttgcgtacgcgtaaagagatgagtaaagtagatgcacattgggaagtcattcctaaaatcattgctttacgtgaccaaatcgctccacaaacactaatcacgatcaatggagatatccccgatcgccagacaggagaagaattggccgagaaatatggcgttgatggcatcatgattggccgagggattttcaagaatccttatgcatttgaaaaagacccgagggaacatacagaaaaagaactgatcggactacttcgtctgcaactagatctgcaagatcattattcagaaatcatcccgcgttccatcacaggactacatcgtttctttaaaatctatatcaaaggatttccaggagcaaatgacttgcgagttcagttgatgaatacgaaatctactgatgaagtacgagagatcttagagacctttgaaaaagaacatccaacgcttttcagtgaacaa

SEQ ID NO: 21639 - DNA, 528 bp, Enterococcus faecium
atgttaaatggtatgtttgccccacaaagagccccggaaactcgaagtgtatgtcaaacatcagaacttaaattggaggaaaataacgtgcgtacaacatatatggccaaaccaggcgaagtagaacgtaaatggtatgtagtagacgcaactgatgttccattgggacgtctttcaacagttgttgcatctgtactacgtggtaaaaataaaccaactttcacacctcatttggatactggcgatttcgtcatcgtcatcaatgcagacaaagtgaaattaacaggtaaaaaagcgactgacaaaatttattaccgtcacagcaactacccaggaggattgaaatcaatcactgctggcgaattgcgtgctaaaaattctcgtcgtttgatcgaaacttctgtaaaaggtatgcttcctaaaaacactttaggccgcaaacaatttacaaaattgaacgtatacggtggagcagaacatccacatgcagcacaacaaccagaagttttagacatcacaaacttaatc

SEQ ID NO: 21640 - DNA, 1221 bp, Enterococcus faecium
atgaaaatcggcttttttaccgatacctactttccgcaagtcagcggagttgctacatcgatcaaaacattaaaacaagaattagaaagacatgggcatgaagtctatatttttacaacgaccgatcctaatgcggataagttggaaaaagatgtgattcgaatgccaagtgtaccatttatttctttcaaggatcgaagagttgttgttagaggcatgtggtatgcttatttggttgccaaagaactagaactagatcttattcatacccatacagaattcggagcagggatacttgggaagatggtagctaagaagttgaaaatacctctgatccatacttaccatacgatgtatgaagactaccttcattatatcggtaaaggaaaagtgatcaggcaatcccatgtaaaatacttgtctagattatttgcaaatcatacgacaggtgtagtttgtccaagtgaacgtgttattgatacattacgcagctatggtgtaatagcaccgcttcgcgtgattcctactggtatcgacattgaaaaattcaaacgttctgatatcactcagcaggatatcagcaaattaagggagtcactaggtcttcaggaaaaccatttgatgattctttctttaagcaggatttcttatgagaaaaatatccaagccttgattaatgggtttcctcaggtcatctccgcttatcctaacgccagattagttatcgtaggaaaaggaccttatgtagaagagttagaggaattgatctcagaactgcagttagaagaatttgtgcagttcacaggagaagtggacaacaatgatgtagcactttattataaagcggcagattattttgtcagtgcttctacttcagaaacacaagggcttacttatacagaagcgatggcagccggaacaccttgtgtcgtggaaggaaatgcttatttgaaccgattgttcgatcatccttcattagggaaaacttttgaaaccgacgaagactttgcaccagcacttattgattatatttccagtgaagttcctaaagatccaaaagttttagaagctaaactttatgatatttcatctacacatttcggcgaagctatgatcgaattttatcaagacatggttgtttatcatgaagaagagatgcgaagaaaagaagaagaagactcgattgaacgaatcaaaataaaattaaattcatttaaaaga

SEQ ID NO: 21641 - DNA, 870 bp, Enterococcus faecium
atgtataatcaaaaaagtttcaagggaaatccggtatatggggatttatatcttgtaccgacgccaattggaaatttagaagatatgagctacagaagtgttcgtatgctgcaagaatccgatcttatcgcaagtgaggatacgcgtaatacacaaaagttattgaatcattttgaaatccatacaccccaaaaaagtttacatgaacataattataaagaacgtgtccctcaattgattgctttgttaaaagaaggaaaaacgattgctcaagtcagtgacgcaggaatgccttccatcagcgatcctggacatgagctagttttagcctgcataaaagaagggatttctgtgatctctatcccaggacctacagctgggatgacggctttgattgcttcagggctagtgcctcaaccatttttattttatggcttccttccacgtaagaaaaaagaacagaaagaaacattgaaaaagctaaaagaacagacagttacgctgattttttatgagtcaccttatcggatcactgctacattgacgaatttcttagaaatttttggaaatcgccaagtcgttttgtgtcgggaattgacaaaggtccatgaagaataccttagaggaagtacggaagagctactcgcttatatcgaagaacatccagtaaagggtgaatgttgtctgcttgtagaagggaatttgttcgaaatgccagtgacggaagttgatgaagagttgggaacgttaaaggaacaagtagaagcaaagatcgcttcaggcgaaaaaccaaatgctgctatcaaagcagtagcgctgaaaaatgggctgaaaaaacaagaagtctaccgtcagtaccatgaattagac

SEQ ID NO: 21642 - DNA, 939 bp, Enterococcus faecium
atggattatcaagtactgctttattacaattatacaaaaatcgaagaaccagaggaatttgccaaaaatcatttagccttttgcaaatctttggatcttaaaggtcgtattctagtagctgaagaaggaataaatggtactgtgtctggaaccgttgaaaacacgactgcctatatgaaagcaatgaaagctgatcctcgatttgctgatacgatgttcaagatcgatccaagcgaaggacatgcctttaagaagatgtttgtaagataccgtccagagcttgtaagtttaaagctagaagaggacattgatccaaaccaagtgacaggtgcctatctttcaccgcaagaatttaaagaagctattttagatgaacagacagtggtgattgatgcacggaatgattatgaatatgacttgggacattttcgaggggctgtacgcccagatatacgcagttttcgagagcttccagactggatccgcgagcacaaagaagaatttatggaaaaacgggtagtgacctactgtactggtggcattcgttgcgagaagttttctggttggcttgtccgtgaaggattcaaagatgtcggacagctgcatggcggtattgctacttatggtaaggatcctgaagtccaaggagaattatgggacggcaagatgtatgtgtttgatgaacggatcgctgtcgatatcaaccaagtagataaacaaatcgtcggtcgcgactggtttgacggaacaccatgtgaacgatatatcaattgtagcaatcctgagtgcaatcgtcagattcttgcttccattgaaaatgaagaaaaacatttaggagcatgtagcatagagtgtgcgaaacatccgcgcaatcgctatgttcaagaccatggaatctctccagaagaagcagaactgcggtttacagctttaattaaa

SEQ ID NO: 21643 - DNA, 1350 bp, Enterococcus faecium
atgggaatacgcagtcattttgcgattgcagttggaaaaacgtcgcaatgggcattaaaaactttttttaaaggcggatcaagtttaccaggtaaactagcgctgaaagtcgatccacatatactagatagtttggcaaaagactaccaagtcgtcgttgtcaccggaacaaacggtaaaacattgactaccgctttaacagtcaatattttgcgccagcaattcgatgaagttctaaccaaccctactggtgcgaatatggtacagggaattgtatcgactttcttgcaggcaaaaccaaaaaaaggacagaaaaagtttgctgtcctagaaatagatgaagcaagtttgagcaaagtcacagaatatatgaaaccagaactgttcttatttacaaatattttccgtgatcaaatggatcggtatggagaaatctatacgacctataaaatgattgtagacggtgccgcaaagtcaccaaatgcaacgattatcagtaacggtgattcaccaatcttcaattctatcgaaacagtcaatcctagaaaatattatggctttgaccatgaagaagatcgtgaacaaatggctcattacaatacagacggtgtcttatgtccaaattgtcatcacatcttgcattataaaatgatcacttatgcaaacttagggaaatattactgtccaaattgtgacttcaaacgtcctgaattggattatcgattaactgatatggtacggatggacaatgtgtcagcagatttcgtgatcgatggtcatgaatacggaatcgaagttggcggtatgtataatgtctacaatgctttagcagctactgcagtggcagagtacttcaatgtcgatcctgataaaatcaaacaaggtttaggatatgacgagaaagtattcggccgacaagaagtcatcaatatcaatgggaaaaaatgtacattagtacttgtcaaaaatcctgtaggtatcaatcaagtaatcgatatgattggtctagctccttatccattttctttagtggctttattaaatgccaattacgcagacggaatcgatgtcagctggatttgggatggtaattttgaaaactttgccgatatggatatcccagctgttatttctggaggagaccgtcatacagatatgactttacgtctaaaagttgccgggattccagaaaataaattgacagaaacaaaagaattaccagaagtaatcgaaaaaatcaaagaattgccaactgagcatgtctatattttagctacttacactgctgtattgcagcttcgtaaagaactagctgctcaaggatttatcaaaggaggaatgaaccgtggc

SEQ ID NO: 21644 - DNA, 1239 bp, Enterococcus faecium
atgacagtaaaaagaaaattgaaacgaccagaaatcctagcgccagcaggaacactggaaaagttaaaaaccgcgatccattatggagcagatgcagtatatattggcgggaatgcatatggtttaagaagccgtgcaggtaattttacttatgaagaaatggctgaaggagttgcttttgcaaaagaacatgatgcgaaggtatacgttgctgctaatatggtcacccatgaaggaaatgaagatggagcaggggaatttttccgcagtttgcgtgatgtcggtatttctgcagtgattgtttctgatccagctttgatcgaaatttgtgcgacagaagccccaggtctgccgatccatttatccactcaagcttcagcaactaattttgagacattggaattctggaaagaagaagggttggaacgtgtcgttttagctcgtgaagtttcaatggaggaagtggcagagattcgtaaaaatacggataccgaaatcgaagcatttatccatggtgccatgtgtatctcttattctggtcgatgcacattgtccaaccatatgtcgatgcgggatgcaaaccgtggcggatgttctcaatcttgtcgctggaagtatggattgttcgatatgccttttggtcaagaacgaaacagtttaactgatacaggcgaagtggaagaagaattctcgatgagtgcagtggatatgtcaatgatcgaacatattccagaattgattgaaaacggcgtagacagcttcaagatcgaaggaagaatgaaatcgatccattatgtatctacggtgtcaaatgtctataaagcggctgtagacagttatatggaagatcctgaaaactatgtctgcaagcaagaatggatcgacgagttatggaaagtagcacaacgagaattagctacaggtttttactacaatacaccaactgaaaacgaacaattattcggtgaacgtcgtaaaatcccagtatataaatttgtcggtgaagtattatcttatgatgaggcaacacagattgctacgatacgtcagagaaacttgttttctgtaggagatgaaatcgaattttatggtccaggattcagtcatttcagtcaaaccgttgaagttatgcataatgaagaaggcgaatccattgaccgagcaccaaatccaatgatgattttaactatgccagtcgcacagccggtgaaacctggagatatgatccgaaaacgtaaa

SEQ ID NO: 21645 - DNA, 315 bp, Enterococcus faecium
atgaataaagaggaattacaaatgcttggttttgagatcgttgcatattcaggcgacgctcgcagtacattattgaaattattgaaagaagtaagacaaggaaactttgaacatgttgattcggcgttgaaagaagccgacgaaaatttaacccttgcacataattcgcaaacaaaaattttagcggaagaagcatctgggaaagagatggagatgggattcatttttatccatgggcaggatcatttaatgaccactttattgctgagagatctgattcaagactttattgtactgtacagacagaatcaagga

SEQ ID NO: 21646 - DNA, 582 bp, Enterococcus faecium
atggcacaactattttttaagtatggcgcaatgaatagcggcaagacgatagagatcctaaaagtcgcacataattatgaagaacaaaataagccagttgtcttaatgacaagcggtattgatacaagagatggtttaggcgttgtttcaagccgaatcggactgaaacgtaatgcgatgccgatatttgaagaaacagacgtatttgacgtaattcagaaaatggaaagcaaaccctattgtgtgctgatcgatgaagcgcaattcttaaaaaagaaacatgtcattgcttttacgagaattgtggacgaattggatattccggttatggcatttggtttgaaaaatgattttcgaaacgagttatttgaaggatcaaaatatttattgctttatgcagacaaaatcgaagaaatgaaaacaatctgttggttctgccacaaaaaagcaatcatgaatttacattatattgatggaaaccctgtttatgaaggcgatcaagtgcaaattggcggaaatgaagcttattaccccgtttgtcgaaaacattactttcacccatcaatgattacagaaggagaa

SEQ ID NO: 21647 - DNA, 987 bp, Enterococcus faecium
ttgtatattgcagatagtgcacgttatgaaaaaatggaatatcgtaaatccggtcattcaggtttgaaattaccgattttatctctcggattatggcaaaattttggtgattatgatcctatccataatcaaagagagattttaagaggcgcattcgacatgggaattacccatttcgaccttgcgaataattatggaggccctgctggagctgcagagaaaaactttgggcgtatttttagagaagattttcaagcctaccgtgatgaactgattatttctagcaaagcaggttatcatatgtgggaagggccatatggggaatggggctctcgtaaatccatcatttcaagttgtgaccaaagtctccaaagaatggggctagattatgttgacatcttctatcatcatcgcccagaccctgatacacctttggaagaaacagcagaagctttgatgcaacttgtaagacaaggaaaagcattatatattggtatatccaactataatggagaagatacaaaaaaaatgactgaaattttaaaaagaaaggaagcaccgttcattattcatcagatgcgctacaatatgttttctcgtgcactactagaagacgatctatctccagtattagaagaagaagggctaggggcaatcacgttcagtccgcttgctcaagggttgctgacaaatcgttatctacatggtattcctgaagattctagagcacatcgtaaggaaataccattcctttcagaagaacaagttggatcaactctggaaaaaatcaaagcactgcaaacaatcgccgtatcacgaggacaatcattagcgcaaatggcccttgcatggaatttgcgacaaaaatctgttacaagtgtactggtcggagcaagtcggttaagtcagttacaagaaagtgttcgaatgatggataatttagatttctcaccagaagaagaattgagaatcgaccaaattctagaa

SEQ ID NO: 21648 - DNA, 222 bp, Enterococcus faecium
atggtattcgaaaaaattcaagaaatcatcgcagaagaattaggaaaagaaactgaagaaatcaaattgactactgacatccaagaagacttagaagctgacagcttggatttattccaaatcatcaatgaaattgaagatgaatttgacgtgaaaatcgaaacagaagacggaatcaaaacggttcaagatttagtgacttacgtagaaaaacaaactgca

SEQ ID NO: 21649 - DNA, 2181 bp, Enterococcus faecium
atgaaagtagaagaaaaacagtttgatttagagtatatcaataagtatgcgagtcagatgaccattggaaatggattttttggtatcagaggaagccaggaggaagactatcggaatcaagtaaggggaatgtttgcagctggtgtatataaccgacctttaggagcagaatcagccgagttagtgaatctcccagatgtcatcagatgggaaataaaaatcgacggtgaacatttttctcttgagacgatgaaagttcttgcatacgagcgggcactagatttagaaatgggagagcttaaacgctatgcgctcattgaaactgctcaaggaaaaaaagtggaagtcattacttgtcgtgttgctgatcaaaataatctccatcaggcagccctgaaagtggtcatcaagccgttgaccgaagactgccaagtagatgtgaaaacgggtatcgatggacagcaaaccaattttggtacacagcagttggttgaaaaagaactgcgagtatttggtgacgatttgatcagtgcatcctaccagacaacagaaagtaaaattgatattgggattgcagctaaattcaataaagcaggtgtattccaagcaaaaaatcgccggatcaccgcttccttttcagaaaagatcagaaaaaatacgtcctttacgctggagaagatcatcgtgctctctacctctcttcagcaaacagacccgtttaagaaaagtattgcccaagcccagaaaagcgttagttatacagaaattttagagcagtcgatgtcttattggacagatttttggcatcagcatcggataacgatccaaggcgattcttctttcgatcagttagcgatggacttcgctgcttaccatttacagattatgactccccgcaatgatccaagtgttagtgtaggggcgaagggactaactggcgaaggttataaagggcatgttttctgggatacggaaatttttatcctgcctttctttttatatcagtttcctgaagtagcaaagaatttgctgctgtaccgttatgatcgattagaaggcgcacggcaaaaagcaagagattatcactatcaaggtgcacttttcccatgggaaagcgcacacactggtcaggaagagacacccaaatttgctgcattgaatatcaaaaccggaacaagacaagaagttgcttcagctgccgcagaacatcatatcagtgcagaccttgcttatgccgttcaagagtatgtccaagcaacagaggatcaatcgtttttagaaacaaagggaaaaacgctcattcatgaaacagcagctttttggctgagcagagctgtaaaagtcgatgatcatttagagatacacagagtcattggtccagatgaatacacagaatatatcgacaataatgcatatacgaactatctggcgcattataatgtggccttagctgttaaatatcaagctggcgatccgctttttttgaaagaatgtcaaaattttttagataagttatatttgccagtgcctaacaaagaacagctgattccgcaagatgacacgtatctcagtaagccagttattgatttgaccacttacaaagaacgtcctggcagccagtctattttacttgattatgcccgtagcgaagtaaatgaactccaagtcagcaagcaagcagatcttgtcatgctgttatacttattacctgagtatttttctcaaccaatcgtttctaagaatttgcattactatgaaaacaaaacaatccacgactcatcgttgagtaaagcgattcacgccatagaggcttgccgtatccaagaaatggaatgggcgtatcatttattccaagaagcgtgcctgattgatttaggaccagatccgcattcatcagatgacggaattcatgctgcttcattaggagcactatggctagcagttatatttggtttttcaggtattacagtaacgaatggaactctttctatttctccaagacttccttcagcatgggaaaaaatttcttttccttttatttggaaaaatcacaggttgctatttgttttgacaaaaaaacaaatagtaataaaaaaagagacgaaagaaacattacctatttttgtcaatggagaccaataccagctggaaaaagaactgatcttggaacggaggggaaaa

SEQ ID NO: 21650 - DNA, 660 bp, Enterococcus faecium
atggaactaaaccgaatgatcgaccatactattttgaaagcagacgcatctaaagaagctgtgatgcaaattatcgaagaagcaaaaaaataccatttttattctgtctgcatcaatccagcatgggttgcgctagcgaaagaacaattacaaggtgagccagtagccgtatgtacagtaatcgggtttcctctaggagcaaacacacccgagacaaaagcatttgaaacaacagatgccatcaataacggtgcagatgaagtcgatatggtcatcaatatcggtgctttgaaatcaaaggatgatcaacaagtccaaaaagatatcgaagcagttgttgaagcagcaaaagatcgtgcgcttgtcaaagttattattgaaacatcgttattagatagagaagaaatcatccgagcttgcgaaatagcaaaagctgcaggcgctgattttgtcaaaacatcaactggtttctcaacaggcggagcaaaggtagaggatgtccgtttgatgcgtgaaactgtaggaccagaaatgggtgtcaaagcttccggcggtatccataacgaagaagaagcaatggcaatgatcgaagctggtgctacaagaatcggaacaagcgcaggagtagcaatcgtatctggttcaactggtgaaggctat

SEQ ID NO: 21651 - DNA, 1156 bp, Enterococcus faecium
atggaaaagaaattatttaataaatattttattggaatcacattgatcaattttattgtctacctgatttattatctgttgatggtcatcatggcagtcattgcgtcaagacaccttacacgccagcttgagccaagcaggttttgcttctgggatctatatcatcggaacattgctggcacgcttattcatggggaaacagttagaactatttggtcggaagtttaccttaagaggcggcgcgatcttctatctcctttcaacattagcatatctttatacgccaactatcggggcattgtatttagttcgattcttgaatggattcggctacggtacagtttctacagctacaaatgctatcgttactgcatatatccctgcatctaaaaaaggggaaggcatcaattattatggattaagtactagtttagctgccgctgttgggccatttttaggaatgattttgctgaatatgactgattttcgtttcattatctggttttcaattgtactggtcttctttgttacgattgcctgccttgtctttcctgtaaaaaatattccattatctgaagaacaaaaaatatctcttcgctcatggaatatcaatagttttattgaaaagaaagcacttttcattacaggaattgcctttttgatgggtctttcttattcaagtgttttatcatttttatcttcttatacaaaagtaatccacttagttgctgctgggtcatttttcttcgtcgtatatgctttggtcatcacatttacacgtccattgactggaaggattttcgatgtcaaaggagaacaatacgtgatgtatcctagctatttattcttaacagcaggattatttttactgagtgtaacgacgaatagtgtgacattgcttatctctggagcattagtcggcctaggttatggtacgtttatgtcaaatggacaggctgtttgtttaaaaatcgtccgcgaacatcgaatcagtattgctttatctacctactttattggtttagacctaggcttaggcgttggtccttatttgatggggatgctaaaatctcttacttcatttagaggattgtatgtgattgccggagtcattccattgatatgtacagcactctatcttgttaatggccgaaaa

SEQ ID NO: 21652 - DNA, 458 bp, Enterococcus faecium
acacctatcggctttttatggttagatgcagatgaatccggattgactgctgtatcttttcagccaatttcagaaagcgaatcagcgaatcagcgaattttaacgcgcacacaagaacagtttgaagaatattttgcgggaaaaagaaaagaatttgatgttcctttatctataaagagaggtacgccttttcagcaaaatgtctggaaagctttgtcgaccattccttatggagaaatccgaacgtataaagaagtagccgttgctgttgatagtccgaaagctgtgcgagcgattgggcaggcaaatcgaaccaatccattgccaatcgttattccttgtcatcgagtgatcgggcaaaatggaaaactgacaggatatatgggaaacgcaatagatggggttgaaatcaaacgccaattgttgttgttagaaggatatctgcaaaattaaaaaca

SEQ ID NO: 21653 - DNA, 1339 bp, Enterococcus faecium
ttctcatcgatccaaatcatcgttttttattatatattgatgacggtcttatcactcgttctattttatatgccgatttttcgcgaaccagatagccatgtttcttttgtggacatgctgttcatggcaatcagtacagtgagtgtgactggactatcgacttttgatatcaattctgtgttcaatgataacggtattatactgctggaaatattatttcaagttggtggtttggggatcatgatgatttctactgcttttgtcattttttctaaacgacggatcacactgaaacagcgacagctgatcatgacggatatgaatcaaccgcgtttgtctggtatcgtccgactgattcggatcacttttgctattttaatctggtttcaattactttttgggacattcttttctatttatttttattacagaggctattttgatcgttggcgtgatgccgttttttacggtttttatcaggcgatatcggctgtcacgaactctgggtttgacgtcactggggattccatcaagccctttgcacatgactattttttcttgatcctgatcatgtttttgatttttgtcggaggaattggttttcctgtattgatggagtgccgggaatggctattatacaaacgttccaatgcgaagcttccgtttcgtttttccttgtttaccaaattagctgtgttagcttttgttatcttgtttgtttcgggaactgtcttgatttatctattggaaaaggaccatttattccaagattccaatatgagtgtcaaatggatcaattcgatgttttattcgattacgactcgtaatgctggtctgcagattcacgatttgggtgattttcaaaatcacaacactgatcattttttctttactgatgtttatcggatgcagtcctagttctgtaggcggcgggattcgaacaactactgtagcaatcatcggtttgtatctatattccttcctcaaaagtgaagataacatcaatatttttggacggagaatcgatcaagatgatgtgcgaaaatcagtcgttgtctttatgctttctcttggtatgtgtttcttttgtatcgtttttttatctgctacagaagaacaaacgctgatctcgatcatcatcgaagtaacttctgcgtttggaacaactggtttatctttagggattaccggagacttgtctgttgtgggcaaaatcacgattgctacactgatgtttattgggcggatcggaatgctatatacattgatgttattcgtgccaaaagaaacacgagatctaggctatgaatatccaagcgagaaaattattatcggttaa

SEQ ID NO: 21654 - DNA, 714 bp, Enterococcus faecium
atgaaaatcggactgattggcagtggacagatgggaaatagagtcgaagaagttgcacaagaaagaggagatacggtccttcttttacggacggcacctaaagaagcaactacgcttgcttttacggaactgccagaactgcttattgatttttctcatccagataatttagagaaaatcctttcgtatagcttatcatatcaacttccgttagtcattggcacgacaggttatacacaatcacagttccaagaaataaaagaacatgccaaacatgtacctgtgatgtatagtgctaatttttcgttcggcatcatggtgatgaatcaactaatcaagcaagcagctgcaatgttgcaaggctggcagatcgaactgattgaaaaacatcatagtcgtaaaaaagatgcaccatctggtactgcaaatatgctgcttcaaacaatccaagaagtgcaaaagctgcagcccgtatacaactggcaagggaaaaaaagagaagaaaaccaaattggtgtacacagtattcgtgcaggttctttacctggtgaacatgatgtattgtttgctgctactgatgaaatatttacgatcaaacatgaatctttttctaatcgaatctttgctgcaggcgcagtagaagcagcggactggttgaaagatcagtcaccaggttattacaaattagaagatttattaatggacaaaggggtg

SEQ ID NO: 21655 - DNA, 1269 bp, Enterococcus faecium
atgaaaggtaaaaaatggttaattggctctttgttggtagctgcaacaggtattttaggagcttgcggtggcggaagttcagcagaatctgattctgataaagaagtgactttgactttttggaatgggtttactgcatctgatggtgaaatattgcaagaaatcgttaatgaatttaataaaacaaatgataaaaacatcaaaattgaaatggatatcatgacttgggccaatttgaatgaaaaacttcctacagcgatttcttctaaaaaagcacctgactttattgcattaaattatccagattttgcacagtatgtagaaaacggagcggtacaaccattagacgatttctgggaatatgatggagtagataaatctgattttaaagaaacggctattgaattaggtgaagtagaaggtaaacagtattttgtccccatgcaggtacaaggcatgtatatgtattggaataatgatttgtttaaacaagctggattagatactgaacaaccacctactacttgggaagaattgacagaaatggcaccaaaattaactgatagtagtaaaaatgtatcaggttttgtcttcaataaggatggaactgcaccgttatataactggatgttagcaaatggcggtaaattagtgaacgatgattatactaagtctgaatttgcgtctcctgagaaccttaaaacgttaaaagcgatccaaaaaatgatccatgtagacaagactggtccagaatcgatttctggcgccgaaatggacaatttaatgaatgctggtcaactagccattgaaatcaatgggccatggttaaataacggattgaaagcaaacgagattgattataatgtgactaccttaccacaagggagtgattcagacaaaaaaacagctattttagatggcgtaggatatgccattccggcaagtacagataataataaaaaagaagctgtctatgagtttttgaaatattggaatacaactgaaattggtaaaaaatggagtatcgaaaatggttttcctgcctacttggattcagtagcaaaagatgaagaagtaaaaaatgatcctattgtatctgaattatcgaaacaaatggactatgcagagccatatttaccaggttttacccaaatctctgcgatcaataacgatatcatcaatccactgattgaaaaattattagcaggagaagatcctgagacactcatgaacgatgcagatgatgccatcaatcaattactgcaaaaa

SEQ ID NO: 21656 - DNA, 1287 bp, Enterococcus faecium
atgagatattcaaccatcttaatatcaacatttgcagccttaagcttatcgcttactataaatcagacagtccacacagaggagatagaaacagccaaatggacagaaaccaagtgggccaacgtcaatcgaattacctttcaggatgaattttcatccttcaattcaggagtcgcaaaattaagaaaaggacaaacagcgaccatcaaagcaaaaattgactattcaggagacttagcacctatactacaatcagctgttacatttgagaatgttgatcccgctttgtcgattggctatgacgagaacactttgactatccaacacaagcaagcgatatttaccttcaccgttacattaaatcaggacttgttaaaaccagcgctttttactgtcaaggtatcagatggactaccgaacgatcatcatcatttaacgccgtatagtcagcggcagacaattgagcaagattcagctatcgactcaggaggagatcttgttgaagaaccaacagataaaccagaaaatgaaaataagccagaagtaccgcctacagaaaatccagacggagaacagaaaccggaaatagaacctggagaagaacccgatacagaaactcaaccagagccagacaatgaatcaaaacctgaaataacccctggagaaaaaccagatgtagacccagaagaaaaaccagatgtgactccagaaccagatacggattctggaaaccaaacagtaccggaaacaaatccagacacagataatgaaactgaaaatccagaaaaaccagaggtagccccagaagaaaaaccagatgtaactccagaaccagatacggattctggaaaccaaacagtaccggaaacaaatccagacacagataatgaaactgaaaatccagaaaaaccagaggtagatccagaagaaaaaccagatgtgactccagaaccagatacggacgcaagagaccaaggaataccagaaaaaataaacaaaaaaacaattcaagaggatggaaaaaaagagagtaaaaaatcaaatctagcaattctaaaaataaatgaagagcagctgaataaaaaatcacgaatatttgatagcgcccaatcagctgaaaccttaaaaagtagcaaggatacaacctttgctagtcctgaaacgaaaaataaacagctaccaaaatccggagagtcacaaaacaaagttatactgtggagcggaatcattctattaagtatagcaacaatgctttctgcaaaaagatttaaacaaaacagatctctc

SEQ ID NO: 21657 - DNA, 1020 bp, Enterococcus faecium
ttgaaaaaaatcggctttttaagctttggacattggatggagcaaggatcgcttgtgaaatcagctcaagatgcttatttgcaatcgattgatttagcggtggaagcagaaaaaatcggagtggacggagcgtttttccgcgtacatcattttgcccctcagattgggtcgccgtttcctttgctagcggcaatcggcgcaaagacaagtaagattgaaatcggtacaggacttattgatatgcgatatgaaaacccttattatatggcagaaaatgccggattgacagatatcatcacgcaaggaagagtgcaactaggagtggggcgtggttcacctgaacaagttctagatggctggaaatactttggttatgattacagtgaagaagaaatcaaagaggtaacacgggaacgcacccttgaattcttggaattacttgaaggaaaaccatttgaagaaccaaatcctcaaccaatgttcccacaaggatcaggaaaattacggatagaaccttattcagaaggattacgacaaagaatctggtggggagctggttcgcagcaaacggcaatctgggcagcacaacatggaatgaatctgcaatcatctacattagtcaattacgaatcccacgagccattccatatccaacaagcaaaccaattacgtgcgtataaagaagcgtggaagcaagcaggtcatgattttgaaccaagaacattagttactcgctcgattcagccaatcaccactgatttggatcgacgcttatttggacaagacggtagtccgcaacaagatgctgtcggctatcttgcttatcaccgaaacccaacgatttttggaaaaacttttgctggtgaacctgatcaattaatcaaggagctagctgaagatgaagcaatcaaagaagcagacacagtacttgtcacgattcctaatactttgggggtagaatataacatgcacttgcttgaaacaatcgtaaaagatatcgctccagaattaggatggcgg

SEQ ID NO: 21658 - DNA, 785 bp, Enterococcus faecium
attgcgacaccctctagaacaaaagagattttattgaaacatggtttttcatttaaaaaaagtttaggacaaaattttctgactgaaccaaatattttaaggaaaatcgtagaaactgcgcaaatagatgaacatacgaacgtgatcgaagttggaccaggaatcggtgcattgacggaacaattagccaagcatgcaaaacaagtcgtagcatttgagatcgatgatcgtttgatccctgtattggctgatacgatcaaccctatgacaatgtgactattgtacatcaagatattttaaagaccgatttgtcaacagctgttagagaaacatttcatgaggagcttccgttaaaagtcgtagcgaatttaccttactatattacgacaccgatcatgatgcattttcttgaatcagatttggttgtggatgaactagtcgtcatgatgcaaaaagaagtagctgatcgtatctctgctgaaccaggaacgaaagcttatggttcattatcgattgctgttcaatattatatggaagccagtttagcattcatcgtaccaaaaacagtatttgtccctcagccaaatgtagattcagcgattttgaaactgacaagaagagatataccggcagtcgaagtgacagacgaaaaagcatttttccgattgacaaaagcggcatttcagcaaagaagaaaaacgctttggaataacttgcagcattcgtatggcaaagatgaccagacaaaagcatggttagcaaaaagctggaaacagcttgatgaa

SEQ ID NO: 21659 - DNA, 783 bp, Enterococcus faecium
atgtacaaggaattagaaaacaaagtcgcagtagtaactggtggctcaaaggggattggaacagcgattgctcaacgattcgggaaagaaaaaatgaatgtagttgtcaactataactcggataaagaaggagcagaaaaagcagtcaaagcaatcgaagaggcaggcggaaaaacagtctctgtacaagcagatgtcagttctgaagaaggaatacagcgtttacttgatacggctttagaaaattttgggacactggacgtttgggttaataatgctgggatggaaaatcagcatccaacccatgaacttagccttgaagattgggaaagagtgttaaaagtcaatttgactggcgtttttatcggaacgaaagcggctttaaattactttacagagaataataaaaaaggaaatatcatcaatatgtcttctgttcatgaacagatcccatggccaacgtttgctcattacgctgcttcaaaaggcggggtaaaattatttaccgaaacggtagcaatggagtatgcaccgaagggaatcagaatcaatagtataggccctggtgctatccgtacacctattaatgcggcaaaatttgatgatcctgaacaaaaagaactcttggaaagtatgatcccactaggacgcgtaggtgaaccaaaagaaatagcggcgacagctgcatggttggcttcagacgaatccagttatgttacaggtattacactatttgcagatggtgggatgactttatatccttctttccaaggtggaaaagga

SEQ ID NO: 21660 - DNA, 870 bp, Enterococcus faecium
atgatcaaacatcaaaactggaagctatgcaaaatgggtaaaatgacctatcgagaagtcctgtcacgggcttcttcttttttagaggatcatgggaaagaagcatatagtatccaatttttatttttggaacgaaaacaatggaaaaaacttgattggctccttcatatgaacgaagagatttcagaagaagaacagcggttgatcgaaaccgatctgcgacttctgcttgcagatcatccacctcagtatttgctaggatatgcagatttttatgatcatcggttaaaggtaactgaagcaacactgatccctcgaccagaaacagaggagttagtcgaatggtgtttagacgagacgcctggtgtaccgttagaagtgatagatattgggacagggactggagcaattgctattagtttgaaagcagcaagaaaaaattggcatatatctgctgtggatctttcagaagaagcattagaagtagcgaaagaaaatgctcagaaagaaggaacgaaaatcagtttttatcatggagatacattaggaccagtaatggatcagcaatttgatgtgattatttctaatccgccgtacatcagtcggaatgaatgggaactgatggatgaaagtgtccggtcattcgaacctaaaatggccctttttgctgagaacgatggattagctatttatgaaaaaatagcagttgaagcaccaagcgtactaaaatcaaatggaaagatttttttagaaatcggatttcgccaaggtgaagcagtaaaaaaaatatttcagcaagcatttccagataaaaaagtggcgataaaaaaggatctttttggcaatgaacgaatgatccaagtttatggt

SEQ ID NO: 21661 - DNA, 1444 bp, Enterococcus faecium
tatatcatggcgattgaccaaggtacaactagctcacgagcaattatctttgacaagaaaggaagacacatcggcagttctcaaaaagagttcacgcaatatttcccgcaagaaagttgggtggaacatgatgcaaatgaaatctggaattctgtacagtcagttattgccggagcgttcatcgaatcagggatcaaaccaaatcagattgctgggattggcataacgaaccagcgtgaaacaacagtaatatgggaaaaagatacaggacgtccaatctatcatgcagttgtttggcaatccagacagtcagctggaattgcagataacttaaaaaatgaaggctatcaagaatttttccacgaaaaaacagggttagtgatcgatgcctatttctcagcaacgaagatacgctggattcttgatcatgtagaaggcgcgcaagaacgagctgaaaaaggcgaattgatgtttggaacgatcgattcttggttagtatggaaactgaccgatggacaagcacatgttactgattactcgaatgccagtcggacgatgttgttcaatatccatcagctagattgggatcaggagattttagatttactaaatattcctcgagtgatgttaccaaaagtcacttctaactcagaagtttatggttatacgcaaggttatcatttttatggaagcgaagcaccaatttcagggatggcaggagaccagcaagccgcattattcggacaaatggcattcgaaccaggcatggtcaagaatacttatggtacaggttcatttattgtcatgaataccggtgaaaaaccgcaattatccaaaaataatttattgacgacaattggttacggcataaatggaaaggtttactatgctttagaaggaagtatttttgtggctggttcttcgattcaatggctgagagatggacttcaaatgttgcaaaaagctagcgattcagaagacgcagcgaaacgctctacaagcgaagatgaggtttatgttgttcctgcattcgttgggctaggtgctccttattgggatcaggcagcacgaggggctatgtttggcttgacacgtggtacgacaaaagaagatatcattaaagctactttacagtcgattgcttatcaagtgagagatatccatcgatacgatgcaagatgacactggaatcaagattcctgtattgaaagtagatggcggtgcagcaaacaatgaatatctgatgcaattccaaacagatatcttgaatgtaccgatccaacgagcagaaaacttggaaacaacggcgctaggggcagcatttttagcaggattagctgtcggttattggaaagatacagacgagatccgcgaattttatgaagctggcaagctatttgaagttcaaatggaggaagagcgccgagaaaaactttacaacggt

SEQ ID NO: 21662 - DNA, 489 bp, Enterococcus faecium
atgaatgatatgtatctattcatagttttcgcagcttcagcttatgtgctgcaagcagttatcagttggaagcaactaaagcatttcaatcaaacatatagcgaactgcgaagaaaaggaaaagtagcgattggtaaacgacctgggaaaatccgttcaggcacgattgttatgctagctatagacgatcatgatcaagttttagaagtcagaaaaatgcaaggggttacatctttggcaaaatttcattcattacctgtctatgcgggtgaagatatccattacatcgatcgttaccatccctcagttcgagcggaagatcgtttgacacaagcagctttagaaaatgccagagaagtatacttacgaatagaggcaggaaatgaaaaaagtgaacaaccttcattgccttttattgctatgctcaataattttcggatatggaaaagtacgatcaaagaaaaaaggagtgacaaacgatggatatca

SEQ ID NO: 21663 - DNA, 561 bp, Enterococcus faecium
atgtcattgattgggaaaaaaatcgaagaatttaatgcacatgcttatcatcaaggagaatttttagaagtcagtgaaaaagatcttatggggaactggagtattctttgcttctatccagctgattttacttttgtttgtcctactgaattagaagacttacaagaacaatacagtacattgaaatctttaggtgttgaagtcttttcttgctctaccgatacccactttactcacaaagcatggcatgatacatcagatgctatcggtaaaatcgaatacgtgatgatcggtgatccgtctcatcagatttctcgtatttttgatgttttggatgaagagcaaggattagctcagcgaggaacatttattattgatccagacggaatcgttcaagctatggaaatcaatgcagatggaatcggtcgtgacgctagtgcactgattgataagattcgcgctgctcaatatgtacgtacccacccaggtgaagtttgtccggcaaaatggaaagaaagtggcgaaacattgaaaccaagttttgatcttgttggaaagatt

SEQ ID NO: 21664 - DNA, 885 bp, Enterococcus faecium
gtgatgaaaaaagttttattagtggtaaaccccagttcaggcggtgaacaagcaaaggaatttgagcaattagcgatagcaaaattggaatcggtgtttgatgaagtggtcgtcttgcatacaaaaaaagcaggggatgcaaaaaactttactcgcgaagcggctacggaagggtatcatagtgtgtttgtcatgggcggagatggaacagtcaacgaaggaatcagtggaatcgctgaacaagaacatcggccaaatttcggatttttcccattgggtacggtgaatgacttggctcgagcattagggataccgctagaacctgaggaagcgatcaatcatttttcgattgaatcagtcaagccattggatattggaaaaataaatgacgactattttatgaatgtcgtcgcaattggctctatccctgaatcaatcaatgatgtagatgcggagaagaagacgaaatttggaaaactagcttatttcatgtcaggaatcaaacagttagcttccacacaatcctactcgtttcacgtagaagttgatggaaagaaggaagaaattgagagcagtaccttgctgataggactaactaactcagtcggcggttttgaaacattacttccaaatgcaaaagtggatgatggtaagctccatttggtttatttaaaagattcttctttgatcgatacgcttaaaacattgccagacctattaaaaggagtagatgaatctacgaaaaatctagcctaccttacttgtgagcaattagttgtgtcattagctgatgaggaagaattgacgacgaatgttgatggagatgaaggggataaattacctgtgacaatcaaagtattgccctcacatttacaggtttattgt

SEQ ID NO: 21665 - DNA, 1593 bp, Enterococcus faecium
ttggatcataaagaaatgcggcgcgtcatgcaaggagcatttgtattgacgattgcttctttcatagcaaaagtattaagtgccctttaccgaattcccctccaaaacttagtcggcgacgaaggtttttatgtttatcagcaagtttatccaatttatgggatagcaatgactttagctttatccggtcttccgcagttcatatcaaagtacgttgcagaaagaaagaatcctttcgagcgaaagcaagctttgcaaaatctttatcccttagtattttggacaggtgtctttttgtggttgtttgtctttgcatttagcagctggattgcttggatgatgggagacatacaattgaaaccgctgatccaagtagtttcctttacctttttgctgatgcctggtctatctttttatcgagggaatttccaaggaagattcttgatggaaccaactgctgtttctcaagtagttgagcagttcgttcgtgtttttgtgattgtctgtagtgcgtttgcttttagaaagcttggatggacggtgtaccaaacagggacggcagcaatgagtggagctgtttttggcggtttatgcgcatatgggatccttcactactatgaacaaaagattcatggaggagcgttaagcttccgacggtttccattgttcaaacagccgtcaaagcccttgatccggcgttttctggtagaaggcggactggtttcgatttatagtggattgcttatctttttccagctgatcgactctttctttgtaaaaaatgctttggaagtttacggactgtcagaatacggtgcgaagatagcaaaaggggtctatgatcgaggtcagcctttagtacaattaggtttagtgattgccactgcattaagtgcgacattcctgcctgcgttgactcgtcatttgaccaaccggatctatcgtcagtttttacagacagccaaaatctatcttagattgacgaccgctttagcattagctgcgtctttgggattagccttgctgctcccttatatcaattatgcgttgtttaaagattatgcgggaaatgcagcgcttgtattatttgttttttccattgctttcactgcagtcatccaagcttatcaaagtattgctcaaagcaagaactcgtttcgcccttctttaaaaggcgcaggatggggactattggtaaaaggattgactacttcttttctgaccggtttattaggaacagcaggtgcaagcctgtctacccttttaggattaggtgtgacgctttggtattttgttcgaattgaaacaaaagagctaaatgctttttggaaagaacggcattttggacggaagttgatgttcagccttctttgtatgacagtagtactgctgctgtattatggtgtattgaatatagtatttggtcctgtaactcatcgttccactgctttttttgtcagcgtgataggagttgggatcggggcttctgtgttcatttatgcagtgattcgtcttcgtctgtttacagtacgagaatggctaatgttgccttttggtaagaaaatcctgcgattaaataaaaaaattaaaaag

SEQ ID NO: 21666 - DNA, 774 bp, Enterococcus faecium
atccccaaagctgtattagaaggtatggaaggaaaacctgtagttgttcgtacaatggacatcggtggagataaagaactaccatatctgcaattacctcatgaaatgaatccattcttaggatatcgtgcattgcgtatcagtttatctgaacaaggcgacgaaatgttccgtacacaaatgcgtgcattgcttcgtgcatctgttcatggtaatttacgtatcatgttccctatggtagctacactcaaagaattccgcgcagcaaaagcgatctttgaagaagaaaaacaaaaattgataagtgaaggcaaggaagtatctgatacgatccaagtcggcatcatgatcgagattccagcagcagcagtcttagcagacaagtttgcaaaagaagtagatttcttctctgtaggtacgaacgatttgattcaatacacaatggcagcagaccgtatgaacgaacgcgtttcttacttgtaccaaccatataacccatcaattttacgtttgatcaaaaatgtaattgatgcagcacacgctgaaggaaaatgggcaggtatgtgtggagaaatggctggagatcaaacagctgttccattgctagtaggtatgggtctagatgagttctcaatgagtgcgacatctattcttaaaacgcgtagtttaatgaaacgcttggacacagcgaaaatggctgaacttgctgatcgtgcattgaaagaatgcgatatgatggaagaagtcgttgaacttgttcatgaatatgtaaaa

SEQ ID NO: 21667 - DNA, 2490 bp, Enterococcus faecium
atggaagaactttttactgaaagagcccaagcagtattagaaattgcacaagaagaagcaaaacggttgaaacatcaatcagttagttcagaacatgttttactagccttagtggtcgagcaaaatggaattgctggaaaagtattacgtgaaatggatttgaatgaaacggaaatttatgaagaaattgaacatctgattggttatggtggtatccgttcttaccctaaaggagtctttcttccatattcaccaagaatgaaacaagtttttgctttagctagcagcgaagtgaagaaaactggttctcaaaaagttggaacagaacatattttgatgagcttattaaaagatgaaagtatcatggctactcgaatcatgatcaacttaggtatcagcctttcaaaagcccgtcaagttctgaaacaaaaaatggggctagctggtgattctgctggaaaaggaatgaatcgtcgtagaaatgtaaatgtacaagataaacggcaaacaccgcaaggaacacctacgctagattcattagcacgtgatttgacgaaattagcaaaagaaaacaagctggacccagttgttggtcgttcgagagaagtgaaacggcttatccagattcttagccgacggacaaagaataaccctgtactggtgggtgaacctggtgtaggcaaaacagccattgctgaagggttagctcaaaaaatcattttaggtgaagtgccagaagacatgcaagaaaagcgcctgatgatgcttgatatgggatctttggttgctggtacgaaatatcgcggtgaatttgaagatcgaatgaaaaaggtcatcgacgaaatctataatgatggtcaagtaatcttattcattgatgaattgcataccttaattggtgcaggtggagcagaaggagcaattgatgcttcgaatatcttgaaaccggcgttagctcgaggagaattacaaacgatcggagcaacgaccctagatgaatatcaaaaatatatcgaaaaagattctgcattagagcgacgttttgctcgcattcaagtagatgagccaactcctgaagaagcagaagtgattcttcaaggattacgtacaagatatgaagagcaccatggagtggagatcacagatgaagctgtacgagcagcagtcaatctttctgttcgttatatcacttctcgtcaactacccgataaagcaattgatttgatcgatgaatcagcagcgaaagtccgtttggatcaaaccgatcacttaacaaaatcaactgtgatcaaactagaaatcgatgaactagtacaagaaaaggaagcagcgatccaaaaacaagactttgaaaatgctgctcaattacgcagacaagaaaaagcactacgtaaaaagctgcaaaaagtttctgcaattgaagcaaaacaggagcaaggttattctgatcgtgtaacagaagaagatgttgctacagttgtatcggagtggactggtgtccctctacagcagttggagaaaaaagaaagcgaacgcttgttagaactggaaggacttctgcatgaacgtgtcgttggtcaagatgaggctgtcaaagcagtttcacgtgcgatccgccgtgcacgaagcggattgaaagatcctgatcgtccaattggttcattcatgttccttggaccaactggtgtcggaaaaacagaattggccaaagcactttcagaagtcatgtttggaagtgaagatgccctgatccgtgttgatatgtcagaatttatggaaaaatacagtacaagccgattaatcgggtctcctccaggatacgtagggtatgatgaaggtggacagttgacagaaaaaattcgtcaaaaaccatattcagtgattctcttagatgaagtggagaaagcacatccagacgttttcaatttacttctgcaagtattggatgatggtcatttaacagattctaaaggtagaaaagtggactttagaaatacaatcatgattatgacttcaaatatcggagcgacacaaattcgagaagaaaaaaatgtcggattcaatgtccaagatgttactaaagatcacaaagccatgcaaaaacgtatcttagaagagttaaagaaagctttccgacctgaattcttgaatcgaatcgatgagactgtcgtcttccattcattgagtaaagatgaaatccatacaatcgtccaaatcatgagcaaagcgattatcaaacgattgaaagaacaagatattcaagtgaaaatcacaccatctgcaatcgatgtgatcgggaaagctggatttgatcctgaatatggtgcacgtccaatccgtcgcgcacttcaaaaagaaattgaagatcgattgagcgaggctttgcttggcggagaaattcgtttaggtgaccacgtaacagtaggtgcttcaaaaggtaagatcacattgaatgttcgcggacctaaaaaggaaacagtaggttcccta

SEQ ID NO: 21668 - DNA, 1098 bp, Enterococcus faecium
atggcattgactgctggaattgttgggttgcccaacgtaggaaaatcaactttgtttaatgcgatcacaaaagcaggagcagaagcagcaaactatccctttgcgacgatcgaccccaacgtagggatggtagaagtacctgactggcgtttgcaacgcttaacagaacttgtacatccgaaaaaaactgttccgacgacttttgaatttacagatattgctggaatcgtaaaaggcgcaagtaaaggagaaggtttgggaaatcaattcttaagccatatccgccaagtagacgctatttgtcacgttgttcgctgttttgatgatgataatattactcacgtagaaggacgtgttgatccactagaagatattgatacgatcaacttggaactagtgttagcagacttagaatctatcaacaaacgctatactcgtgtagcaaaagttgctaaaaccaaagataaagatgcagtggcagaactagctgtactggataaaatcaaacctgtactggaagaaggaaaatctgcccgaacgatcgaatttactgaagaagaacaaaaaatcgttaaatcactatttttattgacgacaaaaccaattctttatgtagccaatgtctcagaagatgacgtagcagatgcagacgcgaatcattatgtacaagaagtgcgcaactttgctgcagaagaaaatgcagaagtgatcgtggtcagtgctcgtgcagaagaagaaatcgcagaattagatgaagaagacaaagcggaatttttagaagctttaggaatcgaagaatcaggtttggatcagttgatccgtgctgcttatgatttgttaggcttagctacttactttactgctggggaacaagaagtacgtgcttggacattcaaaaaaggaatcaaagcaccacaagcagcaggaatcatccattcagatttcgaacgcggatttatccgtgcagaaactgtctcttttgaagacttggatcattacggaaacatgcatgcagcaaaagaagctggacgtgttcgattagaaggaaaagattatgtcgtacaagacggcgacgtaatgttattccgctttaatgtg

SEQ ID NO: 21669 - DNA, 402 bp, Enterococcus faecium
ttgggtgcagaattaaatcaaaaattatttagtgcggcagataatctccgtagcaaaatggatgcgtcagaatataaaaattatttattggggctgattttctataaatatttatccgaccgtttgctggaacaagtggttcttttagcagatgaatccttagaggaatatgacacagtaagcaaacaaacgatgttgtatcgtgaattactttcagatgaagaatcaaaagaagacctgattgcaacaatcgttgatattttggggtatgcgatttcgccagagtatcttttcaacgtcttagcggatcaagcaaaacaagcaacgttccaattgaatgatctaaacaaagcctttttagcaagtcatatttatggaaaaatactgtcggtaaaattcgaa

SEQ ID NO: 21670 - DNA, 513 bp, Enterococcus faecium
ttgacttttacagtccctcaagcagatcaagtaatcaaagaacttttgtcattctacaaagaccaaccagaaatagtgattggcgcaggcacagtattagacgctgtcacagctcgcttggctatcttagctggcgcagagtatattgttagcccttcctttgatcaagaaacggcagagatgtgcaatctgtatcaaattccttacttaccaggatgtatgactattaccgagatcaaaacagcgctgaaaagcggggtagatatcgtcaaactatttcctggaagcgcttatggaccaagtatcatttctgccttcaaggcgccgatgcctcaagtcaatatcatgccaactggcggtgtgagtctggacaatatgaaagagtggttcgatgctggtgtcgtaacagtcggagtaggtgggaaccttttagcacccgcagctacaggagattttgacaaagtaacggaagtcgcgcaacagtatgcagcaaaaatgaaagaaatcaagagg

SEQ ID NO: 21671 - DNA, 720 bp, Enterococcus faecium
gctggcattttttatgcagcgatgggcactggcaacaatagttctactgctacaagcggcaatcagaattctgccggtgaaacagttgtggaaaatgtcaaagtcaatgtagattctgatatcaccaaagcggtagataaagttcaagacgctgtcgtttctgttatcaacttacaaagtcaaaaccaatcaagcggttttggcggactattcgggcagcaagaagaaagtagcagctcagatgatagtaatttggaagcttatagtgaaggaagcggcgtgatctacaaaaaagacgggaatactgcttatgtagtcacgaataatcacgtagtagatggccagcaaggtcttgaagtcttgatgaaagacggtacgaaggtaaaagctgaattagttggaacagatgcttattcagatttagcggtgttgaagatcaattcagacaaagtcgaaacagttgcctcttttggtgactcaagtgctctgaaggttggtgagcctgcgattgcgattggttccccactaggatctgaatatgcaaattctgtcacttcaggaatcatttcttccttgaaccgacaagtgacaagtacgaatgaatcgaacgaaacagtcaatatcaatgcgatccaaacagatgcagcaatcaaccctggaaattctggtggtcctttagttaatatcgaaggacaagttatcggtatcaactcaagtaag

SEQ ID NO: 21672 - DNA, 1008 bp, Enterococcus faecium
ttgaaaaatattattttaacgggagatcgaccaactggtaagctgcatttagggcattacgtcggttctctaaaaacccgagtggctatgcaggcagatgaagacaaccaactgtttgtcatgattgctgacatgcaagcactgacagataatgctaaaaatcctgagaaggtttcatcaaatgtcttgcaagttgctttagactatttagccgtgggattagatcctgcaaaatctactttatttatccaatcacaaattccggaattagctgaattaaccatgtattatttgaacttagtcagcgtaggacgcgttcggcgcaatccgactgtcaaaacagaaatcgaacaaaaaaaattcggtgaaagcgtgcctacaggattctttatctatcctgtttctcaagcagcagatatcactgcattcaaagcgaatcttgtacctgttggcgaggatcaaaaaccaatgctagagcagacacaggaaatcgtacaaagcttcaatcatacatatggtgaagtcttggtagaaccaaaaggcgtattcccaccaaaaggaatgggtagattacctggaatagatggaaatggcaaaatgagtaaatcgttaggaaacggtatttatatctccgatcctgccgatgtcttacagaaaaaagtcatgagtatgtatactgatccaaaccacatccatgtacaagatcctggacaagtagaagggaatatggtcttcacctacttggatgtattcggaacagataaagaagcaattgaagaaatgaaagctcattaccgccgcggcggacttggtgatgtaaagatcaaacgatacctcattgatgtattggaagctgaatttgcaccgatccgtgcgcgccgagaagaattggaaaaagatccttcagctgttatggaaatcttacgtaaaggtagtgaagaagctgctaaagtagctgcacaaacactttctgaagtaaaatcagcaatgggaatcaattacttccat

SEQ ID NO: 21673 - DNA, 837 bp, Enterococcus faecium
atcgatgggcgtattaaagtaattaaaactgatgagaatggccaaaggctggcaggagcaaaatttgaaattttatcaagcgattcacaagtgatacaagaaggtataacggcagaaaacggagaatttttaagtgaaccgcttcctgtaggtagctatcaagtccgagaaacagaagcaccggaagggtatcttttagatgcgacggtacatgatgtttttataaatgaatactccatagaagaagtgacgttaaccattgaaaacatccttgatacgggtggtgttgaactaattaaacatgctgaaggcagtggtgaagtccttcaaggagctgtttttgagttacagaaccgagaaggagaaacgctacaaaccggtttaactacaggagaagatggaaaactggcaattgacggtttagcaccaggagcatatcagctggtagaaactcaagcgccaatagggtatgaattagatgcgacaccaatcgagtttgagatcgaaagaagtcagacagcggtggtagaattgacgaaagaaaaccgacttacaccaggcggtgtcgtgttgacaaagatcgatgaccaaagcggggaaatcctgcaaggagctgtttttgagttacagaaccgagaaggagaaacgctacaaaccggtctaactacaggagaagatggaaaactggcaattgacggtttagcaccaggaacatatcagctggtagaaacccaagcgccaatagggtatgaattagatgcgacaccaatcgagtttgagatcgaaagaagtcagacagcggtggtagaattgacgaaagaaaaccgacttacacca

SEQ ID NO: 21674 - DNA, 1410 bp, Enterococcus faecium
atgataaaaatctacaatacattgaccagaaaaaaagaagaattcatccctatacaaaagggacatgtcggtatgtatgtctgcggaccgactgtgtataattatatccatatcggaaatgctcgtagcaccattgctttcgatacaattcgacgctattttgaatatcgaggctataaagtcgatttcgtatcgaatttcacggatgtagacgataaaatcatccgtacagcaaacgaattaggtattacagcaccagaagttgctgatcgtttcatccgagcatttgaagaagatacgaaagcgttgaatgtcgagcctgctacactgcatccaagagtcatggatcatatgccagatattttagcatttattcaagtgttggttgaaaaaggctatgcttatgaatcttcaggtgatgtgtattaccgtacccgtaaatttgaaaattatgggaaattaagtgaccaatccatcgatgaactggaagtcggagcaagtcagcgtacaggggaagaacagcagcaaaaagaagacccattagatttcgctttatggaaacaagcaaaacctggcgagatttcttgggattcaccatggggcaaaggacgtcccggttggcatattgaatgttccgttatggcaacaaaacatttaggagaaacgatcgatatccatggtggcgggcaagatttagaatttcctcatcatgaaaatgaaatcgcacaaagtgaagcgaaaacagggaaaaaattcgctaattactggatgcacaatggctatgtaacgattggcgaagacgatgaaaaaatgagtaaatctctagggaatttcatcactgtacatgaaatgatcaaaaacgttgatccacaagtcttgcgtttcttcatggcgaccacacaataccgtcgtccgatccgctacagtgaaacgacgatgaaagaagcagccaccaatttacaacgactgaagaatacgtttgacaatttgaaattccgccaagaaactgcctcagagaatttggcagatgatgcggataaaatcgctttgttagaaaatttagaacagcgattcatcgaagaaatggacgatgattttaatgcagcaaatgggatcacagtggtctatgagcttgctaagtggctgaacacttatctagaccagccgaaagtttctgccgctgtcttggcacaaggagaagctttattctcgcaatggctttcgatcttcggtattttatttacagcagaagagttattagatgaagagattgaacaattgatcgaagaacgaaatcaagcaagaagcaatcgtgattttgtccgaagcgacgaaattcgtgatttgttgaaagaaaaagggatcttattagaagatacaccgcaaggaacccgatggagaagagaagca

SEQ ID NO: 21675 - DNA, 694 bp, Enterococcus faecium
atgaaaaaagaaaaaaaagtttcctcatcgtttatttatttttttggcgcatttggcggcattctatttggatatgatattggtgttatgaccggcgccttaccttttttacagcatgattggggtttggcaggtaaagcttctttgataggatggatcacgtcttcggtcatgttaggtgcgatccttggcggctctttatctggtcttctttctgataagcttggacgacgaaaaatgattcttctttctgcacttatttttatggctggttctgtcctttctgcatctgcccctcacaatggttcttattttctgattgcagcaaggattcttctaggtttagctgttggcgctgcatctgccctagttcctgcttatatgtctgaaatggctcctgctagactaaggggaagattgtcagggatcaatcaagtgatgattgcttctggcatgctcctttcctatgttgcagattatttgctaaaagggttgcctgaaacgatggcttggcgcgtgatgttagggctcgctgctgtccccgcgctgattttatttttcggtgttttagctctaacagagtcaccgcgttttcttatgcaatctggccgcttggaagaggcggcaagagttttgactttttttgggaccaaaagaactgacggaatcgacaaatccgtattgttcaaaaaac

SEQ ID NO: 21676 - DNA, 972 bp, Enterococcus faecium
atgaataaagaattaaacatcacacaagaatgggacaaagtatttccaaaaagcaatcaagtcaatcatcgaaaggtgagcttcccgaatcgttttggtatcacattagtcgctgatttatatgaaccaaaagaagtaagtgaaaagaaattgccggcaatcgctgtgagcgggccatttggtgcagtgaaggaacaatcgtctggtctatatgcgcagacgatggctgaaagaggctttttaacgattgcgtttgatccatcgtttacaggagaaagcggaggagtacctcgatatgttgcttcgcctgatatcaatacggaagatttccaagcggcagtagactttttatctgtacaaaaaaatgtaaaccctgagagaatcggaatcattggtatttgtggatggggaggtatggcattgaatgcagcagctatcgatacgcgggtcaaagcaacagttgtttccacaatgtatgacatgactcgagtaacagcaaatggctacttcgatgttatggatgaaaatgcccgatatgaaatgcgtgaagaattaaatgcacaacgcatcattgatttcaaacaaggggactacgcacgtgctggaggtgtggttgatccgttgcctgaagatgctcctcaatttgtcaaagactatcatgcgtattataaaacagaccgcggatatcatgtccgttctttaaactccaatgatggttggaataggacatcagggttgtcacttatgaatgcaaaactattgcattatattccagaaatccgtcatgcagtcttagtcattcacggggaaaaagctcattcacgttactttggggaggacgctttcaaagaactaaaaggtgacaacaaggaactcatgatcattccaggagcatcccatacagatctatacgaccagacagacatcattccatttgaaaaaatggcaacattctttgaagagaaccttgtg

SEQ ID NO: 21677 - DNA, 1707 bp, Enterococcus faecium
atgagacaatcaaaaatgttgattccaacattacgcgaagttccaaatgatgcagaagtattaagccatcaaatcttgctaagagctggatatatccgccaagtatcagcgggtatttattcatatctgccattagcaaatcgtgtattggaaaaactgaaacgcattatgcgggaagaatttgaaaaaatcggagcggtagaaatgctgatgcctgccatcttgccagcagaactttgggaagaatccgggcgttacgaaacatatggaccaaacttgtatcgtttcaaagaccgcaatgatcgaaaaatgatccttggaccaactcacgaagaaacttttactgatttgatgcgtaatgaaatcaattcatataagaaattacctttaaatctttatcaaatccaacctaaatatcgtgacgaaaaacgacctcgcttcggtttgcttcgcggaagagagtttatcatgaaagatgcgtattctttccatgcaacggaagaaagtttggacgagacatataaagattacgaaaaagcctacaccgaagtattcaagcgttgtggcttagaatttcgctcgattatcggagacggtggcgcaatgggcgggaaagactcaaaagaattcatggcgatctcagaaatcggggaggatacgatctgttattcgactgaaagtgattatgctgcaaacttggagatggctacaagctactatgtatcaaaaaaatcgcatgaaacacagcttgaattggagaaagtagctacacctaacgtaaaatcaattgacgaagtagcagatttcttttctgttgaacctcaaaaaatcatcaagtctgtattgttcattgcggatgaacaacctgtccttgttttggtacgcggagaccatgaagtcaatgacgtaaaactgaaaaactttttatctgctgactttttagaagaagcaacagaagaagaagcacaaaaatatctaggtgctgagtttggttctgtcggaccagtcggtgtttcagatgacgtaaaagtatatgcagaccgttatgtccaagatttagcgaatgccattactggagcgaacgaaacaggattccactataaaaatgtgaatccagaacgcgatttcactgtactttcttatgaagatcttcgttttgtacaagaaggagatccttcaccagacaacaatggtgttcttgcctttactcgaggaatcgaaatcggacatatcttcaaaatcggcactcgttacagtgaatctatgggagcaactgtactagacgaaaatggacgagaaaaatttgtgattatgggctgttatggtatcggtgtaagtcgtttattatcagcaatcgtagaacaacattcagatgaacaaggaatcaactggccaaaaggaattgcgccatttgatttgcatatcgtccaaatgaatctaaaagacgaataccaaacaaacctgacgaatgaactagaagaagcgatgacaaaagctggctatgaagtactggttgatgacagaaatgaacgcgcaggagtgaaattcgcggattctgatttgattggctgtccaatcagaatcactgtcggtaaaaaagcagtggatggaatcgtagaagtgaaaatcaagaaaactggcgaaatggttgaagtacgtaaagaagaattggtgaatactttaccaatcctcttgaaccaaggcgaa

SEQ ID NO: 21678 - DNA, 378 bp, Enterococcus faecium
gtgagttatcgtaaactaggacgcacatctagccaacgtaaagcgatgttgcgtgatttaacaactgatttattaatcaacgaacgtattgtgactactgaagctcgtgcgaaagaagttcgctcaactgcagaaaaaatgatcactttaggtaaacgcggagatttgcatgcacgtcgtcaagctgcggctttcgtacgtaatgaagttgccagcgtgcgtgaagaaaatgaggacatcgtcattgaatcagctttacaaaaactgttcaacgatattgcacctcgttacgcagaacgtcaaggcggatacacacgcattttgaagacagaaccaagacgcggtgatggtgcaccaatggttgtcttagaacttgtc

SEQ ID NO: 21679 - DNA, 753 bp, Enterococcus faecium
atgattgatttacaaaaggtcaataaactgtaccatggaaaatcagtggttaaagatgtacagttaacgattcctgaaaagaagttgactgcttttatcggtccaaatggtgctggaaagtcaacggtgttgtcgatgatcagtcgtttgataccaaaagatacaggtgaaatctatttagaccataacgaagtaaaggcttggaaatccaatgaattagccaaaaaattatcgatcctacgacaatcgaatgaaataaatgtccaaatcaccgtgaaagaattagtagaatttggacgatttccttatacgaaaggaaaattgacgacaaaagacgaggaaatcgttcaggaatcactggaacaccttgggttagaagaaatagcggatcaatcgattgacactctttcaggcggtcaactccaacgtgcgtatattgcaatggtgctagcgcaagacacggattatattttactggatgaacctttgaacaatctagatatgaattttgcggttcaaatcatgcagattttaaaaaatttagtacaagaaatcgggaaaacaattgttattgttcttcatgatatcaactttgctgcaagttatgcagacgaaattgttgcaatgaaagatggacagttatttacgcaaggaacgacccaagaaatgataaaaaaagatgtattggatgaattatacgaaatggacatacggatttgtgagattgaaggccgcagattctgtctttatttc

SEQ ID NO: 21680 - DNA, 408 bp, Enterococcus faecium
atggagtttataattacatctcatggaaatattgccattggatttgtagatacattaaaaatgttttttggcgataatttaaattgtcatgtggtaacacttggagatgcaggcattgaagaattccgtgaaaacattgaaaaaatagtttctcaagtaaaaaatcaagaagttatggtatttgctgacttgattggtggaacacctttcaacgaatttgctaaaagaagtgaagtatttcaaaatgggtttcaacttcttggtggcatgaatttaggaattttgattgaggctgtcaatttgagattacaaggaaaaaaaagcgatgatatcatcgaaaatctaagaaatatgaatacaattgcgtgtcttgcagatatgcaaagacatactaacgaagaggatgag

SEQ ID NO: 21681 - DNA, 3519 bp, Enterococcus faecium
atggatattattcaattagtcggaaaagatccgcaagtaaaagaatgggtcagcaatttagaagaaaaaatgcctagacaactaatcacaggattagcgggctcagcgaaaacacttctatttgctcgagcgtttaagaaaacaaataaaaacatgattattctgatgccaaatttgtattatgcgaatcagttagcagaagatctgcaacatgtgattccgcaagatcagatccatttatttccagtggatgaagtgctttctgctgaaatggccttttcttctccagaagcgcgaggcgagagagttgcaacgcttaacgcacttcaagaaaaaaaagcaggtatctatttgttgccagtcgcatctttgcacaaacgactgccgaataagaaaacttggctacaggcgcaattgaattggcatattggtgatgagatagacgtggaaaatcttcctcgccaattgactttgatgggctatgtacgagaagagatggtcgcaaaaccgggagaattcagtattcgaggaagcattatcgatatttacccgttaacgacaacctatcctgttcgtgtagaactatttgatgtagagatagattctatgcggtattttgaagcagaaacacaacgctcaatcgaaaaaacggaagaaatctgggtttccccaacgagtgaacaagtctacggaccagaggatctagaacatggaatagagcaaatgcaaaaaatgctagaaaaacggcttgctgcgaccacagaagaagcagaccgcgagtttttgcaagattacttcggtcagctgacttcaagctggcaagcaggtgtcccgacagaagaagcaaaattctactcagatcttctttaccaagaatctgtgacgatcttggattatttcccttcaaatagtttactagtcgttgatgattatcagcgaatcatggaaacaaatcgggaaatcgaaagggaagcggcagaatggcagactcaaaaaatcagcgaattgcgggtgttttctgagcagacattttcagcagatatacaaaaaatcgtgcagaaggaaaagttcaccacaacctttttctcactcttccaaaaagggatgggaaatcttcgtttccaagcaatccataattttcaatatcggacgatgcaacagttcttcggacaaatgccattgctgaaaacagaaatggaccgttggcgcaagcaaaaacagactgttgtgatctttattccgacaaaggacagaatacgcaaagcagaacaaatgcttcgagatgaagacatattagtagtagaaacagaaaaaaatgcattgatcagaggacaggtacaattagttgaaggagctttgcaggctggttttgaacttcctcaagaaaaaatagtagctatcacagaaaaagaaattttccaaaaaacgacgaaaaaacaaacgagacgtcaaacagtaacaaacgcagagcgattgaaaagctataatgagttaaaagcaggagattacgttgtccatgccaatcatggtatcgggaaatacattgggatggaaacgctagaagtagatggcgttcaccaagactatatgactattttgtatcaaaacgacgacaaactgtttattcctgttactcaactgaatctgatccaaaaatatgtcgcctctgaagccaaagcgcctcgcatcaataagctaggcggaagtgaatggacgaaaaccaagcgaaaagtctcttcaaaaatcgaggatatcgctgacgatctaatcaaattatatgccgcaagagagtcagaaaaaggatatgcttttggacctgatgacgcctaccaaaaagaattcgaaaatgccttcccctactctgaaactgatgaccagttgagaagtgcagcggagatcaaacgggatatggaaaaagaaaaaccaatggatcgactactcgtaggtgatgttggttatgggaaaacagaagtagcgcttcgagcggcctttaaagcgataaaggaaagcaaacaagtagcctttttagttccaacaacgatcttggcacagcagcactatgaaacgatgctggaaagatttgaaggtttccccgtaaatatcgggctattaagtcgtttcagaacaagaaagcaacaaaaagaaaccatcgaacaactgcgtacaggtcaagttgatattgttgtaggaacccaccgaattttgtcaaaagatattgaatttagcgatttgggtctactgatcattgacgaagaacaacgttttggtgtaaaacataaggaacgattgaaacagttacgtgcacaagtggatgttttgactctgactgcaacaccgattccgagaactttgcatatgtcgatgttaggcgtgcgggatctttcagtaatcgaaacaccgcctgcgaatcgttatccgatccaaacgtatgttatggaaaaaaatcctggggctattcgcgaagcaatccatcgagaaatgggacgaggtggacaagtattctatttatataatcgggtagaaacgatcgaacaaaaagtagaagaaatccaagaactcgttccggaagcacggatcggttatgctcatgggcaaatgacagaggcgcaattagaaaatacgctttttgaatttattgaaggtcaatatgatgttcttgtcactacaaccatcattgaaacaggagtagatatcccgaacgcaaatacgttgttcgttgagaacgctgattatatgggattatccacgttataccaattgcgagggcgggtaggaagaagcagccgtgtcgcatatgcttactttatgtatgagcagcagaagatccttaacgaagtcagtgaaaaacgtcttcaggcaatcaaagattttacagaactgggatctggattcaagattgcgatgcgggatctttccattcgcggtgcaggtaatctcttaggtgctcagcagcatggatttattgatgcagtcggtttcgatatgtattctcaaatgctaagcgaagctgtttctcgtaaacaaggaaagaatagtcaagtggagaagaccactgttgagatcgacctcggtgtcgatgcgtatctacctgaaacatacgtggcagatcaacggcagaaaatcgagatctataaacgaattcgtgaacttgattcgcaagaaatgctagatgaactagaagatgatctgctcgaccgttttggagaatatccagaagaagtagcacatctcttgacaattgggcagatcaaaatggatggcgatcgagcgctcctagaaacgataaggaaacaggaggcgcatatagtctttactctaagtaaagttggaacaaaacgctatagtgtggaacagttattcgaagcactgacagcgacaaaactaaaagccagtctaggcgttgaaaaagaacagatggtgatacgcttgacgatccccaaccaaatggaagaagcagtatggcttcaggaaatccaaaagtttgtcaaagcgttgcgtgagcaaaaatatctgtcagcg

SEQ ID NO: 21682 - DNA, 264 bp, Enterococcus faecium
atgactgaaggaagaaatcaacgcaaagtttatcaaggtcgcgtggtttcagacaaaatggataaaacaattaccgttgctgtcgaaacaaagaaaaaccaccctatctatggcaaacgcatgaactattctaagaaatacaaagtgcatgatgaaaacaacacagcaaaagttggcgacatcgtgagaattatggaaactcgtccattatcagctacaaaacgtttccgtttgttggaagtagtcgaagaagcagttattatc

SEQ ID NO: 21683 - DNA, 321 bp, Enterococcus faecium
atggcaatggaaaaaatgcgagaatatcacggactttatcatgttctccatggtgtgttatcaccgatggaagggacaggtccagaagacatcaatatttcttctctgttgcagcggctgcatgatgcagatgtaaaagaagtgattatcgcaacaaatgcaacaacagagggagaagcaacagctatgtatctctcacgtctgatcaaacccgcaggtatcaaagtgactcgtctagcacatggtctgtctgtaggctctgatatcgagtatgcagatgaagttactttattgaaagctgtcgaaggaagacgtgagtta

SEQ ID NO: 21684 - DNA, 732 bp, Enterococcus faecium
atgcaaaatacctttcaatcaaaatcactttattatcagctggtagaaatattgaaacaacgaatcgaaaacagtatggtcgctcatgacaagctgccatcagaaagagagttgaccagtttttatggcgttagtcgcacgacggtgcgactagcattgcaagaactggaaaaaatgggctacatttatcgacaacatggaaaaggaacctttgtttcggaattaaggacaaatgcgactgatctagctggcgcatatagttttaccgaacaaatgcgggcaatgggcaaacatcctgaaaccaagatattggccttcaagaagattgaagcaactaaatatttagcgagtcatctgaatgttcaactaggtgagcctttatttcaattagaccgattgcgcttagctgatgatttgccaatgatgatcgagaaatcctatttgccagtgaagctatttatgtccctttctcaagaaattctatttctgaaacctttatataatttgttttcagagaatttcaatcaaatcgtacggttggctgacgaggaattttatgccagcattgtccagaaagaagatagtgagttgctaaatattccagaaggatcaccagtgctccatttagttcgctcaacctataatctcgagaacgaagtgattgaatttacattaagtgtagcgcgggctgataaatttcattataagatcaggcatctgcgttccactaac

SEQ ID NO: 21685 - DNA, 2190 bp, Enterococcus faecium
atgagtcttaaaaataaaattcggcggtttatggaaaagaaaaatctaaatccgatgaacaatcgcaaaaaagtaggtatcattttatttgctacgagtattggattgttctttttatttgccgtccgtttctcgtatatcgttattggaggtcatgttgctggtacctcattagctgaaaaaacaaaacagttgtaccaaggaagtgaagtagtaaaagcaaaaagaggaacgatttatgatcgtaacggtgtggcgctcgcagaagatgcctcctcttattcaattaaagcgatactctcaaaaacatatacctctggggataaaaaactgtatgttgaagaaaagaattttgataaaatagcagaaatcctgcataagaatctttctatagacaaaaaagatgcactgaatattttagaggacggcgcaaaaaaagagctgtatcaagttgaatttggtagctatgggaaaaatatctcccaagaaaccaagcaaaacatcgaagcggacatgaaaaaagaaggtgtcgctggtctttattttgtcgaccatcaggctcggatgtatccaaatggcgtcttttcttctcattttattggatacgcagttccagacaaagatgagaatggcttagttggtaaactaggtttggagtctgcttacaatgatatcttgagcggtaaagatggtaagattatttatcaaaaagataattttcaaaatcctctgccaggtacagtggcagaagaagaaaaagctgtcgacggacaagatatctacacgactttagacagcagactacaaagttatttagaaacactgatggatcaagtaaatgaagaatatcagccagaagaattgacagcagtcctgatgaaagcaaaaaccggagaaatcttggcaatgggacaacgacctactttcaatcctgaaacaatggaaggattgactggaaaagatgctatctggcgtaatttcttggtacaagatagttatgaaccaggatcaaccatgaaagttttcactactgcagctgctatcgaagaaggagaattcaacgagaatgaaaccttccaatctggaaaaatccaagtagaagatgctacgatcaatgaccatgactttggtgaaaaaggtgtgctgaccatgcgtcaagctctttcatggtcaagtaacgtcgggatggtcatactggaacagcgattaggcggacgatggtataactatttacaaaaactgggatttggacaaagtactcattctggattagatgatgaagtaaacggtgctttacctacatcaaatattgtcgaccgagcaatgagtgcttatggacaagcggtaggtgtgacgaatttccaaatgatgaaagctttcacttctattgcgaataacggtacaatgattcaacctcgatatatcagcaaagtggtggatccccaaactggagaagagcgaacaactcaaacagaagttctagggcaacctttttcaaaagaaacaacagaaaaagtccgtgaatatatgagagatgttgtcgaaagcgaaaactacggtagtgcttatggtgtatatagtgtacctggatacaatgtatcggcaaaaaccggaacagcccaaatcgcttctgatacagggggatatcaaacaggagatacagcctacctgtattcgattgtggagatggttccttctgaagatccagactatgtcttgtatctaacaatgaaacaccctaagacatatgatcgaatggcattggctaaaatcgcaaatccattgatgaaacgggcaatggattttaaagaaactgaagaagattcagatacagaaacaaaaacagaaaaagtatccgtagccgattatcgtaatcttgaagcggacgttgcagcagctgatgctcaaaaaagtggactgcaacctgtagtgatcggtaatggtaaaaaagtacaaaaacaatctactgccaacggtgatcagttgatctctggagaaaaactgatcctatatactggtggtgataagctgatgcctgacgtaacaggatggtcaaaagcagatatcatgaagctggggaaaatcctcggtattgaagttagttttgatggagatggttattgtgtcaaacaagaacttgctccatatgaaaaaatcactgaagacaaacttagttttactttagaagaa

SEQ ID NO: 21686 - DNA, 306 bp, Enterococcus faecium
atgtttgttaaaaaaggcgataaagttaaagttatcactggaaaagacaaaaacaaagaaggcgttgtactagcagcgttcccgaaaaaagataaagttattgtcgaaggtgtaaatgtcgttaaaaaacaccaaaaaccttctcaagctgctcctcaaggtggaattgttgagatggaagcgccaattcatgtttctaacgtgatggtggttgactctactggtgtagctggccgagttggctacaaagaagtagacggcaaaaaagtccgtgtttctaaaaaaaccggtgaagttttagataaa

SEQ ID NO: 21687 - DNA, 1434 bp, Enterococcus faecium
atggataagaaagttttaataaagaggttctctgaagctattgaaaaaggaaatgcagcaatatttgcaggtgcaggattatcgatgtcacaaggatatgtaagttggccggaactacttaatgatcctgcaacagaaatcgggttggattctaaaaaagaaacagacttagttactctggctcaatattataaaaatgaaaatggtggatcaagaggaattttgaatcagatacttatggataattttggtgaagaattagaaatatctgaaaatcatcgaatactagcaagtttacctattgaaacttattggacaactaattatgatcatctaatagaaaaatcaatccgagaagcttataaaaaccctcaggttaagaaaaattatactcagttagcaacaactaatccaaatgtggatacaattgtttataaaatgcatggtgatatagatgatgtcagttcgacagtaataacaagagatgattatgaaaaatatgatgatgattcgtacgcgttatttaaagaaactttaaaaggagatttgttaacaaaaacttttctctttttaggatttagttttacagaccctaatttagaaagaattttatcagatataagatgggttttgagagaaaaccaaagacctcattattgtataatgagaaaaatattaaaggaaaattttgtcgattctgaggatttttttgatcaagagagatataattatgaactgacaaaaagaagactacaaatcaatgatttgtccagattttcgataaacgttgttgaagtagatgattattctgagattactgatattttgaaaagtattagaaaaaagtatttgagaaaaactatttttatttcgggaagtgctgttgattatactccatttacatctgaatcgaaaggattaaaatttgtcgagaaattagcatataggctttctgaatccggttatagaatagtatcaggttacggacttggaattggtaatagtattgtttcaggagttctaaagcagagaagaaatttaagaaaaaataacatacaagacgtactttctttaagaccacttccccttgatatgcctcatgagtggagaagatatcgagaaaacattattgcagagtctgggattagtatttttgtttttggaaacaaacttgaatcaggtgaaatagttacagcagatggaatgattgaagaatttgaattatctgttcaaaatgaaaatatagtagttccgattggatttaccaaaggtgcaagtaaggttttgtttgataagattcaagagaatttcagtgattattttgatgattccttaaaaagtaaatttcaagcgctagaaaaattagatactgaaggagaagtagataaaaaagttgaacaaattgtcagtttaataaatagtattcaggaggat

SEQ ID NO: 21688 - DNA, 369 bp, Enterococcus faecium
atgaaaatggctcacacatgtgttcgggtgaaagatcttgaagcatcaatcgaattttatcaaaaggcatttggttttgaagaaagccgccgccgtgattttccagaaaacaaatttacacttgtttatttgacacttcctggagatgactatgaattagagttgacttacaactatgatcatggtgcgtatgatctaggagacggctatggtcatatcgctattgcagctgatgatttagaaaaattacacgagcaacataaagctgcaggtcttgagattactgacttaaaaggattacctggcactacgccttcttactactttgtcattgaccctgatggttataaaatcgaagtcatccgagga

SEQ ID NO: 21689 - DNA, 1446 bp, Enterococcus faecium
atgagccaccgcattaccgcagaagaagtaaaggcaatgaaccctaaaggaatcatcctttctggcggaccaaacagtgtttatgatgagaaggcctttggtattgatgaaaagatttttgatttggggatcccagttttaggaatctgttacggtatgcagttgattacttataaattaggcggaaaagttaaaccagccaaaaaccgtgaatacggaaaagcagaattggaaatcacttctgcagaagcggcccttttccaaaacactcctgaaaaacaaaccgtttggatgagtcatggtgacctagttacccaagcaccgactgatttcgatgtcgttgctaccagcaaagattgccccatcgcatcgatccaaaatgcagaacgcaaaatgtacggaatccaattccatgcagaagttcgccattccgaatatggaaatgacttgttgcgccattttacactagatgtctgccaatgtactggtgactggacaatggataacttcatcgacatggagatcgcaaaaattcgtgaacaagtcggtgacaaaaaagttttattaggcctttcaggcggagtagattcctctgttgttggtgttcttttacaaaaagcgatcggcgatcaattaacatgtatcttcgttgatcacgtattgttgcgtaaaggtgaagcagaacaagttatggaaagtcttggcggaaaatttggcttgaacattataaaagtcgatgccaaagaacgtttcttatcaaaacttgctggcgtgtctgatccagaagaaaaacgtaaaatcattggaaatgaatttgtatatgtcttcgatgatgaagcaaccaaacttgccggtgaagaaggcgtttctttccttgcacaaggaaccctttataccgatgtgatcgaatcaggaactgaaactgcccaaaccatcaaatcacatcacaatgtaggtggattacctgaagacatgcaattcaagctgatcgagccattgaacacattgttcaaagacgaagtacgtgaattaggtacccaattaggcatgcctgacagcatcgtttggcgccaaccattccctggaccaggcttaggtattcgtgtccttggtgaattgacagaagaaaaattagaaatcgtccgtgaatcagacgctatcttgcgcgaagaaatcgccaatgccggtttagatcgcgacatctggcaatacttcaccgtcctaccaggcattcgctctgttggggttatgggagatggccgtacgtatgactacactgtaggtatccgtgctgtcacttctattgacggcatgaccgctgactttgcccgtatcccttgggaagtcttgcaaaaaatcagtgtccgtatcgtaaatgaagtcgcacacgttaaccgtatcgtgtatgatattaccagcaaaccacctgcaacagtggagtgggaa

SEQ ID NO: 21690 - DNA, 1086 bp, Enterococcus faecium
atgaaaattttggttacaggcggaggaacagggggacatatttatccagctcttgcctttgtcaattatgtaaagactcaagaaccgaatgctgaattcatgtatgtgggagcaaaacgaggtctagaaaacaaaatcgtccctgatacaggaatgcctttccataccttggagattcaaggatttaaacgaaaaatttccatgcataacatcaagacggtccgattgtttcttaagagtatccgtcaagcaaaaaaaatcctcagtgattttcaaccagatatcgttatcggtactggaggatatgtttccggagcggtagtgtacgctgcagccaaaatgggtattccaacagttatccatgaacaaaacagtgtaccaggtgttaccaataaatttttaagccgatatgtggatcggatcgctctttcatttaaagatgcggcttccttttttcctgaaaacaaagcagttcttgtaggtaatcctcgagcacaagaagtagcagatactaaaaaatcagatattttgaaaacatttgatttggatccagaaaagaaaacagtcttgatttttggcggtagtcaaggagcacttaaaatcaatcaagcagtatcagtttttttaagtgaatatattccttcttcttaccaagttttgtatgcttcaggagatagatattatgaagagatcctaaataaaataaatcctgaaatacaaaatattagtgtccagccttatatcaaaaatatggcagaggtcatggcttccagtgatctgctggtggggcgtgctggtgcaacttcgatcgcagaattcacagctctggggttaccggcagtgttggttcccagcccatatgttacgaatgatcatcagactaaaaatgcaatgagtcttgttcacgcaggagcagcaaaaatgattgcagataatgaactaacaggtgaatcactaagtcagacagtcaacgaaatcatgggtgatgaagaattgcaaaagcaaatgtgccgagcttctaaagaacaaggaatccctgatgcttcaaaacgtctttatgacttagtaaaacaaataatcaaaaaa

SEQ ID NO: 21691 - DNA, 1147 bp, Enterococcus faecium
atgacgcaacctgccattcgctatcgtttaatcaagaaagaaaaacatactggcgcgcgtttaggggaattgatcacgccacacggaactttccccacaccaatgttcatgccagtaggaacattagctacagtaaaaacaatgtccccagaagagttgaaagaaatgggtgctggcgttattttaagtaatacatatcatttatggctacgcccctggtgaagacttagtagaagaagctggcggactgcataaatttatgaactgggatcaaccgattttaacagattcaggcggctttcaagttttttcattaagtgatatgcggaatatcgaagaagaaggcgtgcatttcaaaaatcacttgaacggttcgcgtatgtttttatcaccagaaaaagcaatcaacatccaaaataaattgggctctgatatcatgatgagttttgacgaatgtccaccattcgatgaaagttacgactacgtgaaaaaatcagtagaacgtacgtctcgatgggcagaacgaggattgaaagctcatgctaatccagaccgtcaaggattatttggaatcatccaaggagcagggtttgaagatcttcgtcgtcaaagcgcgaaagatctagtcgggatggatttccctggttactcaatcggcgggttatctgtcggggaacctaaatcagaaatgaatcgtgtattagaattcactacaccgttgatccccgaaaacaaaccacgttacttgatgggtgtcggtgctgctgattcattgatcgatggtgttatccgtggagtagacatgtttgactgtgtcttgcctactcgaatcgctcgaaatggcacatgtatgacttctcaaggccgtctagtagtgaaaaatgcgaaatatgcccatgatttccgtccaattgatgagaaatgtgattgttatacatgtaaaaactatacacgtgcctatatccgccatttgatcaaatgtgatgaaacatttgggattcgtttgacttcttaccacaatttatacttcttgttgaatctaatgaaacaagtacgtcaagcaatcatggatgataatttgcttgaatttagagaagccttttttgaagaatacgggttcaataaagaaaacgcaaaaagctttcta

SEQ ID NO: 21692 - DNA, 2190 bp, Enterococcus faecium
atgttgaataaaacactgcagaaactacaagaaaaacttggaaaggcagcattgcctttcctgctgttcttgttttttatcattatctgcggcgttacatttagtagtgtcaaacaaaaggccaatgatttcagagaaggccaagtagcagaagaaagtatccgtgcgaacaaaacgatcgagaacacggaagaaaccgaacaaaaaagaaaactggcagcagaagcagtcactccagaatacacttaccaaaaagatcttgcagatgaccagaacaatcggatcaagcaactatttgaattgatcgataagacgaatgatgccatcaacaaatcttatgacgaaaagattgataaggcaaaggaagatgaaaatatcccaaagcctactacagaagagcggatcgccgcgctgaagaaaaattttgaaaatgttaatgcagaaaatgttgcgttttatcaaaaactaccgaacaatttttattcgacgatatttgaaatgactgaaactgagatccatactgtgagggatgagagtctgaagctcattgacgaacagatgagcaaacaagttcgtgaaagtgaattggaagcttttaaacaagaagcagaagagcaaatccaatatttgaatgtcacaccagcacaacaacaaatgattcgctacttagtggatcaaggtatcgtagtgaatgacgtattgaatgagaaaaagacagaagaattgaaacaatccgcacgagaagctgtacaaccagtgatgatcttccaaggagaaatcattgttcgtgaaggtaatcaaatcgatgcttcagctatgaaaaaattggaattactaggactgactaatcaaacaacttcgatttttccgctaattgccatggttttagctgttttgcttcaaatcggcgtactgatttataattcacttcaattccaaaatgcaggagaaagaacaaaatacgtgcttttctatgtgacagctatgtcagtcagcatagtgctgatgaaatttttccaattattccaaacggaacaagctacttatatcccgctgttttatcccgctgcttttgcaccacttgttttaagctttttcttgaatcgaagagcagggatcatggctggtattttccaagcagtatccgcacttttcattttttatgattcgattggcacgaactttctaacgattatcttgatgtcttatgttttctctgggctcatggcaacgattgtcagacgtaaacggatctcagaacaaggatcatctgctgccatgtgggtcattatttttccagtgatgatggatgtcattttgatcgtctatcaaggaatgagctttggtgatgcaacgacttggttaatgctcgtctgcgggttcactggtgcactcttctcattcttgctgacgatcggtctacacccatatattgaattgatggtcaatgatgacagtgtaattgtattaaatgaactcagcaatccaaatcatcctttattgaaacagttgctagaagaagcgccaggtacttatcatcatagtatgatggtagctaatctaagtgctaacgctgtagcagaaatcggcggacgttctttgctaactcgagtagcttgctattatcatgatatcggcaagatcaaacatgctagctttttcgttgagaacttgccttcaggagcggaaaacccgcacaatttcttattgccagaagacagtaaacatattatctttggacatgtgacagatggagccaaaatattggaagattataatatgccgcaaatggtgatcgatatttgcaaacagcatcatggaaccacgctaatgcgttatttctacatcaaagcgaaagaacgcaatccggaagtaacagaagagcaattccgttatcctggaccaaaaccgcaaagtcgtgaagcagggatcgtcaatattgctgacagttgtgaggctgcagtacgggcaatggaacatccgacgagcgaaaaaatcgaaagttttgtccataatcttatcgaagagcgtatttccgatggtcaattagacgatagtggattgaccttgaaagaaatccgaaaagtggaaaaatcattgatcagcggtttaagtagcaccttccattctcggatcaaatatcctaaaatgaaaacagaagttgagaagataaaggaagaacaagaagaa

SEQ ID NO: 21693 - DNA, 1350 bp, Enterococcus faecium
atgaatctaacaatacaagaaattgcacaagccgtgggcagcgaatgctctgcactgacaaagattaccaatgtcgaatttgacagccggaagataaccgaaggaagtttattcgttcctcttgctggtacgcgagatggacatgaatttatccagcaagcgatcacaaacggagcatctgcttcattttggagcttgcctgttgaacaagctccaaaaaattttccagttattcctgtagcagatcctttgaaagccatgcagcaattggcaacctattacttggaaaaagtaggcgcagaagtcgttgcaattacaggaagcaatggtaaaaccaccacgaaagatctaaccgcgtctgtcttgtctgaaaaatacaaaacatataagacgcaaggaaattacaacaataatattggtcttccttacacgattttgcacatgccccaagatacagaaaagatcgttttggaaatgggcatggatcacgccaatgaaatcacggaactttcacttatggctcaaccaaaagctgcagcaatcacaatgatcggtgaagcacacatagaaaatcttgggtcgcgagaaggaatcgctaaagccaaaatggaaatcactgacggacttgtatcagacggattactcgttgtgcccgcagatgaaccgttgctgacacctttaacggcaacattagtacaaacagtcacaacattcggtattggaaatggcgatgttcatgcggaagtgacagcaaaaggaaaagcacaaaccgattttgtagtagaaggagaaacatttacgatcccgctgcctggaagttataatgtaacgaatgctttgattgcgtatacgatcgggcgcttctttggactgtccatacctgagatacgccaagggctcgcccatgtttctatcactcaaaacagaaccgaatggctaacggcaggaaatggtgcagctattttgagcgatgtctacaatgcaaatccaacagccatgggactggtattagatacttttaaaaatctgccaacaaaaggacgcagaatcgctgtgttagcagatatgctggaattagggaaagagtctttaaatatgcatgcgcaaatgagtgaacatatcgatcctgagaaattcgccatgattttcctttatggggaacaaatgcatgcactaaaagaagaattgaaccaaaaatacccccaactacctgtgttctatttggaaaaagaaaagaataaattgattgatgctatcaaacaaaatcttgaagcaacagatagtattatgctaaaaggcagcaacagcatgggcttatttgaagtggtagaacaacttcagcaaatgaaa

SEQ ID NO: 21694 - DNA, 717 bp, Enterococcus faecium
atgggacgtaaatgggcaaatatcgtagcaaagaaaactgctaaagatgctaataatagccggatttatgcaaaatttgggattgaaatctacgcggcagcaaaatcaggtgatcctgatccgcatgcaaaccaaaaactacgtttcgtcattgatcgcgctaaaacttataatgtaccaaaacatattattgaccgagcaatcgaaaaagcaaaaggtgcaggagatgaaacatactctgaattgcgctatgaaggatttggaccaagcggctcaatggtgattgttgatacattgacgaacaatgtgaatcgaacagcagcagacgtacgggcagcatttgggaaaaatggcgggaacatgggtgtttccggagcggtttcttacatgtttgacaatacagcaatctttgcttttgcaggagaagacgctgacgagatccttgaatacctaatggaaaaagacatcgatgttcgcgatgtaatggaagaagaaggacaaatcatcgtttacggtgaagtagcggatttccatagtatacaagaagcattaaaagaaaaaggaatcactgatttttcaatcgctgagatccaaatgatccctcaaaacgaggtaacactatctccagaagatcaagaaacatttgaaaaaatgattgatgcactggaagatctagaagatgtacagcatgtgttccataatgtggcattagaagac

SEQ ID NO: 21695 - DNA, 183 bp, Enterococcus faecium
gtggctaaaaaatcaatgattgctaaaaacaaacgtcctgcaaaattttcaacacaagcttatactcgttgcgaacgttgcggacgtccacattcagtttatcgtaagttccatctttgccgtatttgcttccgcgaacttgcctataaaggtcaaattcccggcgtgaagaaagctagctgg

SEQ ID NO: 21696 - DNA, 1377 bp, Enterococcus faecium
atgttttctaaagtattgatagctaaccgcggtgaaatcgctgtacgtatcattcgtgcatgccgcgaactagggatccaaaccgtagcgatatattcagaagcagatgccgaagcacttcatacacagttagcagatgaagcaatctgcattggcccggcaaaagccgttgattcatatctgaatgttcaggaagtactgagcgctgcaatcgtgacaaaagccgaagcaattcatccaggatttggttttttatctgaaaatagccgatttgcctccatgtgtgaagagtgcaatatcacatttattggtcctaaaagtgcaacgatcgatgcaatgggaaataagatcaatgcgcgtcaattgatgcaagaagcaaatgtcccagtcattccaggaagtactggtgtattatctacagtagaagaagcattggaaatagcagacagaattggttatccagtgatgctgaaagcagctgcaggtggtggcgggaaaggcattcggaaagttcaatcaaaagaagagctcccacagcatttttcttcagctcagcaagaagcagcagcggcatttggaaatgatgatatgtatttggaaaaaatcatttatcctgctcgccatatagaagttcagatcttaggtgatcgatttggtcatgtcattcatttaggcgagcgagattgttctttacaacgcaacaatcaaaaagtactggaagaatctccttctgtagtgatctcacaaacaaaaagagaagcactaggagacgctgctgttcgagcagctaaagcagtcaattatgaaaatgccggaacgatcgagtttctgatggatgaagaaggcgatttttatttcatggaaatgaatactcgaatccaagtggaacatccagtaacagaaatggtcacaggaatcgatttagtaaaaaaacaggtggagatagcagccggtgagcctttgaatgtgtgtcaagaagaagtagtattccaaggacacgcaatcgaatgccggattaatgcagaaaatcctgctttccattttgctccttctccagggaagatccaaaacttactgcttccagcaggtgggatgggactgcgagtagacagtgcagtttacccgggatatacgatcccgccatattatgattcaatgattgcaaaaataatcgtccatggaaatacgcgttttgaagcattaatgaagatgcagcgagccttaagtgaatttatcacagaaggaatcatcacgaacgcagaatttcagatggatttgattagtcatcctgcagtcatagcaggtgattacagcacagcatttttacaagaagaatttttaccgaattggacaccagaaacggagataggaggcgca

SEQ ID NO: 21697 - DNA, 1248 bp, Enterococcus faecium
atgagagagtataaaggtttaaaaattgctgttgctggtacaggctatgttggattgagcattgcgactctgttggctcagagtcacactgttaccgctgttgatattatccctgaaaaggtggagctgattaacaacaagaagtctccgattcaggacgactatattgaaatgtatctggcaaaaaaagaactggatttgatggctactgttgatggtgtttctgcatataaggatgctgactttgtggtaatcgctgcacctaccaattatgattctaagaagaattttttcgatacttctgcagttgaagctgttatcaagttggtcatggaagttaaccctgaggccattatggttatcaagtctactattcccgtaggctatactgcgtctattcgagaaaaaactggtagcaagaatattattttcagtccagaattcctgcgtgagagcaaggctctgtatgataatctgtatccttctcgtatcattgttggtacagatatggaagatgaacgtttggtagaggctgcacagacctttgcaaaattgttgcaggaaggtgcgattaaggaaaatgtggatacgctgtttatggggtttactgaggcagaagcagtcaaactttttgctaacacctatctggcactgcgtgttagctacttcaacgagttggatacttacgcagagatgaaggggctgaatacccagcaaattatcaatggtgtttgccgcgatcctcgtattggtactcattataacaacccttcctttggttacggtggctactgtctgccgaaggatactaagcagctgctggcaaattatgaagatgtgcccgaaaatctaattgaagctatagttgagagcaacagaacaagaaaaaattttattgcagatcgtgtcttggaactggctggagcatatgaagcaaatagccactgggacgcaagtaaagagaagaaagttgtcatcggtgtgtatcgtttgactatgaaatccaattccgacaacttccgtcagagttctattcaaggagttatgaagcgcgttaaagctaagggtactactgttgtgatttatgagccttctctaaaagacggtgaaattttctttggtagcaaagttgttaacgatttggatcagttcaaggcgatgtgtgattctatcattgccaatagatatgatacttgccttgatgatatcaaggagaaggtatataccagagatatttttcaaagagat

SEQ ID NO: 21698 - DNA, 390 bp, Enterococcus faecium
ttggcacaagttcaatatatcggcacaggccgtcgtaaaaacgcagttgctcgcgtacgtctagtaccaggaactggcaaaattactgtaaataaaaaagatgttgaagaatacattccacatgctgacttgcgtgaagtaatcaatcaacctttcgctgttactgaaacaaaaggcgcatatgacgtatttgttaacgtaaacggcggaggatacgctggacaatcaggagctatccgtcatggtatcgctcgtgcattgctagaagttgatcctgacttccgtttagctcttaaacgtgctggcttacttactcgtgacgcacgtatggtcgaacgtaaaaaaccaggtcttaagaaagcccgtaaagcttcacagttctcaaaacgt

SEQ ID NO: 21699 - DNA, 1293 bp, Enterococcus faecium
atgaatgattctatcaaaaaaatgctgcgattaatagagaaagatttgatgattacagaggtctcttacgagacctttcagaagaaaaagacgttgatcgtcgatgctgttttctcacctgctccccatacctgtagaaattgtggttctactgtggtagatggaaacgggaaagtaattgtagtgaaaaatgggaagaaggaaacgattgtccgctttgaacaatacaatcacatgcctttggttatgcgcttaaaaaagcagcgctatacctgtaaaaactgtcgaacccattggacgactcaaagttattttgttcaacccagacattcaatcgcgaatcatgtcagatataaaattgcttctttactgactgaaaaagtatctttatcttttattgcgaaaaattgtcaggtatctttgaccaccgttattcgtacgttgaaagagtttaaaagctacttaccaaagcaatctaagaggattctccccagagtattgatggttgatgaatttcgttcgcacgcttccatagaagataaaatgagctttatttgcgcagatggcgaaacaggacaattaattgatgtcttgcctacgcgtaaattgcctcgattaacaagctatttcttaggctgcactaatcctaaagaagtaaaatttttagtcacagacatgaacgccgcctacttccagcttaccaaacgtattctgccaaatgcgaaagtagtgattgatcggtttcatattatcaaacacatgaatcaagcctttaatgagttgcgtatccgtgaaatgaatgaacttcgtaaagtaggacagaaaagtcaggcagaaaaactgaaaaagaactggcgctttttgctaaaaaatcgtgcaaacatcaaccattatgaatacaaaacatggaaaagttttcgagcaccaaaatacccatttcttacggaagcgatgatgattgatcgattgcttggcttttctacgtccctgaaggaggcgtatccctattttcatgaattagttgaagcctttcgagacaaagaccctgacttatttttctccttattggcagaacttcccgaaacgttagatgacggctttcgggaaaagctccaaaaccttctgacctatgaagaaggcatcaccaacgcgatgatctatccttacaccaatggaaaaatagaagcgaagaatacccatataaagacaatgaaacgagtatcctacggatttaaatcatttgagaacatgagaattagaatctttttgatcaatcaattaatcaaagtaaga

SEQ ID NO: 21700 - DNA, 1491 bp, Enterococcus faecium
ttgaaatttaaagaactagaattatcaccagaattgttgaaatcagtcgaacgcgctggttttgaagaagcaacgcctatccaagcagaaacgattccactagcattagctggaaaagacgttattggacaagcacagacaggtacagggaaaacagctgcatttggattaccaatgttagaaaaaatcgatccagatcgtcacgaattacaaggtttagttatcgcaccaacacgtgaattagctatccaaacacaagaagaattatatcgtttagggcgcgacaaaaaagtacgtgtacaagccgtttacggcggagcagatattggccgtcagatccgtggcttgaaagatcgtccacatatcgttgtgggtacaccaggacgtatgcttgaccacattaaccgccacacattgaaacttggaaccgttcaaacattagttttggatgaagcagatgaaatgttgaatatgggcttcttggaagatatcgaaaaaatcatttcacaagttcctgatcaaagacaaacattacttttctcagcaacgatgccgccagctatcaagaatattggcgttaaattcatgaaaaatccacatcatgtgaagatcaaagcgaaagaaatgacagctgacttgatcgatcaatactatgtccgcgcaaaagaatacgaaaaattcgatatcatgactcgcttgtttgatgttcaaacacctgaattaacaatcgtcttcggacgtacaaaacgccgtgtagacgaattggcacgcggattagaagcacgcggttaccgtgcagaaggaatccatggcgatttgtctcaacaaaaacgaatgagcgtattgcgttcatttaagagcggtcatttagatatccttgtagcgacagacgttgctgcacgtggattagatatttcaggtgtcactcatgtgtacaactatgatatccctcaagatccagaaagctacgttcaccgtatcggacgtacaggccgtgccggaaaaggcggtatgtctgtgactttcgttacaccaaatgaaatggactacttgcatgtgattgaaaacttgacgaaaaaacggatgacgactttacgtccaccaaccgaaaaagaagcattcaaaggtcaattaggtgctgcagttgaacaaatcgaaacaaaacttgcagaaaatggtctagataaatacctgcaaacagcagataaattattagaagaatattctgcacaagatttagttgcacttttgctaaaaacgacagcaaaagatccagctgatgcagtgccagtgaagatcacaccagaacgcccattgccaatgcagaaaacaaggatacaataaaaatggcaaacgtggtggcggaaacaaccgtaatcgtacgtgacggcggtaattatcgtggaaacaaatcaaaacggcggttatagcaaaaataataacagccaaaagatggctggtaaacgtcacaatgataaaaaacgcggattt

SEQ ID NO: 21701 - DNA, 1173 bp, Enterococcus faecium
atgagtaaagaaatgttaaatgcgttagacgctttagaagctgaaaaagggatctcaaaagaaatcgtgatcgatgctttagaagcagcattggtttctgcatacaaacgtcactatggccaagcacaaaacgtcgaagtggaatttgatcagaaaaaaggaaagatccatgtctatgcggtaaaagaagtaacggaagaagtgatggattcacagttggaagtctcattgaaagatgcacttttaatcaatccagcatatgagatcggtgatacgatccgttttgaagtaacaccaaaagattttgggcggatcgctgcgcaaacggctaaacaagttattttacagcgtgtacgtgaagcagaaagaacgattatttataacgaattcagtgcttatgaaaaagacatcatgcaaggaatcgtcgaacgccaggataaacgttatatttatgtcaatcttggtaaaattgaggcagttctttctaaacaagatcaaatgccaaatgaattttatcaaccacatgatcgaatcaaagtttatgtttcccgagtagaaaatacgtctaaaggtccgcaagtatttgttagccgcagccatccagacctattgcgccgcttatttgagcaagaagtaccagaagtctatgatggaatcgttgaaattgtcagcatcgcccgtgaagctggcgatcgttcaaaagtggcagttcgctcaaatgatccaaatatcgatgcagtcggtacatgtgtcgggccaaagggacaacgagttcaagcaatcgtcaatgaattaaaaggcgaaaacatggatatcgtcgaatggaatgaagatccagctgtattcattgcaaatgcattgaatcctgcacaagtcatggatgtgatcttcgatgagacaaatccaaaggcctgcacagttgtcgttccagactaccaattatcgctagcaatcggtaaacgcggacaaaacgcacgtttagctgctaaattgactaaccataaaatcgatatcaaatcagaatctgacatgacggaattttatgaaaatcaagaacaacaaaaagaaacagaagaactgcatgatgaagcaatcgttcagtcagatttaacagacgatgaatatgaaacaattgcattcaacaatgaaacggtcgaagaaaaaccagaagct

SEQ ID NO: 21702 - DNA, 1503 bp, Enterococcus faecium
atgagcttctctttagaagacatccgtcatttactattaaaagaaaatctattaaaagaatttgtttcaacaagaggctggcatcttgatgtaccagaaaaagctgaatttcttcagttaagttatgattcaagaaaagctgatgcttctactttgtttttctgtaaaggaatgaatttcaaagaagaatatttggattcagcaatcgaacagggtattcaatattatgtatcagaacaaccatacgaaaattcagcagtaggaatcatcgtaacggatatccgtaaagcaatggcgcttcttgctatggctttttacgactatccgcaaaataaattgaaagtgatcggattcactggaacaaaaggtaaaacaactgctgcgtactttacaaaagcaatcttggatcacacaacaaataaaaaaacagcattgctttctactatgaatacaacgttagatggcaaaacatatttcaaatcccatttgacaacgcctgagtcattagatttatatcgtatgatgtcagaagcagttgaaaatggtatgactcatctagtgatggaagtttcttcacaagcttacaaaacacaacgcgtatacggcttgactttagatgtcggaatcttcttgaatatctcgcctgaccatatcagtccgatcgaacatccgacatttgatgactatttctattgcaagcgacaattgatcttgaattcaaaaacagttgttttaaatcatgaaagtgactattttgatttacttagggaaacagccgatctattccagattccaacgatcacttatggtcgttcggaagaaagcaattatcaagtgatccgttcagataaaggtactcacggttttactttatcttctcatgaagatcgcttagctatctgcgatactgcttatgatattttgctggctggaggattcaaccaagaaaatgcagccagtgcgatcattgccgcagcactaacaggtgcctccagtcaagatgcacaagacggattaaaagaagctcgtgtaccaggccgaatggatcaattgatccaatccaatggagcgcatgtctatgtggactatgcacataattatctaagcttgaaaacattgctgaaatttgccaaaaatgaacatccagatggccgtgtaattgttgtattaggcagcccaggaaacaaagcaatctcccgtcgacatgattttggaaaagtgctatcagaaacagctgacatcgcctttttgacggcagatgacccagcatttgaagatccgaaaaaaatcgcggaagaaatcaatgaagcaattactaatccagatttgatcgttcattatgaaatggatcgtcctgaagcgattcgacgcgctttagcagaaagcgctccgcaagattcagtcgttattgcgggaaaaggcgtggatccctatcaaaaaatcaatggtgtagatgaaccttatgaaggggattatgcaatcgtgaagcggttgattgaagaa

SEQ ID NO: 21703 - DNA, 1788 bp, Enterococcus faecium
atgaaaaaaaccaaaatcgttagtacattaggaccagcaagtaactcagtagaaattatttctcaattgattgaatctggggcaaatgtcttccgctttaatttttctcatggtgaccatgaagaacaattatcacgtatgactatggtccgtgaagcagttaaaaagacaggaaaagatgtcggtattcttttagatacaaaaggagctgaaatccgtacaactgttcaaggcacaacagaagctgattttggtcgtgcaggatacatcaaatttgaagtaggagatcaaacacgcatctctatggatcctgaacatgtaggttcaaaagaaaaaatcgcggttacttacccaggattatttgacgatgttcacgttggcggacacattttatttgatgatggtttgatcgatatgcaaatcattgaaaaagacgaagcaaaccgtgaattagtcgtagaagttaaaaatgcaggtatgctaggatcacgtaaaggggtaaatgcaccaggcgtttctattagtttgccaggtattactccaaaagatgctgacgatattcgttttggtttagacaacgatatcgactttatcgctgcaagttttgtacgtaaagcacaagacgttctagatatccgcgaaatcttagaagaaaaagacatgactcatgttcaaatcttccctaaaatcgaatctcagaaggtatcgacaacattgacgaaatcatcgaagtttctgacggtgttatgattgcccgcggagatatgggtgttgaaatcccagctgaactagtaccaatggttcaataacgcattatcaaaaaatgtaatgctgtctggtatcccagttatcactgctacacaaatgttagaatcaatgcaagaaaacccacgtccaacacgtgcggaagcttctgacgttgctaacgctgtatttgatggcacagatgcaacaatgctatctggtgaatctgcaaacggggactacccagttgaagctgtttcaacaatggcacgtatcgaccaagaagctgaaaatgcattatcagaattaggtacattccaattgaacgaattcgataaaacagatgtaactgaaacaatcggtttatctgtagctcgtgctgcaaaaaatctaggcgtgaaaacaatcgttgctgcaactgaatcaggatacactgcaaaaatgatttcaaaatatcgtccagatgcagatatcttggctgttacttttgacgaacgcacaaaacgtggtttgatgttaaactggggcgtttacccaacagttgctgaaaaaccatcaacaactgatgaaatgtttgaactagcagctaaaaaagctgttgaattaggtttcgcatcagaaggcgatttaatcttgatcactgctggtgtaccagttggtgaacgcggaacaactaacgtgatgaaaattcaaatgattggttctaaattattagaagctcaaggcgttggacaaaaatctgtcgttgcaaatgcagttattgcttcatctgctgaagaagctgtaaaaaaagcaaaagacggaatggttctagttgtaccatcaactgacaaagaatatatgcctgcaatcgaaaaagcagctgctgttatcgttgaagaaggcggattgacttctcacgctgcagttgtaggaattgcacaagatattcctgtaatcgttggtgctaaaggcgcaacaacaacaattacagaaggtgaattgattaccgttgattcacgtcgcggcatcgtttaccgtggcgaaacaacagctatctaattt

SEQ ID NO: 21704 - DNA, 1358 bp, Enterococcus faecium
ttggacgcacgttatgcaattattttggcggcagggaaaggtacccgcatgaagtcaaaattatataaagttttacatcccgtttctggtaaacctatggtagaacatatcattaatcgggtcagtgaaacgaaaccagatgaagtgattacgatcgttggacacggagcagaacaagttaaagcacaactaggagaacgcagtaaatatgcgttacaagcagaacaattgggaacaggacatgctgttttgcaagctgcttctttcttggaaggaaaaaaaggaacaacgttagttatcagtggcgatacaccattattgactactgaaacgctgaacaatctttttgaatatcaccaaggaaaaaatgcaagtgcaacgatcttgacggcacaagcagaaaacccaacaggatatggacgaatcatccgtgaccatattgggatcgtagaaaaaatcgtggaacaaaaagatgcaacaccagaagaagctcttgtacaagaaatcaatacaggaacttactgttttgacaacgaagctttgttcgatgcgttaagcaaagttggaacaaacaatgctcaaggtgaatactatctaacagatatcatcgaaatcttaaaagaagaaggccatacagttgctgcttatcaaacggatgattttgaagaatcaatgggagtcaatgatcggatcgcgttagctaaagcaaatgagatcatgagaaagcgaattaaccagatgcatatggtcaatggcgtaagctttgtcgattcagcaacgacatacatcgatgcaggcgtagaaatcggtccagacacattgatcgaagcaggtgtacaaatccaaggaaatacagtcattggttctgattgtgtcatcgggtcacattcaaaaatcgtagacagtaggattgaggatcacgtcgtcattgaaaactcagtcattgaaagcagccatgtcaagaaacatgcagatgtgggaccttatgcacatttacgaccaaaagctgaaattggcgaaaacgtccatatcggaaactttgtggaagtgaaaaatgctcaaatcggcaaaggaactaaagtcggtcacttgacttatgttggtgatgctacgctgggagaagaaatcaatgtcggatgtggtgttgtcttcgtcaactatgatggaaagaacaaacatcatacgactgtcggcgaccacagctttattggttctagcacgaatatcatcggacctgtcgaggtagctaaaaacagttcgattgctgccgggtcaacaattacagacatattccagaatatgcgctggcaattgcgagagcaagacaagtcaataaagaaggatatgcaaaaaaactc

SEQ ID NO: 21705 - DNA, 1644 bp, Enterococcus faecium
atgattgatttaaacaactggaggaactttatccctgaattatctcaaaaagaagtagaaatacctcattttgaccgtgcatcattaagagaaaatggacaaaaaaatcctgtctggatccatttcggtggcggaaatctttatcgaggatttcatgcagaaatcgctcaacgtttagcggatctaggcgaattgtccactggtgtcattgtttgtgaaacattcgatgaagaaataattgaaagggcttaccaagattttgatgatttgattcttgaagtggtcatgccaagcagtggagagttcgtcaaacgtatattagctgcgacagctgacagtctgtattgtcatccagattgttctgaacactttgataagatgattcgacactttgaaaatcctagtttacaattagttacttttgctattactgaaaaaggttatcgattgaaagatacaaataataaatatataggaccgattgcagtcgatataaaaaatggtccaaagaagccatcacatacaatgagtattcttgctgcgctactttataaacgttttttatctggagcttggccgattgcacttgtctctacagataatttttcacaaaacggtagtcaattacgtacttctttgctaacgatcgcaaaagaatggcaaaaggaaggttatgtacaaaatacatttatccaatacttatcgaatgaagaaattgttgcgtttccatggacgatgattgatcgtatcaccccgaatccttccttgtcagttagcaaaatgttggcaaaagagggcttttcaaatatgtcgattttccaaaccgcaaaaggaaataatattgctccatttgtcaatacagaggacatccattatttaatcatggaagatcattttcccaatggacgtccgaaattcgaaaaagctggggtattcttgactgatcgtgcaacggtagataaagcagatacgatgaaggtgacgacttgccttaatcctttgcatacgtctttagctattatgggttgtttactggggtataggagcatagctgaggagatgaaagatccagatttatcgctgctagtttctgaaatcgggtacaatgaaggcctcccagttgtggagtctccaggtatcattgatccaaagatctttctggaagaagtaattactgtgcgcttttctaatccaaatattcctgatatgcctcagcgaatcgccacggatacctctcaaaaggtggcgattcgttatggtgagacgattaaaaaatatatggaaatagaagttaaagacccgcagacacttgtattcataccattgactctcgctgcttggcttcgataccttattggcattgatgatcaaggaaaaccattcatcccgagtccagacccactattgacagactttcagcataagctttccgatattcaactgggtacgcaagatacatcacatattcatgagaaaatggctcctattttgtcaaataaagaaatttttggtgtagatctttaccaagcagagcttggcagaaaaatagaagaaatgttcatcaagatggtagcaggaccgaatgccgtacgaaaaacattacaggattacttacaagaacatggaggaaatttatcatggaaa

SEQ ID NO: 21706 - DNA, 1149 bp, Enterococcus faecium
atggaatttattggtattttatgcctgatattgatttcaacaacgattggctcacatatctcgcggagattaggtatcccagcagtgattggacaattacttgttggtgttttgctaggccaagctggattgaattgggtcaaacctgatattctagtccatgacttttcggagattggtgtgatcttattaatgtttttagctggtctggaaagtgatttatctcttttgaaaaaatatttccgacctggtatgttcgttgctttgcttgggatcatcttcccggttgtttttggctggttgacaggcaaagcattccaagtttcgggaaatgaagcgattttctttgggattattcttgcggcaacttctgtcagtatttcagtagaagtattaaaagaactaaacgtagtgaatacaaaagaaggatcaacaattttgggtgcttctgtggtagatgacattttagtcgttttagttctaagtttcagcctatcttttctaacgggggaagcttctagcaatgcttctttaccgcttgttttgattgaacagctaatttattttgtttttattttcttattagtcaaatggattgcgcctttcctactttcatttgcagaaaaagtgtacgcaaattcttctattatcatcgtatcgctagttatttgtttaggaatgtcttacgtagcggatcttgttgggcttagctctgtcattggtgctttttttgctgggatagctgtcagtcagacaaaggttaaagaagaagtataccacaatgtagaggctttaggatatgcagtatttataccagtattttttgtcagtgtaggattagaagttgatttttctgactttagtgaacaactactctttatttctatattgacgcttgtagcgattttgaccaaattgcttggaggttattttggtgctcagattgccggtttttctcaacatagttcattgatggtcggtgctggtatgatttcgcgtggagaaatggctttgatcattttacaaattggacagcaaagtcaattgatcgaaccacagtactattcacctttagttatcgtgattttattaagtacacttatttctccacttgttctcaaatactttacaaaaaaagtttatgaagtg

SEQ ID NO: 21707 - DNA, 885 bp, Enterococcus faecium
atgaaacttggttttatcggaacaggcgtcatgggaagtgctgtcgcacgccatctactagaagcaggacacgaagtagctgtctataatcggacaaaagcaaaagctgatcctttagtaacagaaggagctatctgggcagatacaccaaaagcggtagcagaacaaagtaatattctctttacaatggtaggttaccccaaagatgtagaagaaatctactatggacagtcggggattttttctgcagatatctcaggacatattttagttgatttgactacaagtacaccaagcctggcagaaaaaattgcaaaaacagcaaaagaaaaaggcgcagatgcgttagatgcaccggtatccggtggtgacttaggagcaaagaatggtacactgacgatcatggtcggtggagaagaagccgtttatgatcaagtactgcctttattcaaagaatttggtacgacatttacattgcatggttctgctgggaaaggtcagcatacaaaaatggctaatcagatcatgattgcaggtacgatgacaggaatgacggaaatgcttgtctatgcacaaaaaaacggacttgatttaaagaaagtgattgagacgctttcaggtggaagtgcagctaactggtctttaagcaattattctcctcgtattttaaaagaagattacacacctggtttttttgtcaaacattttatcaaagatttaaagattgcattagaagaagcagaaaaaatggatcttgtattgccagcaactacccaagcattgaaactatatgaagagttggcagataaaggttttgagaatgacggaacccaagctttgatcaaactttggtggcctgaaggaaaaataccagaaaaaaaatca

SEQ ID NO: 21708 - DNA, 2211 bp, Enterococcus faecium
gtgacaaaagaagaaattttaacgggacccggtgtcataaagctcgttagtcaatacatgggtcccgaacatgtagcatttgttgagaaagcatgcgaatacgcgactgctgcacatgacggacagtttagaaaatcaggcgaaccctacattattcatcctatccaagtcgcaggtatattagcagatttaaaaatggatccccatacagtggctacaggcttcttacatgatgttgttgaagatacagaaatcactttagaagatctgagagaagaatttggcgatgacgttgctatgttagtggacggcgtaaccaaattagggaaaataaaatataaatcccacgaagagcagctagcagaaaaccaccgaaagatgctgctagcaatggctcaagatttacgagttatcatggtcaaattagctgatagactacataacatgcgtacgttgaagcacctgcgagaagataagcaaagaaggatcgctcaggaaactttagaaatctatgcgcctcttgcacatcgtctagggatcagccggatcaaatgggaattagaagatacagcacttcgttatctaaatccaaaacagtattaccgtatcgtccacttgatgcagacgaagagagaagaacgtgaaaaatacgtaagtggtactgttgaagatattcgaatagcgacagaagagctggggatttttgcagaaatctatggacggccaaaacacatttattcaatctatcgtaaaatgaaagatcagaaaaagcagttcaacgaaatttatgacttgctagctattcgagtgatcgtagattcaatcaaggattgttatgctgtattaggagcaatccacacaaaatggaaaccaatgcccggcagatttaaggattatattgccatgccaaaagctaatatgtaccaatctttgcatactaccgtgatcggtccggcaggaaatccggtagaaattcaaatccgaacacaggaaatgcatgaaatcgctgaattcggggttgctgcacactgggcctataaagaaggaaaaaatgaaaaagtagaaccagatggtatgacgaaacaattaagctggttccatgagatactcgaacttcaagacgaaagctatgatgcttctgaatttatggaaggcgtaaaaggagatatctttagtgataaagtctacgtcttcacaccaaaaggagacgttactgagttaccaaaaggatccggaccattggactttgcatacagtatccatacagatatcggtaacaaaaccactggtgcaaaagtaaatggcaaaatggtgcagcttgattacaaattgaaaaacggagatatcattgagatcatgacttctccaaattcatttggcccaagtcgcgactggttgaaattagttgctactagcaaagcaagaaataagatcaaacgtttcttcaaagcccaagatcgagaagaaaatgtgatcaaaggccacgaatccgtggtcaaatgtattacagatctaggatttacgcctaaagatattttgacgaagaacaaactgcaagaagcactcgatcgttttaattatcaaacagaagatgatctctatgcagctgtagggtatggagaagttagccccttgacgatggccaatcgtctgactgaaaaagaacgtaaagaacaaaaaatcgagcagcaaaagcaagaagcagaagaaatcatgaatcagccgaaaaaagaacctgacaaaatgaaagtacgtcatgaaggtggcgttgtcattcaaggggtagaaaacttactaattcgtatcagtcgctgctgtaatccgattcctggtgatgatatcgttggttatatcactaaaggcagagggatatccattcatcgtcgagattgtccgaatgttcagcctgacaaaccaaatgtagcagaacgtttgattgaagtcgaatgggaagatacatcgaatacacgaaaagagtatgatgcagatttggaaatttacggctataatcgttcaggcttattgaatgatgtacttcaaacagtcaatgcgctaacgaaaaatctcaacagcgttgaagcacggacgaataaagataaaatggcgacgatccatttgacggttggtatccagaatttatcccacctaaagagtatcgtggataaaatcaaagcagtacctgatgtctacagtgtacgccggacgaatgga

SEQ ID NO: 21709 - DNA, 1098 bp, Enterococcus faecium
atgggaaaattaggaatctcgatttatccagaacggtcaacatttgaaaaaggacaaagcgtacttggatttagctcataagtatgggtatcaacgggttttaccagttggctgcagatcaatgatgataaagaaaaagttctttcagaatttaaagaagtagttgattacgcgaatagcctaggcatggaagtaatggttgatatcaatccagcgttatttgaacagttggagatttcttacgatgacttatcttttttccataagatgggtgcctacggggtccgcttagatatcggattcacaggagcagaagaagcaaaaatgacgcgcaatccttttggtatcaaaatcgagatcaatatgagttcgggcacgaattacgttgacaacatcatgagttattcgccaaacacggataatttattaggttctcataatttttatcctcatcgatactctggtttaggatacgaacactttgttttttgttcagaaaaattcagaaaatataatttgaatacgatggcattcgtcaattcgcaatctgctgagtttggcccttggcctacgcaagatggcttgtgcacgctggaagaccaccgagatcttgaaattgcgacacaagtgaagcatttaatccttacaggattgattgatgatatttctattggaaatgcgtacgcaagtgaagaagaattgaaagaaatggcagaagcatttaacgcggattatccaacattgaaagtagatacggaagaaggtattacagaaaacgaacgaatctgcttgtttgataaccttcatagttatcgaggggatcgctcagaatatatccttcgttcaacgatgactcgtgtatactacaaagataaagatttcccgcctcataatacgcgagatatgcatcatggggatgtactgattgacaatgaagggtacggtcaatacaaaggagaaacacaaatcgccttgaaggatatgaaaaacgacggacgtgtcaatgttgtaggaagaatctccgatgacgaattattcctccttgactttttgaaaccatggtcaagctttaaattaattgaaaataaaaaatagata

SEQ ID NO: 21710 - DNA, 624 bp, Enterococcus faecium
atgtttggtaaaatagggtcgttggttaagaattgtcttaacaaatttagttttacaaaacttaggaggaattttattatgccagtagtatcaggagctgaatttttaaaagctgctcgtaaaggcggttacgctgtcggcggattcaacacaaacaacttggaatggactcaagcaatccttgaagcggctgaagctaaacaagcaccagtacttatccaaacatcaatgggtgcagctaaatacatgggtggttacaaaatctgtaaagatttaatcactgatttagttgaagcaatgaacatcactgttccagttgctatccacttagaccatggtgattacgaagctgctttggaatgtatcgaattaggctatacttcagtaatgttcgatggttcacatctaccatttgaagaaaacttgaaattagctaaagacgttgttgaaaaagcacatgcaaaaggtatctcagttgaatgtgaagttggttcaatcggcggagaagaagacggaatcatcggtaacggcgaattagctgatattgaagaatgcaaacaaatggttgctacagtatcgacttacttagcttgcgtatcagtacatgccggaccggctcatttg

SEQ ID NO: 21711 - DNA, 741 bp, Enterococcus faecium
gtggatcaagcaaaaagtttagaaactgcctgtaagttgctgagactttcccatgttcttcccactttggttcgcaaagacttagattacagctttgaaaccaaagaagattggttgatgtatcttctggaaaaggagttggcttgccgtgaagaattgaaaactgcccgactcctaaaacaagcaaagttcccaaataaacgtaccttagaggattacgaatggcatgatcatatatgtttgccaaatgcgacgactaaagatgaattattgagtctatcgtttattcatcagaaagaaaatgctgtatttgtgggtacacccggtaccggtaaaacacatctagcttgtggattgggtcagctggcagccaaatcaggtatcgatacacgcttttggcgggtatcagatttagtcaacgaattggaacaccattggaaaaacaataccttagaggtcttcaagcatcgcttcgataaagtaaaattaatcattcttgatgagatgggttatgtgcctttcactaaagaaggcgcggaactgcttttccaattgatcagcgattggtatgaaacaaaaagcgttatagtgactagtaatttagagtttagcaaatggaataaagtcttcgttgatgcacggttaactgccgcgttggtggatcgcttgattcatcatgcgcatattctcagcttcacgggtgagagctttcgattgaaaaatgctttatcaaaatcaaat

SEQ ID NO: 21712 - DNA, 1323 bp, Enterococcus faecium
atggcaaaaacaggaatgtatgtaggccttgatattggaacgacatctgttaaagttgtcgtggctgaatatatcgacagccaaatgaatattattggagtaggaaacgcaaaatcagaagggattaaccgaggcattatcgttgatatcgataaaacggtccaagcgatacaacgagcagtacgacaagcagaagaaaaagcaggtatccagatcaaaggcgtaagtgtcggtttgccagcaaacatgcttgaagtagaaaattgccagggaatgattgcagttaacggagattcaaaggaaatcaccgatgaagatgtcagaaatgtggcttcagctgcccttgttcgttcaatacctcctgaacgtcaaatcgtgtcaatattgccacaagattttactgtcgatgggttcgagggaatcaaagatcctcgtggaatgatcggcgtaagattagaaatgtacggtctgttgtttacaggacctaaaacgatcatccataacatacgtaaatgcgtggaaaatgccggattaatcgtcaacgaaatggtgattactcctttagcgctgactgaatcaattctttctgacggagaaaaagattttggtacgatcgtcattgatatgggtggcggccaaacaacaacggctgttatgcatgataagcaattgaagtttaccaatcttgaccaagaaggtggcgaatttgtcactaaagatatctctattgtattaaatacgtcatttaacaatgcagaagcgttgaaaataaactacggggatgcatacccagaacggacatcaccagatgaagaatttccagtagatgtgattggtcagtcagaaccagtgaaagtcgatgaacgctacttgtcagaaattatttcagctcgaatggaacagattttcaacaaagcaaaagatgcattggaccaaatcgaagcattagagttgccaggtggcgtcgtattgacaggcggagctgctagtcttcctggtgttgtggacttggcacaagaaatcttcggcgtaaatgtaaaattgtatgttccaaatcacatggggctgagaaacccggtatttacaaatgtaataagtatcgtggattattcagcaaacttgagtgaagtgtatcaattggcaaaaattgctgttacgggtgaaacctcagcagctcgtcaaatggtagttgaacaagaaacaacaaacacatatgagagctatgaagcacctgaagaaacaatctacgatgagccggaaccaaaagagtccggagaaaatgtaaaaaataaaatcaagggtttctttacaaatatttttgat

SEQ ID NO: 21713 - DNA, 429 bp, Enterococcus faecium
atgagagtaatgggcttggatgtcggttctaagacagtaggtgttgctatcagtgacccctttggctggacagctcaaggagtagagatcattcggatcaatgaagcagaagaagagtttggctttgatcggttgaaggaattagtagcacaatatgaagtagaccggtttgtagttggattacctaaaaatatgaacaattccatcggaccaagggcagaagcttccatgtcatacggagaaaagatcaaagaactattctccttgccagttgattatcaagatgaacgattaaccactgttcaggcagaacgtatgctagtagagcaggcaaatacttcaagagccaaacgaaaaaaagtcatcgataaattagcagctgtgatgatcttacaaaattatttagacggctcaggtaagcaattattt

SEQ ID NO: 21714 - DNA, 1008 bp, Enterococcus faecium
atgctaaaagcttttaaattccgtatgtatccgacagaagaacaaaaacagcaattgattcgtacttttggatgtgctcgatttacctataaccatttgctgaaaaagcggcagaaaagttggcaacaaacaggagtagccaatttttcgctcacacccgctacattaaaaaaagaatacccattcttaaaagaagtagacagtcttgctttagcaaatgcacagcttaatttggatcgggcttttcgcaattatttcaagggacgtgccagcttcccaaagcttaaaacgaaaaaaagtatgtggcaatcttatacgaccaacaaccaaacccgtacgatctatctggaaaatggctacttaaagttaccaaaacaaaaagaactaatcaagataaatcagcatcggccagttgaaggatcgattcgctccgctacgatttctgctcgatataatgaagaattttatgtcgcactactttgtgatgtttcgccagtaaaaaaagaatctttagctaaatggatcgggatcgcctatcatccgaagacattgatccaaacatctcgacctctagaagtaactttaccaaaatttcaccagacagaagaaaagctgcaacatgcacagcggaaattgaatgtgaaagtccgctccgctcaccatagaaagatcaggttagatcaggcaagcaattatcagaaacaaaagagaaaagtaatggatctttatctgaaacaaaagaaccagcgagaagattatcttgaacaattatctgggaaattggtcaaacaatatgactacttatttgtagaatcttttccaaaagaagaggcacatgctgatttttctattcacgactggcataaattaataacaaaattgcgttataagtcccaatggtataataaaaaatttcttttgatcaataccgacggagcagaagaaagcaattccgtaagaaagagccaagtagtagaaaaaatgggcagacattcggttatcaaggga

SEQ ID NO: 21715 - DNA, 936 bp, Enterococcus faecium
atgaatcaagaaataaacttggctcaaatgcaaccgatcgtgtatcagcagcttcaacggagttttgagcatgggcgtatcgctcatgcttatctttttgaaggggagaaaggaacaggaaaacatgaagtaggtatatggcttgcacagcacctgttctgtacccaaatgaaagacaatctgccttgtggaaaatgcaacaattgtcagcggatcgaaaagaaagaacatccagatgttttggttattgaaccggaaggacaaaccatcaaagtcgatcagatcagacgtttgcagacggaattcagtcgcagcggttacgaatcaagaaaaaaagtttttttgatcaaagaagctgaaaaaatgaatagcagtgcggcaaacagtttgttgaaattcttggaagagccccctggagattttttagcggtgttagaaacagatgcagtaggaagaattctccctactattcaatctcgttgtcaagttctgcattttcaagaactttcgaaagaagcactgatccatcgattgcaagaagagcagattccattggaaaaagcaaaacttttggctttcttaacaaacagtttaggaaaagcagttgaaatctctcaagatgaatggtttaatgatgctaaggacttgatttatcaatggttcgtttacttgcaaaagcaagatactcaagcctttatctatgtccaaaaaaaattggtaaaatcatttaaagaaaaaacacaacagtttacaggattatctgtcttgatgttttattatcaggaagcacagcgtcaagcagtagcaaacggcgaatatggcaaagtgaaacagataaaccagataattgaacggatattgatcgcagagcagaaactacgcagcaatgtcagttttcaggctgttgcggaacagttcgttttgcatacgattttt

SEQ ID NO: 21716 - DNA, 972 bp, Enterococcus faecium
atgtgtacgtctattacttatgtaacaagtgatcattattttggaaggaattttgattatgaaatatcttacaatgaagtagttactgttactccaagaaattataagttgaattttcgaaaggtaaatgatttggatactcattatgcaatgattggtattgccgctggtatagctgactaccctctttattacgatgcgacaaatgaaaaaggattgagtatggctgggctaaatttttctgggtatgctgattataaagaaatacaagaagggaaagacaatgtatctccttttgaatttattccttggattttaggacaatgctcaacagtaggagaagctaaaaaattgttaaaaaatatcaatttagcaaatataaattatagtgacgaacttcctttatcccctttacattggctattagctgataaagaaaaatcaattgtcattgaaagtatgaaagatggacttcatatatatgataaccctgtgggcgttcttaccaataatccttcatttgactatcaattatttaatttaaacaattatcgtgtcttatcgagtgaaactcctaaaaataatttttcaaatcaaataagtttgaatgcctatagccgcggtatgggagggataggcttgcctggagatttatcctcagtatctcgttttgttaaagcgacttttacgaagctgaattctgtatctggagattcagagtcagaaagtattagtcaatttttccatatcttaggttcagtagaacaacaaaaaggtttgtgtgatgtaggtgatggaaaatatgaatatacaatttattcttcttgttgcaatgttgacaaaggaatctattattatcgaacatatgaagacagtcaaattactgcaattgatatgaataaagaagacttagatagtcataagttaattagttatccaattatagaaaaacaacaaattaaatatataaat

SEQ ID NO: 21717 - DNA, 1195 bp, Enterococcus faecium
atgtccatgtttttagatcaagtaacgatcgatgtgaaagctggcaagggcggagacggaatggttgcatttcgtcgcgaaaaatacgttcctgacggcggaccggctggcggagacggtggtcgtggcggcgatgtcatcttgatcgtcgatgaagggttacgtacattgatggattttcggttcaatcgccatttcaaagcgcagccaggtgaaaatgggatgagtaaagggatgcacggtcgtggttcagaagatacctatgttaaagtaccacaaggaaccactgtccgagatgcggagactggtgctcttttaggagatttaattgaaaatggtcaaacactagttgtggcaaaaggtggacgcggtggacgagggaatatccgttttgcctctcctcggaatcctgcaccggaaattgctgaaaacggtgaaccaggacaagagcgaaaaatcgaactagaattgaaagtattggcagacgttggacttgtaggttttccatctgtcgggaaatcgactttactatccgttatttcatctgctcgtccaaaaatcggcgcttatcatttcacgacgctcgtccctaatctaggaatggttactacaagtgatggcagaagttttgccgcagcagacttgccaggcttgattgaaggagcttcgcaaggtgttgggctgggtacacaattccttcgtcatatcgaaagaacacgagtaattttacatgtgatcgatatgagtgggatggaaggacgagatccttatgaagactatcttgccatcaacaaagaattatctacttataacttacgcttgctagagcgtccgcaaatcatcgtggcaaacaaaatggatatgccggatgcacaggaaaatctagtgaaattcaaagaacagctgaacaaggaaaaagaagatgaatttgctgatgacatcccagtatttccaatttctggagtgactcgacaaggattggacgcgttattgaatgctacagcagatttgttagaagtaacgccagaattcccattgtacgaagaagaactggaagaacgaaactgtacactatggattcaatccagaaggtcctgagttccaaattgatcgtgattcagatgcaacgtggatcttatctggtgagaagatcgaccaattattccaatgacaatttcgtcttgatgaaacgggt

SEQ ID NO: 21718 - DNA, 1125 bp, Enterococcus faecium
atgaaaaaaatccctaaaaaaatgaaaaaatcagtacgatatatggcattactgacattagagcgagtgaacaagggtggcgcctactcgaatcttttgttgaatgagatgatcaaacaaagcgagctaaatcaaaaagatgtgggtttatttacagaattgatctatggtacgattagccatcagcgactattggaattttacgttgcaccattgatcgctaaagcaaaaaaagtggatgactgggtcaagacgcttctttatctttctgtataccaattagaatttttagataaagtccctgcacatgctattttaaacgaggcggtcgaaatcgcaaaagtaaaaggaaatcctgggacagggaaatttgtaaatggtgtcttgaggaattatcagcgtcaaggagcaccagatctgcaaggcattgctgatcctatcgaaagactttctgtcaaaatcagcctgcctctatggatgactaaacgactggtggatcaaatcggatacgaagaaactgaaaagctcggtttatcgctatatcagcctagccatgctagtgcccgagtagatacacgccgactttccagagatcaggccatcactgttttgcaagaagaagagatcacagctgaaaaaagccaagtcagtccatacggtatagtagcgaaaaaagggcatttagcttctagctcattgttccacgatggcgtcatgacgatccaagatgaaagttcgatgcttgtagcgccgtctatgcaaatcgagcctgaacatcatgtcttagatgcctgtgcagcacccggaggtaagacgacgcatattgcttcttttttagatccgtcatgcggtggagaagtggtcgctttagatgtacacgaacacaaagtcaaactcattgaagataatgcagcacgtctaggtgtctcttctgctgtctacgctcaaaagatggatgctagagaagtcagtaaacagttcgaagcagagcagtttgatcggattttagtagacgcgccttgttcaggtcttgggctgcttcggcgaaaaccagatattcgttataaaacacagccggatgaattagcgaatttacccaaaatccaattggaaattttagaaagc

SEQ ID NO: 21719 - DNA, 735 bp, Enterococcus faecium
atggatgtaaaaggaaaaaatgtatttatcacaggtagtacaagaggaatcggcaaagcgatggccttagcttttgcaaaagctggagcaaatatcattttgaatggtcgcggagagattccaaaagaaaagatagaagaaatcgaagcattcggtgtaaaatgcgtaggagtttccggtgacatctctgattatgagaaagcgggacaaatgatcaaagaagcagaagaaaagcttggatcgatccatgtgttagtaaacaatgccggaatcacaaatgacaaacttgtgatgcgaatggatgcagaagatttcaaaaaatgtctggatatcaatttgattggaaccttcaatatgacgcagcacgtattgaaaaaaatgatgaagcagcgagaaggggccatcattaatctctctagtgtatctgggttgattggaaatattggtcaagcaaattatgcagctagtaaagctggcgtagtaggattaacaaaatctgtggcacgagaagctgcaactagaggcattacatgtaatgccattgcgccaggattcatcacaactgatatgacggaagttttagcagacaaagtcaaggaacaagcggaaaagcaaattccgatgcagcgtttcggacaagtagaagatattgcacaaacagcagttttcttagcacaaaatccatatatcaccggacaagtcatcaatgtcgatggcggattggtcatgcacgga

SEQ ID NO: 21720 - DNA, 2439 bp, Enterococcus faecium
ttgaaagaagtcgttatgatagatgctgcaagaacgccgataggaaagtatcgcggaagtttaagtccatttactgcagttgaattaggcacacttgtgactaaaggattattagataaaacaaaactgaaaaaagataaaatcgatcaagtaatatttggaaatgtcctgcaagctggtaatggtcaaaatgttgccagacagattgctttgaacagcggtctccctgtagatgtcccagcaatgacgatcaatgaagtttgcggatctggtatgaaagcagtgatcttagcacgccagctgatccaattaggtgaagcagaacttgtgatagccggcggaacagagagtatgtctcaagcacctatgctgaaacagtatcagtcagaaacaaatgaatatggtgaaccaatttccagtatggtcaacgacggattgactgacgcattttcaaatgcacatatgggattaaccgcagagaatgttgcaacacaattttctgtgagcagagaagagcaggatcgctatgccttgtcgtcccagttgaaagcagcacatgctgtcgaagccggtgtattttctgaggagatcatcccagtcaagatttctgatgaagacgtgttatctgaggatgaagcagttcgtggaaatagtacattggaaaaactgggcacgttacgtacagtattctcagaagaaggaactgtaacagcaggaaatgcttccccgttgaatgacggtgcctctgtggtgatccttgcatccaaagaatacgcagaaaataataatctgccttatttagcaaccatcaaagaagtagcggaggtcggtattgacccaagtatcatgggaatcgctccaatcaaagccattcaaaaattgacagatagatcaggaatgaatttatcaacaatcgatctttttgagatcaatgaagcatttgcagcttcttctatcgtagttagccaagaactgcagttagatgaagaaaaggtcaatatatatggaggagcaatcgcattaggccatccaattggtgcaagcggtgcacgtatcttgactacattagcttacggattgcttcgtgaacagaagagatacggtattgcttcattatgtattggtggaggtttaggcttggcagtcttgttagaagcgaatatggagcaaacacataaggatgtgcaaaaaaaaaagttttatcagcttacgccatctgaacggcgcagtcaattaatagaaaaaaatgtattgacacaagaaactgcgttgatttttcaggaacaaacactttctgaagagctctccgatcacatgatcgaaaaccaagtgagtgaagtggaaatcccaatggggatcgcgcagaattttcaaatcaatggcaagaaaaaatggattccgatggcaacagaggaaccatctgtcattgcagctgcaagtaatggtgcaaaaatctgtggaaatatctgcgcagaaacacctcagcggctgatgcgagggcaaatcgttctatcaggaaaatcggagtatcaagcagtgatcaatgcagttaatcatcgaaaagaagagctgattctttgtgcaaatgaaagttatccttcaatcgtgaaacgcgggggcggtgttcaagatatctctactcgggaattcatggggagtttccatgcatacttatctattgattttttagtggatgtaaaagatgcaatgggcgctaacatgatcaactcgattcttgagagtgtggcaaacaagttacgggagtggttccctgaagaagagattctattcagtattttaagtaattttgctacagaatcattggcttctgcctgttgtgaaatcccattcgaacgcttagggagaaacaaagaaatcggtgaacaaattgccaaaaaaatccaacaggcaggggaatatgcgaagcttgacccttaccgtgcagcaacgcacaacaaagggatcatgaatggtatagaagctgtagtggcagctacaggaaatgatacacgtgcggttagcgcttcgatccacgcctacgcggcaagaaatggattataccaaggattaacagactggcagatcaaaggggataaactagttggaaaactaacggtgcctttggctgttgccacagtaggcggagcttccaatatcctgccaaaagcaaaagcatctttagctatgttagatattgattcagccaaggaactagcacaagtaattgctgcagtagggttagctcaaaacctggctgctttgcgtgcattagttacagaaggaatccaaaaaggccacatgggacttcaagctcgttcattagcgatctcaattggggctattggtgaggaaatcgagcaagttgcgaaaaaattacgtgaagcagaaaagatgaaccagcagacagctatacaaatattggaaaaaatccgggaaaaa

SEQ ID NO: 21721 - DNA, 804 bp, Enterococcus faecium; identical to SEQ ID NO: 21558

SEQ ID NO: 21722 - DNA, 1523 bp, Enterococcus faecium
ccggatgctgggaaaacacgattacagaacaattactattgtttggtggggctatccgtcaagccgggaccgtaaaaggcaaaaaaacaggtaattttgccaaatcagactggatggaaatcgagaaacaacgtgggatttctgttactagttctgttatgcagtttgattatcaagggaaacgagtaaatatcttggatacaccaggacatgaagatttttctgaagatacttatcgtactttgatggccgtggatagtgcggtcatggtaatcgatagtgcaaaagggatcgaagcacagacaaagaaattattccaagttgtaaaaaaacgtggcatcccgatatttacttttatcaacaaactagatcgtgatggtcgtgaaccattggaattgttagaagaattagaagagctattagatatcgaatcttatccgatgaattggccaatcggtatgggtaaagggctagaaggtctttatgatatctaccataatcgtgtagagttttatcgtccggaaaattatcaggatgaacgattagtagaattggatgaagatggactgcttcccgaaaatcatcctctaactgaaaattccttatatgaacaagtcttagaagaagtagaactaatcaaagaggctggagatgcatttaatcaagaaaaaattgctcgtggcgatcagacaccagtattttttggttctgcattgactaacttgggtgtacagacttttttagagactttcgttgaattggcaccagctccttatggacacaaaacacaagatgatcagatggtaagtccttatgaggaagaattttcaggtttcgtattcaagatccaagcaaatatgaatccagcccatcgtgaccgaatcgcttttgtccgaatctgttctggaacattcgaacgaggaatggatgtctggttggaacgtacaaataaaaaactgaaattaagcaatgtcacacaatttatggcagattcgagagaaaacgtcgaaaaagcagtagcaggcgatatcatcggtgtatatgatacaggcaattatcagattggggatacattgttcgaaggaaaactaaaagttgcttatgaagaactcccttcatttactccagagctgtttatgaaagtgactgcaaaaaatgtcatgaaacaaaaatccttccacaaaggaatctatcaattagttcaagaaggagcgattcagctttataaaacatatctaacggaagaatatatcattggagctgttggtcagctacaattcgaagtattccaatatcgtatgttaaatgagtataacgccgaagtaatcatgtctccaatgggacacaaaatcgctcgctggatcgatccagaagatttggatgagaagatgagttcaagtcgcaatatcttggctcgtgaccgtttcgaccaaccgttgttcttattcgagaaccaatttgcagaacgctggtttgcggataaatatcccaatgtaaaattaaaaagtttgatgtaaagaagt

SEQ ID NO: 21723 - DNA, 1299 bp, Enterococcus faecium
atggaagagatcatcgtaagaggtggcaatcaattaaatggaacagtaagaattgaaggagctaaaaatgctgttttgcctattttagctgctagtttgttagcagaagaaggtattacgacattagacaacgttccgattctttctgatgtcttcactatgaatcaagtgattcgtcacttaaacgtagatgtagattttgatgaacaaaagaatcaagtaacaatcgacgcttcaagacaattagaaatcgaagcgccttatgagtatgttagtcaaatgcgtgcttcaatcgttgtgatgggtccgctacttgccagaaatggacatgcaaaagtagctatgcctggtggatgtgcgattggtaaacgaccaatcgatttgcatttaaaaggatttcaagctttaggagcaaaaattattcaaaaaaacggctatatcgaagcaattgcggatgaattgatcggtaacacgatttatttagatttccctagtgtaggtgctactcaaaatatcatgatggctgccgtaaaagcaaaaggaacaaccatcattgaaaacgtagctcgcgaaccagaaatcgttgatttagcaaacattttgaataaaatgggcgctcaagtctatggagctggtactgaaacaatgcgtattgaaggcgtggatcatttacatgcagtcaaccactcaatcgtacaagatcgtatcgaagcaggtacctttatggttgctgctgcaatgacacaaggcaatgtgctgattgcagatgctatctctgaacataaccgcccattgatttctaaattgatcgaaatgggtgcagaaatcattgaagaagaaggcggagtccgtgtcatcggaccaaaacatatcttacctacagatgtaaaaacgatgcctcatcctggtttccctacagatatgcaagctcaaatgacagctatccaattagttgcagaaggtacaagtgtagtgactgaaacagtgtttgaaaatcgtttccaacatttagaagagatgcgccgtatgaacgctcatgtcaaaatcgacggaaatgtagcaatcatggatggaaaccatgaattgcaaggtgcagaagtatatgcaacagacttgcgggcagcagcagcattagttttagctggcttgaaagcaaatggaatcacacgtgtgcgtaacttgaattatctagaccgtggatattataatttccatatcaaactacagcaattaggtgcagacgttgaacgtgtagacatggatcaaacttctgctgaaaaaacagcacaaacgattgct

SEQ ID NO: 21724 - DNA, 933 bp, Enterococcus faecium
gtgaataaagaagaaatagttgaaagcttagccacgattactatattgtttgatgaaccattgatgaactatacgtttacgaaaacaggtggaccagctgatgtccttgcattcccgaaaaaacaagaagaagtaaagcaaatcatcgattattgccgaatccatgatataccttggatggtattaggaaatgcaagcaatctgatcgttcaagatggcgggattcgcggtgtagtcatcatgctgactgaaatgaaacagattcatgtcaaaggaacgatggtcattgcggaagcaggtgcctcactgattgatacgacttatgcagctttggcagaatcattgactggatttgaatttgcttgcggcatcccgggaagtgtcggtggagcggtttatatgaatgcaggtgcgtatggcggagagatcaaagatgtttttgctgaagtggatcttttgcttgaagatggaacattgaaaactttgacaaaagacgaaatggtattttcttatcgtcacagtaaagtccaagaattacgtgctatcgtattggaagctcgattcagtttgcaaacaggggattatgaagcaatcaaagcaagaatggatgagttgaccgaattgcgtcaatcaaaacagccattagaatacccttcatgcggaagtgtctttaagcgcccagtaggacactatacaggtcagctgatccaacaagcaggattgcaaggcctgaaatggggcggtgcacaagtctctgaaaaacatgctggattcatcgtcaatatcgatcatgcgacagcgacagattatattgaattgattgcgcacatccaagaagtaatcaaagaaaaatttgatgtgtctttagaaacagaagtgcggatcattggagaaaaacaagcaatatcagaaacaagcagaagtttagccaat

SEQ ID NO: 21725 - DNA, 1293 bp, Enterococcus faecium
atgaatgattctatcaaaaaaatgctgcgattaatagagaaagatttgatgattacagaggtctcttacgagacctttcagaagaaaaagacgttgatcgtcgatgctgttttctcacctgctccccatacctgtagaaattgtggttctactgtggtagatggaaacgggaaagtaattgtagtgaaaaatgggaagaaggaaacgattgtccgctttgaacaatacaatcacatgcctttggttatgcgcttaaaaaagcagcgctatacctgtaaaaactgtcgaacccattggacggctcaaagttattttgttcaacccagacattcaatcgcgaatcatgtcagatataaaattgcttctttactgactgaaaaagtatctttatcttttattgcgaaaaattgtcaggtatctttgaccaccgttattcgtacgttgaaagagtttaaaagctacttaccaaagcaatctaagaggattctccccagagtattgatggttgatgaatttcgttcgcacgcttccatagaagataaaatgagctttatttgcgcagatggcgaaacaggacaattaattgatgtcttgcctacgcgtaaattgcctcgattaacaagctatttcttaggctgcgctaatcctgaagaagtaaaatttttagtcacagacatgaacgccgcctacttccagcttaccaaacgtattctgccaaatgcgaaagtagtgattgatcggtttcatattatcaaacacatgaatcaagcctttaatgagttgcgtatccgtgaaatgaatgaacttcgtaaagtaggacagaaaagtcaggcagaaaaactgaaaaagaactggcgctttttgctaaaaaatcgtgcaaacatcaaccattatgaatacaaaacatggaaaagttttcgagcaccaaaatacccatttcttacggaagcgatgatgattgatcgattgcttggcttttctacgtccctgaaggaggcgtatccctattttcatgaattagttgaagcctttcgagacaaagaccctgacttatttttctccttattggcagaacttcccgaaacgttagatgacggctttcgggaaaagctccaaaaccttctgacctatgaagaaggcatcaccaacgcgatgatctatccttacaccaatggaaaaatagaagcgaagaatacccatataaagacaatgaaacgagtatcctacggatttaaatcatttgagaacatgagaattagaatctttttgatcaatcaattaatcaaagtaaga

SEQ ID NO: 21726 - DNA, 543 bp, Enterococcus faecium
gtgctttttttgcggaaatatacatttgtttttaagaaaaaagtagtttcagactatttaaataacgaaggcggctacaaatatcttgcacataaatatcaaataaatcgtacactggttagacattgggtaaggatttataactatcatggttgggaaggcttggttggaggtggcaaaagctacactacaaaatttaaacttgatgttatagaatatatggaaacaaatggtctttctatccaagaaactgctaaaaaatttaatatcggttcaaatagaactctaagtaaatggatagagcaatatgaagaaggcggtgcttcttcacttgagagccaaaaaaggggcagaaaaattagtatgaattccaagctaaacattcctaaaaaacttaaagatgagtctcttgaagaagaagttattcgtttaagagcagagaacgcatatttaaaaaagttagaaaccttgattcaagaacaagatttgagcaagaagaaatcaaggttaaaacaatccttcagctcaaaaaagaatttaaat

SEQ ID NO: 21727 - DNA, 846 bp, Enterococcus faecium
atgaaaaagaaaatttttggatttgcagcagcgcttttgctgactgtaggattagcagcatgcggtaacaacagcgacagcaaagattcagcaaataaagcagacgacacgacattgaaagtcggcgcttcaccgacaccgcacgcagagattttggaacatgtgaaaccattattgaaagatgaaggaatcgatcttgaaatcgtcaaattcgatgactatgtattaccgaaccaatctttggaagaaggcgacattgatgccaattacttccagcatattccttatttgaacaaagaaatcaaagaaaaaggatatgactttgtcaatgccggtgctgtccacatcgaaccaatgggcttgtactctaaaaaagtcaaagatgtttccgaattaaaagatggtgcaacaatcattacttcaaattctgaatcagactggggacgcatcatcacaattctacaagatgctggcttagtcaaagtcaaagatggagtagatctggaaacagcaacattcgatgatattgaagaaaaccctaagaacttgaagttcaaccatacgatcgacccatcacttttagcttctacgtaccaaaatgatgaaggtgacctagttgcaatcaacgcaaacttcgcttacggcgcagggttgaatccattagaagatgccgtattgcttgaaaaggacaactctccttacgtgaatattattgcgactcgtaaaggtgatgaagacagtgacaaaatcaaaaaactgattgaagtgcttcaccgcaaagaagtccaagaatggatcacagacaaatggggcggctctgttaaaccagtaaaggctgatgcaaaa

SEQ ID NO: 21728 - DNA, 157 bp, Enterococcus faecium
atgagtaaaattatcggtattgacttaggtacgactaactctgcagtagcagtattggaaggaaacgaagcaaaaatcatcgctaacccagaaggaaaccgtacaacaccttctgttgtatcattcaaaaatggagaaatccaagtaggggaagttg

SEQ ID NO: 21729 - DNA, 2643 bp, Enterococcus faecium
atgacggaagaaaataacctatcaacaaaatataatccgcaagaagttgaagctggacgttatcagcattggttagaacaagatttgtttaaaccgagcggagataaaaaagcaaaaccttattcaatcgtaatcccgcccccaaatgttactggaaaacttcatttagggcatgcttgggatacgaccttgcaagatatgctgattcgtcaaaagagaatgcaaggatatgatactttatggctgcctggtatggaccatgcaggaatcgcgacacaagcaaaagtagaagcgaagcttagagagcaagggatttctcgttatgatctaggtcgtgaaaagttcatcgatcaagtgtgggaatggaaagaagagtatgcgagccacatccgcgaacagtgggctaaaatgggcttatctttagattacagtagggaacgttttacattagatgatggattatctgaagcagtacgtaaagtttttgttaccttatacgaaaaaggtttgatttatcgtggtgaatatatcatcaactgggatcctcaagcacgaacagctctatctgatatcgaagttattcataaagatatcgaaggcgccttttatcatatgagctatgaactagcagatggatcaggcgtagtagaaattgcgacaacccgtccagaaacgatgttgggagatacggcgattgctgttcatccagaagacgagcgttatcaagcgctcatcggcaaaaaagtgattctacctttagtcaataaacaaatcccaatcattgcagatgaatatgtagatatggaattcgggacaggtgtagtaaaaatcactccagcacatgatccaaacgactttgaggtaggtaatcgtcatgatcttccacgcgtaaatgttatggatgatgatggtacgatgaatgaactagcaggaaaatatgctggaatggaacgttttgctgctcgtaaagcaatcgtgcaagatctgaaagaaatcggtcgattgattaaaatcgatacgatgatccacagtgtgggtcattccgagcggacaggtgtcgttgttgaacctcggctgtctactcaatggtttgtaaaaatggcgccgttagcgaaaaaagccattgataaccaagaaacagatcaagcagtggaattcttccctccaagattcaatcaaacgtttttacgttggatggaaaatgtccatgattgggtaatctcacgacaattatggtggggacatcaaattcctgcatggtatcacaaagaaacaggtgaaatgtatgtagggatggaagcaccagcggatagtgaaaactgggtacaagatcctgatgttttagacacttggtttagttcagctttgtggcctttctcaacaatgggctggccagatacggaaagcgaagattataagcgatacttccctactagcactttagtaaccggttatgacatcattttcttctgggtaagcagaatgattttccaaagcttggaatttactggcgaacgtccatttgagaatgtcttgattcatggattgattcgtgacgaacaagggcggaagatgagtaaatcattaggtaatggaatcgatccgatggaagtaatcgaaaagtatggagcagatgctctccgctggttcttatcgaatggttctgcaccaggacaagatgtccgcttcagctatgaaaaaatggatgcttcttggaactttatcaacaaaatctggaatgcttcacgtttcgttatcatgaatatcgaaggaatgaccgtagaagagatcgatttatctggagaaaaatcagtggctgaccggtggatccttactcgtttgaatgaaacgatcgaacgagtaactgagctatttgatcgttttgaatttggtgaagcaggtcgacaactgtataactttatctgggatgatttttgtgactggtacatcgaaatgagtaaagaagtactttatggagatgatgctgtttcaaaacaaaccacccgtagcatcttagtccatacacttgatcagatcctacgtttattgcatccaatcatgccattcgttacagaagaaatatgggaacatattcctcatcagggaaattctctagtagtggcagaatatcctgttgtacgtccagagtttgatgatgaaacagcttctaaagggatggaagtattgaaagaattgattcgagccgttcgaaatattcgttcagaagtgaatacaccattgtctaaaccaattacgttgctaattaaaacaaacgatgctaaaatcgatcaatttttagttgaaaatacaagctatatcgaacgcttctgtaatcccgaagagttgacgatatcaagtgagatcactgcgccagatctagcgatgtcagctgttctgacaggtgcagaaatcttcttgccgttagcaggattgatcaatattgaagaagaaatcaaacgattagaaaaagaactggaaaagtggacaagcgaagtaaaacgtgtccaaggaaaactttctaatgaacgttttgtttctaacgcgccggaagaagtagtagaggcagagcgtgcaaaagaaaaagattatttagagaagcaaacggctgtcaaagaacgaatcgaaagtttgcgtactattcaa

SEQ ID NO: 21730 - DNA, 438 bp, Enterococcus faecium
atgaaacttcatgaattaaaacctgctgaaggttcacgccaagtacgtaaccgtgttggtcgtggtacttcatctggtaacggaaaaactgccggacgcggacaaaaaggacaaaaagctcgttcaggcggcggtgtgcgtttaggatttgaagggggacaaacaccattgttccgtcgtttaccaaaacgaggattcacaaacgtgaaccgtaaagactatgcagtcattaatcttgatgtattgaaccgctttgaagacggagctgaagtaactcctgttgctttagttgaagctggaatcgtgaaaaacgaaaaagctggaatcaaagtattagctaatggggaactaaacaagaaattaactgtgaaagcagcaaaattctctaaagcagctcaagaagcaattgaagcggctggtggatcaatcgaggtgatc

SEQ ID NO: 21731 - DNA, 2067 bp, Enterococcus faecium
atgatcgagttgggcaaaaaattaaatggccgttatcaaatcactggaaatatcggtagcggtggtatggcaaatgtatttttggcgcacgatttaatcttggatcgtgatgtagcagttaaagtcttacgatttgactttcaaaatgaccagactgcgattcgacgatttcagagagaagctttagcagcaacagaactcgttcatccaaacattgttagtgtttacgatgttggtgaagaagacaacatgcagtatctggtgatggaatacgtcaaaggaatggacttgaaacgatatatccaaacacattatcctgttccttatgaaacagcagtaaatattatgcagcagatcctttctgctatttctttagctcataaccatcaaatcatccaccgagatttgaaaccccaaaacgtactgatcgataatgaaggtgttgtaaaaatcacggatttcgggattgctatcgctttatctgaaacatcgatcacgcagacgaatacgatgctaggatctgttcattatctgtcccctgagcaggccagaggaagtatggcaacgaagcagtcagatatttatgctttagggatcatcctttatgagatgttgacgggtagcgtaccgtttgatggtgaatctgctgtaacaattgctttaaaacattttcaagatgatcttccatctataaaagcacttgatccaaatgtgccacaagcactggaaaacgtgattttacgggcaacggctaaagaacctgcagaccgttataagtcagccgaggaaatgtctgatgatctttctacagtattatcaccagctcgtgcaaacgaagaaaaatggcagcctcatgtgatggataatgaaacaaaagttatcacaccccttacggaagatgcaccaatgcctgattcattcaaatctatgcctctgccaaaagacaagccagaaaacgaaaccttaccagaggaggaagaagttctgcctgatcctaaaaagaaaggacagaaaaaatggtggctgatcctattagctattcttgctgttttaggaatcggaacagctgtattctttgcttctggcgggcgaggagaagttgttgttcctgatgtttctgatctttctgaagcttctgctagagaaacactcgcaaaagcgaaattagaagtagcaacaaaaacagaagaaattgcagatgacaaaatcgaagaaggtaatgtagtgaagacagacccggcagcgggaacgacagtcaagcaaaaacgcgaagtcactctgtatattagtagcggcacgaaaaaaatcaaattagatgattacagtggtaaaagttatgaagatgccgaagcaagtttgaaagaattagggttttctgctgacttgattcaaaaagaagaggaattcagttcagaggtagaaagcggaatgatcatttcgcaatctccatcagaagatacagaagtcgatcctaaaacagacacgattactttcacagtcagcaaaggaccagaaacagtgactttgagtagtcatgtaggagaaaactacgaaactgttcgtaattggcttgttacacaaggattcaatatcaataatattagtgctacttatgactatagcgacactgtaccatcaggttcgatcatcagtcaggatccagcctcgggtgaagttgtagcagaagaaacttacatcaattttgtcgtaagccaaggaacagagcctaaattgaatgatatctccggctatacaaaaagcgaagcacaaagttatttagctagtgtcggtgcagaatatatcgggcatgagacttccgaatattcaaacacggtggataaagataaagtgattcgtacagtaccaggggcaggaacgacaattaccaaaggaatggttgtgaacgtaatttactctaaaggaccagatccagcgtcttctagttctgaaaaagactcttcagacagttctagcagctcaagtagctccagtagcacaagcaactcttcaaaagaagaatcttccagctccacaagttcatcagctagcacctcagaaagttcaaaa

SEQ ID NO: 21732 - DNA, 477 bp, Enterococcus faecium
atgaatatcaaaattatctcagtaggaaaattaaaagaaaaatacctgatccaaggtatcaatgagtatgtcaaacggctgaatgcctatgcaaaaatcgaattgatcgaagttcctgacgaaaaagccccggagaatttaagcgaagcgcaaatgagacaagtaaaagaaaaagaaggggaacggatcttagcgaaaatcaaagaacaagaatacgtctatgccttagcaattgaagggaaaaatcctacaagtgaatcttttgctaaacaaatcgaccaattaggtatccaaggaaaaagccaccttgtttttgttatcggcggctctttaggactcagcgaagccgtcatgaaaagaagcaatgctcagatctcttttggaaaaatgacgtatccacatcaattgatgcgtctgatccttgtcgagcaaatctaccgtgccttccggatcaatgcgggggctccataccacaaa

SEQ ID NO: 21733 - DNA, 1590 bp, Enterococcus faecium
ttgggtgcagaattaaatcaaaaattatttagtgcggcagataatctccgtagcaaaatggatgcgtcagaatataaaaattatttattgggactgattttctataaatatttatccgaccgtttgttggaacaagtggttcttttagcagatgaatccttagaggaatatgatacggtaagcaaacaaacgatgttgtatcgcgaattactttcagatgaagaatcaaaagaagatctgattgcaacaatcgttgatattttggggtatgcgatttcgccagagtatcttttcaacgtcttagcggatcaagcaaaacaagcaacgttccaattgaatgatctaaacaaagcctttgtgcaattggcatctacctacaatcaatttaatgggttatttgatgatgtggatctccaatcaaaaaaactaggaacagatgagcaacaacgaaatgtgacgattaccgaagtcattaagaaattgaatgacgtggaagttttaggtcacgatggggacgtgatcggggatgcttatgaatttctgatcagtcaatttgcttcagaagcagggaagaaagccggagaattttacacgcctcatatggtttctgatatgatggcacaaatcgtgacgttggatcaaaaagaacgacgattctttagtgtttttgatccaaccatgggttcaggttcattgatgttaaatgtgcgtaactacttaactcacccagataacgttaaatatcatgggcaagaattaaatacaacgacatacaatctagcaaaaatgaacttgattttacatggggtagatgccgaagaaatgaatctccgcaatggggatacgttgaataaggattggccaacagatgaaccttacacatttgatgcagtagtaatgaacccaccttattcggctaattggtcagcagatacgaccttcttagacgattctcggtttaatcgttatggaaaattagcgccaaaatccaaagcagattttgcgtttcttcttcatggtttctatcatttgaaggaaacagggactatggccatcgtcttgccacacggagttttattccgtggcgctgcagaaggggtcattcgtcaaaaattactagaagacggcagtatttatgctgtgatcggtatgcctgcgaacttgttcttcgggacatcgattccaacgacggtgattgtattgaaaaagaaccgccaaactcgagacgtattattcattgacgctagtcgagaatttgtcaaaggaaaaaatcagaataaattatcggaagaaaacattcaaaaaatcctcgaaacctatgctgaaagaaaagatgtcgagaaatacgctcatttggcaaactttgatgaaatcaaagaaaatgactataacttaaatattccacgctatgtagatacgtttgaagaagaagaaccaattgatatggttcatgtcggaaatgacatcaagaagatacgacaagaacagcaagtgctagaaaaagaacttttagaagctatctcttccctgcaaacaacacctgaaaatgaagcgtggttacaaggtgcgctggaggtgttcaaacatgag

SEQ ID NO: 21734 - DNA, 1641 bp, Enterococcus faecium
atggcttatcaatttaaattgccggatatcggtgaaggaatcgcagaaggtgaaatcgtcaaatggttcgtcaaaccaggagatacgatcaatgaagatgatacattactagaagttcaaaatgacaaatcagtagaagaaatcccgtcacctgttacaggaacggttaaaaatgtgattgttccagaaggtaccgtagcaaatgttggggatgtattagtagaaatcgatgcaccaggacacgaagacaatgaaggggacagtggtgtagccgcagaatcccaaactccagctaaaccggctgctgaacccactgttgatacagaatcagctggatcgtcaagcgaaggagtcttccaatttaagttaccggatatcggtgaaggaatcgcagaaggtgaaatcgtcaaatggttcgtcaaaccaggagatacgatcaatgaagatgatacattactagaagttcaaaatgacaaatcagtagaagaaattccgtcacctgtcacagggacagttaaaaacgtgattgttccagaaggcactgtagcaaatgttggggatgtattagtagaaatcgatgctcctggacacaatagtgcaccgtcaactagtgcgccatcagctgaagcaccaaaagaaaaagtggaaacatcaggttcagcaagtgtcgttgaagctgccgatccaaataaacgtgtattggctatgccatctgttcgtcaatttgcccgtgaaaaagatgtagatatctcacaagtaactgcaactggaaaaggtggcagagtaacaaaagaggacatcgaaaacttcttggcaggtggtccaagcagtgcaccagcgaaatcagaagcgccagaagcggcagcaccgaaagaagcagctcctgcagcagaaagcaaaccagctgcaccagcaaaaccattcaagtccaacttaggagacttggaagaacgtgtagcaatgacgccaacacgtaaagctatcgctaaagcaatggtcaacagtaagcatacagctccacacgtgacattgcatgatgaagtagaagtgtctaaactatgggataatcggaaacgatttaaagaagttgctgctgcaaatggtacgaaacttactttcttgccatatgtcgtgaaagctttaacagcgactgttaagaaatacccagtattgaatgcatctatcgacgatgcaaaccaagaaatcgtttataaacattactacaatatcggtattgcaactgatacggatcacggactatatgtaccaaatgtgaaagatgcagaccgcaaaggaatgtttgctattgcagacgaaatcaatgagaaagcaaaattagctcatgacggcaaactatctgcagaagatatgcgcaatggaacaattacgatcagcaatatcggatctgtaggtggcggttggtttacaccagtcatcaactatccagaagtagctattttaggtgtaggaacgattgcacaacaaccaatcgtaaatgctgaaggcgaaatcgttgtcggtcgtgtgatgaaactgtcattaagtttcgatcaccgtatcgtagatggagcaactgcgcaacaagcaatgaataatatcaaacgtcttttagctgatccagagctattaatgatggaagga

SEQ ID NO: 21735 - DNA, 252 bp, Enterococcus faecium
  misc_feature (187)..(213): n=g, a, t or c
atgccaaacattgaatctgcaatcaaacgtgttcgtacaagcgaaaacgctaatgtgaaaaattcatctcaaacaagcgctatgcgtactgcaatcaaaaaatttgaagatgctgtatcttcaggtgctgacaacgtagatgcgttatataaagaagctgttaaagctattgatatggctgaatcannnnnnnnnnnnnnnnnnnnnnnnnnnaaccgcgacaaatctcgtttaagcaaaaaaatcgctaaa

SEQ ID NO: 21736 - DNA, 366 bp, Enterococcus faecium
gtgatccaagcagaaagtcgtttaaaagtcgctgataactcaggcgcacgtgaaattttgacgatcaaagtccttggtggatctggtcgtaaaactgctaacatcggtgatgtgatcgttgctacggttaaacaagcaacgccaggtggggttgtcaaaaaaggtgacgtcgttaaagccgttatcgttcgaacaaaatcaggagctcgtcgtacagacggttcatatattaaatttgatgaaaatgctgcagtgattattcgtgatgataaaagccctcgtggaacacgtatctttgggccagttgcacgtgaactacgtgaaaacaacttcatgaagatcgtttcactagcaccagaagtttta

SEQ ID NO: 21737 - DNA, 498 bp, Enterococcus faecium
ggatatgaaaacaaagtaaaagcaaatatcgaatctcgtgcgcaaagtatgaaaatggccgactttattttccgtgtcgttgttcctgaagaaaaagaaactgaagtcaaaaatgggaaagaaaaagaaatcgttcataaaacattcccaggatacgtacttgttgaaatgatcatgacagacgcttcatggtatgttgtccgcaacacacctggtgtgacaggattcgttggttcacacggagccggaagcaaaccagcaccattacttccagaagaagtcaatcatatcttgcgttctatcggtatgagcctgcgacaaaatgatctagaagtagaagttggcgaagtcgtgaaaatcatcgaaggcgcatttgctggattagaaggacaagtaacagaagttgacggagaaaaagaaaaattgaaagtcaacatcgatatgtttggacgtgaaaccagtacagaacttgatttcgatcaagtagataaaatcgat

SEQ ID NO: 21738 - DNA, 1476 bp, Enterococcus faecium
atgaaagatactggttcatcaaagcaaatcacgaccatgacctttatcggaatgacctgcgcccttgtagcaagtgtacgaaatattccagatgtagcagcaacgagctggacgatgattttttacatgctggttgcagtattattgtacgcttttccaatctcattgatctctggtgaatttgctggaatgtttccccaaaaaggtggtccagaactttgggtatcgaatgctctaggaaaaaaatgggggttcgttgtctcatggctgttatgggtccaaatgtttcctgggatggtgatggtcgcttcagcactcgctccgttgtttggtaatattatcgataatgtgccgcttggtttgaacagcaaatttacattagttgtcattttagtcgtttattggatcatcacttttttgaatttgaaatttgatatggcaaaaatcggcggaaaagtcggtgtttggttaggattgtacgtgcctttgacgatgatgctcttattagggtttgctgcgtggatcaaagttgggatcgtaccaaccggaacattaggcagtttttcatgggacaaattaataccagatactacgactgcatcctcatttgtttattttgcgccgatcatgtttatttttactggtatcgaaatgtcctctgtgtatatcactcgattggaaaatccagttaaaacgtatattcgcggagtatttgccgcgttaatttttatatttttcgtcaatattttgaatgctttagttgtagcaaatgtcgtaccaaaaggacaaatggaattgaataatatcgcgcaatctatttcgatttattgccaaattcttggtttgccacatcttattgtgaatctgtttagtttacttgtcttcattggtgtagcagtccaattatctgcttgggcctcaggaccagcaaagacagtgacagaaagtgctagaaaaggtgcgtatccaccaaaattcaatttttggaagacgaatcaatttgacgtatccaaatccgttattttgactcagtctgtcattatctcaatctttgcacttttttatttgctgattcctggcgtcaatcaagcatttttgatgctcgtaaattcaactactgttatctactgtatcgtctatgtcatcatggggatcgcagttttgagattgcgttatacacatgcaaagttgaatcgaccatttagaattggaaaaaaagagaaaaagagcaatcttggagtttggactgtcgttattgttttatttgcggcaatcggattttctgtcggactgacgatgaaagctggaacatggatcaatctaattgcagtcacagccatcagtgtcattttgtttgtagtaccactctgtattgaaaaaataaagaaaccttcttgggaacaggaagtcgccatgctgcttgaaaaagaaaaaggtgaacttgatggaaaaaccggcaatgaaacggactctaac

SEQ ID NO: 21739 - DNA, 636 bp, Enterococcus faecium
atgacatcacttaaaactttactttttggaacaactttggctgccggcgctgcattcttcatgggaacgactgctcatgcggacgaagcttataccgttcaatcaggtgatactctatcaacgatttctcaaaaatacgttggtgataactccttgatcaatgccattgcagaatcaaattcaatttctgatattaacctgatctactcaggacaacaattaacaatcccaacagaaggctctgcacaagcagctgctgaacctcaagcagccgttcaagaagcaccagtccaagctgaacctgttcaagctgaacaacctgttgtacaagaaacggttcaaacggaaacacaagcagcgcctgttgctgaaacacaacctgctcctgctgtaacagaaactgctgctactccagcaagtacaagctctgcaaaagaatggatcgcacaaaaagaatcaagcggttcttacacagcaacgaacggacgttacatcggccgttaccaattagattcttcttacttaaatggtgactactctgctgcaaaccaagaaagagtagcagaacaatatgttacttcacgttatggttcttgggaagcggcgaaagcattctgggaagcaaacggttggtac

SEQ ID NO: 21740 - DNA, 645 bp, Enterococcus faecium
atgagcgaattgatacagacttatggaccaatctttgtcgacgggttcaagatcacattgttttcgagtgtcttagcacttgtgtttagtttgattatcggaacgttaatggcaatcttccaattatcaaagaataaagtagtgagcgccttagcaaaggcatatgtagaattttttagaaacattccattattaatcatcgtgatgtttttttatgttgttgtaccgatttattggtttaatctagatggattccaagcaggtacgattggattaacgatctatacatctgcttttattgctgaaacagtacgttcagggattcaaaccgtaccaaaaggtcaaacagaagcaggactatcttctggttttacctattcagaaatcatgcgttatattgttttaccgcaagcattcaaaatcgttattccgccattaggcaaccaatttatcaacctcgtaaaaaattcatctattttagcaatcgtagctggtttagatttgatgtatcaaggagacttgatcgccagtgaaacattcaataccttcgatacgtatatcatcgttgggttattttacttagttatcacgctaccgttatcttacttaatggtttatcttgagaaaaaatgggcggttcgttca

SEQ ID NO: 21741 - DNA, 417 bp, Enterococcus faecium
atgaacatacaagaaataaaagaaatcattccacatcgttatccaatgcttttgattgatcgagtggaagaaatggttgaaggagaacggatcgttgctaagaaaaatgtaacgatcaatgagcccttttttcaaggacattttccagaagaacctgttatgccaggggtattgattgttgaagcaatggctcaagcaggagcagttgcattactttctcttgaacaattcaagggaaagacggcttatttcggcggattggacaaagcaaaattccgtaagaaagttacaccgggagataccttataccttgaagttgagatattgaaagtgaaagcttcagccggaataggcaaaggaatcgctaaagtagacggtaaaaaagtagccgaagcggaattaacctttatgattgga

SEQ ID NO: 21742 - DNA, 483 bp, Enterococcus faecium
atgattaataatgtaactttagtaggacggttaaccaaagatccagatttacgttataccgcaagtggcacagcagtagcgacttttaccctagccgtcaaccgaaatttcgcgaatcaaaacggcaatcgagaagccgattttattaactgcgtgatttggcgcaaaccagcagaaacaatggcgacattagctaaaaaaggcggcttgatcggtgttgtcggacggattcaaacacgaacttatgacaaccagcaaggacaacgtgtgtatgtgactgaagttgtagcagataactttcaactattagaaagtaaagcagcgacagagagccgtgcgcacgctgatcaatcgtccaccagtccaagcaccgccacctttgaacaacgggatacagcgacgcctaacaacaatggattgaacgcttcacagaatccatttggtggacaatcaatcgatattagcgatgatgatctaccgttt

SEQ ID NO: 21743 - DNA, 2718 bp, Enterococcus faecium
atgaagattttaaggatcgagattgctgcttttggaaaatggcgtcaaaaaagttttgacttttattcaggcaatcagctgatctatgggggaaacgaagcaggaaaatcaacgatttatcaatttattcaagcaatattatttggtttcccttcaaaaggccgtaaaaaaaaggattatacaccaaaagacggctcagcctatggcggcaaaatatggcttaaacatcctgtatatggtgaatttgctgtcgagcgctacaagcagcaaaatcgcggaaaatcgaaggtgtggctgggggatcaagtgggaagtgatgagttactagaaaaactgatcgcacctttgacgaaagagttattccagcaggtatttactttccagcaagagcagttgatggaactagatcatttgagagaaaaagagctacatgatgcgctgatttctttaggcatcacgggcagttctcaagtattccaaaagcggcaagaatattatcagaaagcacaacaattattcaagaaaaaaggccaaaaattactaatcaatcaaaaattaaatgaatggaaagagctgcaagaaaaaattcatcaaaaacaagaacaggaagcttattttggcaagttgatccaacaagaacaggaatacgagtcgcaacagcagcagttattggcacaattaaaagaggcgaacaaacaattttcattagccagacagcaagaacttaatttttctttatatgaagaatggcaatctctcaaaaaaaacagcactacaggtcttcctgatgagcaacttcttttagatctggagtctttctccaaacggtatcagcaaacaaatgagcgtttggaagaattagaagcaacactggaaaagcatagcgggatggatcagcagtcagccagatattatttttatttagagcaggagcaggaactaaaagatctccagcaacttcaatttacagcggaacaattaaacgaagaatggcaaagattacaaattgagactagagaaacaaattcagaattgaagattttggaacaaaggtggcattggcagaaaaatccgttaccggaagaatttttatatgaagaagaatggaagcatcttctggctgaagaaagaaggattgctgatctagaaagccagatttctgtgcgtctccaaatagctaaagaacagcaagagatgattgaagcagaagtgaatgacttggaagagacctatccagcattattacaaaatcagtcagagatagcaccagtctcttcatctaaaccgtatatgctgatggctggcggagcaataatcattgcaggtatatttgtaccaatgcccttgaaagtgatccttttactaattggtgcaggcatgattggctatttcttctacaaaaggcaaccaaaaattaaaactaaaaatgatttctctgagataaaaggaatgtggcaagaaaaactaggacaacttgatctagccttagctcaattagctgaagcagaagaaaaacaaaagagaactggagaagaaaaacagattcttcagcaagaagtatatcgttttgcggatcatcggcacttaggaaagatggatacgctcaaactcatgaaagaatatggacaggaagtcatagattatcagaaattatatggcgtatttgagcggaaacataaaagagaacaggaaatacaagaaaaactacgacaaatcgaccaaaaatttgagtttgttaaagaatggttaccgatacaagataagacaatttcagaaaaaatggtattgctttcccgttttatacaagagatggaacagatgaaatttgccagaagctatcagcaaaatactttattgaagcaagaaatcaatcaattgaaaaagaaacaaaaagtatggatacaagaatacagcgaacaattgactcaagcaggcttatcttatccttcggaagtacctgtctttttacaaaaagccaaacaagccgaacagcagatgaaaagatacaatgaattatcggaaatgcttactccactatttcctgaagagctgacaaaagagaaattatctgtaagactgcgccaactgaaagaaaagcaatcccaactccagcaagaagaaaaagaagcaagtgaaaatcggcaacgactccaacttcaagtagaagagttgcaaagagacggcacattggacgaactttatcaacaagctagccggcaaaaagcaaaattacaggaattactggaggaatggggagcacttgaaatcgccgggacattcttaggtgatctttcaacagagatgagtgaaagacaattaccccagttgttaagagcagcaggtgattatttaggtattttaacaaaaggaaattatcagaagatattactgaaaaatgatacactgactttaacagacggatatacagaatttcccatctatgagttatctacaggtacgaaagatcagctgattatggcgatgagatttgcttacctctcattagaagctaaccgttcgatatgcccgatcatcattgatgatggctggcttcattatgatcatcagcgaaagtatcaattagctgaacttttagctaaatttggagaaaagtatcaaataatttgtttttcttctgataaagaaatggtaagctattaccatgagatgaaccaaatcgtaaaacaattagaaggagcaaataatgaaaaaaattcg

SEQ ID NO: 21744 - DNA, 1422 bp, Enterococcus faecium
atggatacagagcaacagaaaaaaggaattggtttaattccacttgctgccttagtaattggttcagcgattggaggtggcgtatttggtattatgacggacatctccggatcggctggcggcccagctattttcagttgggtactcgtaggaacagcaatgttgatgctctccttgtcgatcaataatatcaataaaaaacgtccagatttaaaaggcgggatctttagttacgcagaagaaggttttggccgtttcgctggttttatcagcggttggggttactggctcacatgctggttaggcaacgtagcttttgcaacattgttgatgagcgcattaggatatttcttcccagtatttgaaggtgggcaaaatctggcatcgatcgtgatgagtacagtctttttatggggatatgcatggctagtgaatcggggagtcgaaaatgctagtttcgtcaatgctatcgtcacattctgtaaattagtgccattatttttatttattgtagtagctatcagcacgttttcgatccaacaattcattgataacttttctagcgacattatattgaatgcgaatggacagccgatcccgttttccagtcaagtattgagttgcatcatggtgatgctttgggtatttgttggtattgaaggagcctctgtcgtaggttcacgagcaaaaaaacaatcagatgttgggaaagcaacgattctagggatattcggcttgattattatttacgtcttggtttccatgcttccatatgggacaatgacgatgaatcagctgcaaacgatcaaggcgcagcctgctatgggctatgtgtttgaaatgatggttggtaaatggggagcagtcgtgatcaacggcggtttgatcatttctttagttggtgtttggctctcatggacgatcttaccgattgaaacaatgggaaacatggctgaagacggacttttgcctaaagcatggggaaaactcaacaaaaatggggcaccaacttatgctatcgtattgacgacgttatgtacgaatgtctttttactttcattattattcactgacagtgcttataactttgcttacacacttggtacagcagctattttcttcacgtggcttttcttaggattgtaccaaatgaaactttcttatcagcggaaagaatgggtccaatttttagtagggcttttagcaagtgcctttcaagtatgggctatgctagtcgtagcctttaatgaagtaatgcttgttcttgttcttttcttgccaggcatttatttttacctcaaagcacgtaaggagcaaaacgagcctgtacaacatatccacttagataagattttacttataggtgtgacgatggtcggagtgattgcaatggttttatttgccactgggatgcttcacgta

SEQ ID NO: 21745 - DNA, 1833 bp, Enterococcus faecium
atgaaaagaaaagtccgcttttttcgatcagtcaattttaagatcgctattacctttattctgattttattgatctcgatcgaaattattggtgcctactttatacgtggtttagaacgttccacgatcaatacatttattaaagatatgaatcaaacggtggaatcattagcaacaacaatcagcccggaattgaatcgaaaagataatgcagatgatgaagaggtaaatgcgaatatcaaaagatttattgaaaacagtgcgactagcgatatcatcgaaatacgggtcgttgacgaaaaagggatcatccgaggaacaaccgatgtcaatgaacaaagcgctgtgggaaagaaaaatgattatgttgatatcaatgatttcacgactaaacgttatgttgctttagataacgacgataaacgggtgaatatcaatgttcaaccgatcctgtccccgaccggcgatgccgttatcggggctctttacgtcaaaagtaatatcgaacaaaaatattcggaaatcaataacacagcagtcattttctttactgcctcactaattgcggcatttatttcaatgatcgtatctgttttagttgctcgttcgattacacagccgatcggtgaaatgagagaacaagccattcgaatcgctagaggagactacagtcggaaagtcaaagtgcatggacaagatgaacttggacagctggctgataccttcaatcagttagctgaacgtattgaagaagctcaagatacaatggaagctgaacgcaatcgtttggatagcgtgctatcccatatgacagacggcgtcattgcgacagatcgcaggggtaaagtcattacgatcaatgatatggctgtttccttgctagatatcaaaaacgaggaagcaatcggacaatcgattttgacacttttagatatcgaagaagaatatacgttgcggaaattattagaagatccaaacgaaatggtacttgaccgttcaaccagtacattggaaagtgatcagatgatcttgcgagtagacttttctatgatccgtcgcgaatcaggttttatcagcggattagtagctgtcttgcatgatgtgacagaacaagaaaaaacagaacgggaacgtcgtgaattcgtctctaatgtttcccatgaacttcgtacaccgttgacaagtatgcgtagttatatcgaagcattgagcgaaggtgcgtggaaagacgaggaagtagcaccaaattttttgaaggtaacgctagatgaaacagaccgaatgattcgaatgatcaatgacctcttaaatctatctcgcatggatacaggtaatacccagcttcaattagaatatgtcaatttcaacgagttagtgaattttgttcttgaccggtttgatatgatggtgggaaatcaggaaaaaaattataagatccgtcgtgaatttacgcaaagagatctttgggtcgaagtagatacagataaaatcatccaagtagtcgataatatcatgaataacgcgatcaagtattcaccagatgggggaacgattacttgtcgcttattagaaacgcataataacgtggttttaagtatcaccgatcaaggattggggattcctaaaaaagatctgaaccgagtgttcgagcggttctatcgagtagataaagcacgtgcaagagcacaaggtgggacaggacttggattagctatttctagagaagtgattaaggcgcatcgaggcgctatttgggcagagagcaaggaaggaaaagggtcgactttttatatctcgctgccatatgaaccttatgaggaggaatggtgggaa

SEQ ID NO: 21746 - DNA, 570 bp, Enterococcus faecium
atccgaataaagcgatataaatcttataaaggaacagtaggaaaaatgccaagaatgtgttaaaacgaaatttttcagtagatacacccaataaaaaatgggtgacagacgtcactgaattcaagataaaaggaagaaaaatctatctatctccatatacttgatttatataacggagaaataattagttatagtatatcaactagtccaacatataaactgattgaagaaatgcttcaacaagcaattaaaaaaaagggaactgagggttcactgattctacattcagatcaaggatggcagtatcagatgccacaatatcaaaaaaaattaaaagagaataacattattcaaagcatgtctagaaaaggaaattgcttagataattctgtaatagaaaatttttttggtgtgcttaaatcagagtttttttatcgagaaaaattccgatcaattgagatatttcaaagtaaattaaatgagtatattaggtggtataataacaaaaggataaaactaaagttaaatggactatctccagtagaatatcggaaacagtccattaaatag

SEQ ID NO: 21747 - DNA, 501 bp, Enterococcus faecium
gtgctttttttgcggaaatatacatttgtttttaagaaaaaagtagtttcagactatttaaataacgaaggcggctacaaatatcttgcacataaatatcaaataaatcgtacactggttagacattgggtaaggatttataactatcatggttgggaaggcttggttggaggtggcaaaagctacactacaaaatttaaacttgatgttatagaatatatggaaacaaatggtctttctatccaagaaactgctaaaaaatttaatatcggttcaaatagaactctaagtaaatggatagagcaatatgaagaaggcggtgcttcttcacttgagagccaaaaaaggggcagaaaaattagtatgaattccaagctaaacattcctaaaaaacttaaagatgagtctcttgaagaagaagttattcgtttaagagcagagaacgcatatttaaaaaagtggaatggcaacactttttttgacaaaaattataaggtgttg

SEQ ID NO: 21748 - DNA, 975 bp, Enterococcus faecium
atgtttaaaggcaaagcacgcgcatataccaacattgctctaatcaaatattggggtaagaaaaatgaagaactcatccttccaatgaacaacagcctttcgttaacattggatgcattttatacagagacagaagtcatcttttctgatagctatatggtagatgaattttatctagatggcaccttgcaagacgaaaaagcaacaaaaaaagtcagtcagtttcttgacctttttcgtaaagaagccggcctctcactaaaagcttcagtaatcagtcagaatttcgttcctaccgcagctggattagcctcctctgccagcgggctagctgctttagcaggcgcttgcaatactgctcttaagcttggattagatgatctctctctttcaagatttgctcgacgcgggtctggttcagcttgccgaagtattttcggtggtttcgtcgaatgggaaaaaggccatgacgacttaagttcttacgctaagccagtcccttccgattctttcgaagacgatttagcaatggttttcgttttgatcaacgaccagaaaaaagaagtgtccagcagaaatgggatgcgtcggacagtcgaaacatccagtttttatcaaggctggttagattccgttgaaggggatctatatcaattgaaacaagcaatcaaaacaaaagatttccaacttctcggagaaacgatggaaagaaacggactaaaaatgcatggaacgactttagctgcccagcctccattcacttactggtctcctgacagcttaaaagcgatggatgcggtgcgacaattgagaaagcaaggcattccatgctactttacgatggatgctggccctaatgtcaaagttttagtggaaaacagccatttatctgaggtacaagaaacatttaccaaattatttagcaaagaacaagtaattactgcacatgctggtccaggaattgcgattattgaa

SEQ ID NO: 21749 - DNA, 1395 bp, Enterococcus faecium
atgaaaaaatatcaatttccagcaaatttttggtggggttctgcagcaagtggcccacaaacagaaggaaggatttcaggcgatggaaaaggagagaacatttttgattattggtacaaaaaagaaccgcaaaagttctttgatcaagtaggacctgaaaaaacctcgcaagtttatacgaagtatcaagaggatgtacagttgatgaaacagactgggcataattcatttcgaacatctatccaatggagccgtttgatacctgatgaatctggaacaatcaacgaagaagccgttcgtttctatcatcgttattttgatgagttgattgaaaacggtatcgaaccctttgtgaatctgtatcatttcgatatgccgatgtatctgcaagaaaaaggcggatggttgaaccgagaaacggttgaagcctatgaaaaatatgccaaaagttgttttgaattgtttggttcgaaagtaaaaaaatggtttactcataatgaaccaatcgttccagtcgaagcaggttatttatatcgatggcattatccagaagagtcagatatgaaaaaagcgatccaagttggctatcatgaagcgttggcttcagcgttagccatcaaatcttaccatgaaatggagcaaggtggtgttattggtatcatcttgaatctgacaccaagctatccaagagacgaatcaaaccctgaagatgttaaagcagcgcaaatagcagatgcgttcttcaatcgttcattccttgatccagctgtaaaaggcgagtttccaagtgaattgattgagatagtaaaagaacttgatctcatgcctgtgatccatgcagaggatttgacggttatcaaagaaaatacagtagatcttttaggtatcaattattaccagccacgccgggtaaaagcaaaagaaacaccaatcgatactaaaaacggtccaatgcctgaggattatttcgacaattatgaaatgcctggtcgtaaaatgaatccttatcgcggatgggagatctatgaacaaggaatctatgatattttgatcaatgtacgagatcattatggaaatatcgactgctttatttctgaaaacggtatgggtgtagaaaacgaagcacgatttatcaaagaagatggcatgatccacgatgattatcggatcgaatttgtccaatctcatctgaaatatgtccatcaagccattcaagaaggtgccaattgtttaggctatcatatgtggacatgtatggataactggtcgtggaccaatgcatataagaatcgatatggctttatttcagtagacttagcacaagatggaaaaagaacaatcaaaaaatcgggtcattggttcaaagacgtatcagataaaaacggatttgaggct

SEQ ID NO: 21750 - DNA, 1071 bp, Enterococcus faecium
atgaaaaaattacaatctctgtttttaggtattctcatcattattgcggtgctgctgcttggtgttcgtcaacttgaaaaaacaagtggcatgagtggagcaaaggtacttaccatctataactggggagattatatcgatcctagtttgatcacgaaatttgaaaaagaatatggatacaaagtgaattatgaaacatttgattctaatgaagcgatgttcacaaaaatccagcaaggtgggacaaactacgacatcgctataccaagtgaatatatgatccaaaaaatgatcaaagaaaaactagtacttccattagatcattcgaagatcaaaggattaaataatattgatccacgatttttagacttggattttgatccagataatcagtattcgattccatatttttggggaactttagggatcgtatataacgataaattctttgatgcaaatcaaattaagcattgggatgatttgtggaagccggaattaaaagacagtttgatgctgattgacggtgcacgagaagttatggggctttctttgaatagtttaggctattctttgaatagtaagaatatggcacagctgacagaagcagcaaataaattgaatcatttaacaccaaatgtcaaagcaatcgtggcagatgagatcaaaatgtatatgatcaatgaagaagcctccgtggcagtgacattttctggcgaagctgccgatatgatgtgggaaaatgaacatttacattatgtgatcccaccagaaggatccaatctttggtttgataatatcgttatgccaaaaaccgtgaaaaataaagaaggtgcctatgatttcatcaactttatgctagaaccggaaaatgcggcacaaaatgcagagtatattggttattctacaccaaatgaagaagcaaaagcgttattgccaaaagacatttcgtcggacgaacaattctatccatctgatgacacgatctcccatcttgaagtctacaaagatctaggatcgaaatacctaggcatctataatgacctattcttagaattcaagatgtataggaga

SEQ ID NO: 21751 - DNA, 1301 bp, Enterococcus faecium
ctattacagcagtcatttattcggcacgggaatgaacaaggattctggcaacaaggatcgagaattttagcagcggtatcaggtggtgttgattcgatggttttgctccatttacttttacaagtgcaacgccaaatcggtttttctttaggtatcgtccacatcaatcaccaattaagagaagaatcagcagaagaagctgcctatcttcgctcatattgtgaagagaagaatctccctttatatgtaagtatttgggaagatccagccaaatccgccatagaaacagaagctcgtaactttcgttatcaagaattcactcgcgtgatggaagaaggacaatatgacacgttgatgactgctcatcacggagatgatcaaatcgagacggtgttaatgaaaatcgttcgtgggggacagttaaatactttttctggaatcaaagaagtacaaccatttgctacgggcagactgattcgtccgttgctgagttttagcaaagaagacctatatacttatgcagcggaatcgcagcttgtttactttgaggatcagacaaaccaattgttagatatccagagaaatcggcttcgtcatttggtagttcctcaattgaaacaagaaaatacacaggcgttgagacatttccagcaattttcgcaacagatccaatgggcagaccaagtcattcaaaaatatatgggacagttgatcgaaaaggaagtcgaacagtgggaggaacaatttcgattttctgcagaaatgattgaagaaatgacagatgctgaacgatactattttttttactcctttttcgacaaagcattctcaaaaacaggaattattttgaaagaacaacaaatggagtcgattttagaccagtggcaacagaaaaaaagccaatggcaactcagtattggcaataattggatactgaaaagagagtatcattttgttgtactctctaaaaaagaaaaacaagcaactagccagacagaagaccagcgcttgttgctgattccagaacaaggaatatatttgaatgaaacagaatggattggtctggtcaaacctgaaaatgcaggggacatcaaagcaacagattcatggtctctattttctcatgacatttggattcctgctgatgtgcaactgtatgtcgaaaaaagaaaagcaggagaccgcccattaaattaacagagaatctcacaaaaaaagtatctagatattttatcgatcagaaagtacctattcacaagcagcatgcttggatcattacagatgccaaagaatatatatag

SEQ ID NO: 21752 - DNA, 690 bp, Enterococcus faecium
atgaaaatcggtattatcggcgcaatggaagaagaagtaaaaatttcgagagagaacctaagcgaaccattatcatgggaacgcgcaggcgctttatttatttcaggttcattaggtaaccacgaagtgatcgtcgtacgttccggtataggaaaagtcttagcatctattaccacaagtctgttgatccaacaatacggcgtgaacatggtgatcaatacaggttcagctggcggaatcggtgaaggcttacaagtaggtgacatcgttatatcagacaaagtagcttattttgatgcagatgcaacaggatttggctacaacccaggacaattaccaggaatgcctctatattatgaagcaagcacatatttgcgcagtgaaatggttaaagcagcaaaagcaacgaatttgaacgcaaaagaaggattgatcgttacaggtgatacatttgtcgactcgccagataaaatcaaagaaatcttaacgaatttccctgaagcattagcttgcgaaatggaaggagccgctgttggacaaacagctcgtcagttcaatatcccatttttgatcgtacgtgcaatgagcgacacagcagatcactcggcgacacaaagctttgacgaatttatcgaagacgcaggcaaacgatcagcagaaatggtgatcgaatttgtcaaacatctcgta

SEQ ID NO: 21753 - DNA, 1343 bp, Enterococcus faecium
aattttgatatattccgcttcaaaccgtttatcaatgaagcgttaaccgcaaagggcttcaaacagcccacagaggtccaggaacgtttgattcctttaattgcaataaggaaaaatatcattgggcaatgctcaaactggtacaggaaaaacacatacgttttttgttgcctttgtttgaaaaaatcaatgcagaaaaagaggaagtacaagttgttattacagctccaagtagggaactagctgcacagatctatgaagcagctacacaaatcgctaaattttctacaccggagatccgtgtctcgaattttgtcggcggtacagacaaacagcgtcaattaaatcgtctgcatcaccaacagccacaggttgtagtaggcacgcctggtagaatattagacatgatgaatgaacaagcgctgaagattcacaccgcatttgcatttgttgtcgatgaagcggatatgacattggatatgggttttttaaatgaagtagaccaaattgcaagtcgattaccagaaaagctgcagtttttagttttttctgccactattccagaaaaacttcgtccattcttacgaaaatacatggaaaatccaatcattgaagaaatcaaaccaaaagcagttatttctgaagacattgaaaattggctgatttcaacaaaaggtaaagatgagaatcaaatgatttatcaactgctgacaattggtcatccttatttagcaatcgtatttgccaatacaaaacagcatgtggatgaaattgccgattacttgaaaaaccaaggcttgaaagtagcaaagattcatggagacatcaccccaagagagagaaaacgagtgatgcgacaagtacagaatctggagtatcaatatgttgtagcgactgatttagctgctagagggatcgatatcgaaggtgtctctcatgttattaatgcagaaattccagaagatctagacttctttatccatcgtgtcggacgtactggacgtaatggcttaaaaggaacggccattacgttatattcgccaaatgatgagcaagccattgatgcgatagaaaaattgggcgtctcatttgaaccaaaagaaatcaaaaacggggaaatcgtcaaaacatacgatcgtaatagacgtgccaaacgagaaaaatcaaaagatgtattagatcccacgctgattggtcttgtgaagaagaaaaagaaaaagatcaagcctggttataagaaaaaaatcgattgggcaattgcagaaaaaaataaaaaagaacgcaaaatcgaacgcagacagcaaagccgtactgctcgtaaaaataagaaaaattcacataaa

SEQ ID NO: 21754 - DNA, 336 bp, Enterococcus faecium
atggaaatcgaaaagaccaatcgaatgaacgcgctctttgaattttattcgaccttattgacagaaaaacaaatgaactacatggaattatattatgcagatgatttttcattaggtgagatcgcggaagaatacgaagtaagccgacaagcagtatatgacaatatcaagcggacaagcaagatcttggaggattatgaaaaaaaactccatcttttttctaattatattgttcgagaacaggtattggaaaatatgactgcatatattacagataagtacccggaagataaaaaactacttgaatatgtacagcaaattcaagcaatcgaagaa

SEQ ID NO: 21755 - DNA, 603 bp, Enterococcus faecium
atgattttagagaataaattgggattaaccaatcaagttgagttggctaaggttgaagaaaaactcagtaaacaaaaagcgaaagaattgtacgattgtggaaaaataaatgaaatcgaagttggtacatttaaaggtttatctgaaattcatgaatttctattttcggatatttacgattttgccggaaaaatccgatcggtcaatattgcaaaaggaaattttcgatttgcaccagttatgtatttagaacattcgttacagcatattgatcagatgccacaaacttcttttgaagagattatcaagaaatatgtggagatgaatatcgctcacccatttcgagaaggaaatggccgaagtactagaatttggctggatctcattttaaaggaagaattgcaaaaagttgtagattggaacttaatcgataaagcagactatctttctgcaatggagcgaagtcccataaacgatttggaaatacgctatctaatttccaatgctctgactgataaaattgacgatcgcgagttatatatgaaaggaatcgatgtcagctatttctatgaagggtattctgagtatacgatagatgatttg

SEQ ID NO: 21756 - DNA, 444 bp, Enterococcus faecium
atgaacattttatatatatcgatttcaggaaatacgcgtgcctttgccaaacatctagcagaatatgctgaaaaaatgcatgcagaagatcctgtcaatcctgaagttactttaaaagaaatccatgaaaatagtgattttacgaaagaaacagaaccattttttactttcgttcctacttatttagacggcggaaatggtttagataacggtgatacagaaatcttgaccgaaacgatgcgtgaatatctggaacatgaagacaatcataaactttgtcttggtgtagtcggtagcggaaataaaaacttcaataatcagtattgtctaacagccaaacaatatgcacaaacatttggctttcctttcttggcagattatgaattacggggaacaccatctgatgtgacacgaatttatcagattttagcagaaaacaataaa

SEQ ID NO: 21757 - DNA, 2607 bp, Enterococcus faecium
atgaatattgagaaaatgactacgacgcttcaagaagcgattgctgaagctcaacagattgcggtcactcgaaaacatcaagatatcgacattgcccatgtatggaaaatctttttacaatctaatcattttggtcgaaatttctatacggatgccggattggatgtcgaatcttttgaacatgaaattgatcgtctactggatgagtatccagttgtttctggtggaaacgtccaatatggacaaaacctcagccagaatttctttcgattattgaatgaagcagaccaaatacgtgaaagcttcggcgacgagtttctttcaacggaagtcgttattttagcgttgatgaaattaaaaaattatccgttaactgtttatttgaataaaaacggattatctgaaaaagaattgcgtaaaaacatcgaagagatgagaggaggagaaagagtgacctcacaaaaccaagaagaacaatacaaagcattagaaaaatacggcgttgatttagtacagcaagtcaaaagcggaaaaatggatccaatcatcggtcgtgatgaagaaatccgtgatgtcatccgtattctttcacgaaaaacaaaaaataatcctgttctgataggagaacccggtgtagggaaaacggcaatcgttgaagggcttgctcaacgtatcgtacgcaaagatgtgcctgaaaatttaaaagataaaacgattttttcattagatatgggtgcattgatcgctggagcaaaattccgtggtgaatttgaagaaagactaaaagcagtcttgaaagaagtcaaaaaaagtgatggacgtatcctcttgttcatcgatgaaatccacaatatcgtaggggcaggaaaaacagaaggaagtatggatgccggaaatctgttgaaaccaatgcttgctcgcggtgaattacatttgatcggtgccacaactttagatgagtaccgtcaatatatggaaaaagacaaagcgttggaacgtcgctttcaaaaggtattagtcaaagaaccaacagtggaagatacgatcagtattctgcgtggattaaaagaacgttttgagatccaccatggtgttaacatccatgacaacgcattagtagcagcagctactttatctgaccgttatattactgatcggttcttaccggacaaagcaatcgatttgatcgatgaagccagtgcaacgattcgggtagaaatgaactctatgccaacggaattagatcaagttactagacgtttgatgcagttggaaatcgaagaagctgcactgaaaaaagaatcagatgatgcaagtaaaaaacgcttgaaaaatttgcaagaagaattagctgaacttcgtgaagaagcaaatgcgatgaagatgcagtgggaaacagaaaaagaagaagtcaattctgtttcagcaaaacgtgctgaaatcgataaagcaaaacacgaattagaagatgcagaaaataactatgatttagaacgcgctgctgtattgcgtcatggtacgatacctcaattagaaaaagaattgaaggaattagaagctaaagcaaaagacagcgagattaagatggttcaagagtccgttaccgaaaatgagattgctcaagtcgttggcagattaacgggtatccccgtaacgaaacttgtagaaggtgaacgagaaaaactaattaaattgaatgaaacacttcataaacgagtgattggtcaagatgaagcagttgatgcggtcagtgacgcggtaattcgttcacgggctggattgcaagacccaaatcgtcctctaggttctttccttttcctaggaccaactggtgtcggaaaaaccgaattagcgaaagcgttagctgagaacttgtttgactcagaagatcatatggtacggatcgatatgagtgaatatatggaaaaacatgctgtgtctcgtctagtcggagctcctccaggctatgtaggttacgaagaaggtggtcaattaacggaagctgtcagacgaaatccttatacaatcgtcttgttggatgaaatcgaaaaagcgcatcccgatgtcttcaatatcttgttacaagtcctagatgacggacgcttgactgattcaaaagggcgagtagtagatttcaaaaatacggttctgatcatgaccagcaatatcggttcacagttactgctggaaggcgtgactgctgatggaacgattccagaagcagtggctgaacaagtcaacacgctattacgtggaaacttcaaaccagaattcttgaaccgaatcgacgacacgattttatttacaccattgagcctagacaacgtgaaaggaatcgttgacaaaatggtggcgcaattggcacaacgtctggaacatcaagaaatcctgctgacaatcagtgatgaagccaaaacgtggattgctgaaaatgcttatgaaccagcatatggtgcaagaccattgaaacgatttatcactaaggaagtagaaacaccactagctaaagaaatcgttgcaggacatgttatgcctaaatcaaaagtaacgattactttacttgatggacaacttcatttcaaaacagaagagctagaagaaatcgtc

SEQ ID NO: 21758 - DNA, 3426 bp, Enterococcus faecium
atgaaaaaagttttagttgctaacaggggtgaaatcgctgtacgtgtatttcgtgcttgtacagaattaggaattaaaactgttggaatctatgcagaagaagatgaatattccgtacaccgtttcaaagcggatgaagcatatttagtaggacaaggaaaaaaaccgattgatgcgtatctagatattgaagggatcatttctatcgcgaaagaatgcggagctgacgctattcatccgggttacggtcttttgtcggaaaacttgaattttgcgcaacggtgcgaagaagaaggcatcatttttgttggacccaaactgcatcatttagatatttttggagataaaatcaaagcaaaagctgcagctatcgaagcggggattgcttcgattccaggcacagatggaccaatcgcttctatagacgatgccttggagtttgcgaaacaatacggttatccgattatgatcaaggcagctctaggcggcggcggacgcggcatgcgtgtagctcacgatgaaaagagtgcaagagagggctacgaacgtgcgaaaagcgaagcaaaagcagcctttggtagtgatgaagtgtatgttgaaaaatacatcgctaatcctaagcatatcgaagtacagattctcggggatacgcatggaaacgtcatccatctttttgaaagagattgttctgttcagcgccgtcaccaaaaagtagtagaagtagcgccttgtgtctctatgaatgaacagcaacgtcaaaaaatctgccaggcagctgtccaattgatgaaatatgtcgggtatgtcaacgcaggtacagtagaatttcttgttgaaggagatgatttttactttatcgaagtcaaccctcgcgtccaagtggaacatacgatcacagaaatgattacagatattgatatcgtaacaacgcaactgttgattgctcaaggtttggatctgcataaagaaatcggattgcctcagcaagaaggaattaaattaaatggttcagccattcaatgccgaatcactacagaagacccgttgaataactttttaccagacacagggaaaatcgatacgtatcgttcacctggtggttttggcgtacgtctggatgtcggaaatgcttacgcgggctatgtagtgacaccgtattttgattcattgctagtaaaagtatgtacgcatggtgctacctttgaaacagccattcagaaaatggaacgttgcttgaaagaatttagaatccgtggagtgaaaacaaacattccatttatgctcaatgtcatcacacatcctgaattccaatcaggaaatgcaaaaacaaccttcattgatagtacagcaacattatttgaatttcctcgactacgagaccgcggaaacaaaacgatgaaatatatcggtgaaattactgtgaatggttttccaggtatcgaaagtggcgaaaaaccattttatgaagaaccacgtatgcctaaagatctaatcacaagaactgattacgtaacggctaagaatgtattagatgcgaagggtgccgatgctttggtcgaatggatcaaaggacaggaaaatttgttgttgacggatacgacatttagagacgcccatcaaagtctgctagcaactcgtgttcggacaaaggatttcaagcagattgcacgtttgactggagaaggtcttcctgaactcttttcaagtgagatgtgggggggagcaacatttgatgtggcttaccgctttttgaatgaagatccttggcaacggttgagaaaaattcgttctttaatgcctaatacgttgctgcaaatgcttttcagaggttcaaatgccgttgggtattctaattatcctgacaatgtattggtggaatttgtcaaagaagcagcagcgcaaggaatcgatgtatttcgaatctttgatagtttgaactggactccacaaatggaaaaaagtatccaagctgtacgggatactggtaaaatcgcagaggcagctatttgctatactggcgatatcaacgatccaagtcgggcaaaatacaatgttcagtattataaagacatggcaaaggaactagaacaactgggtgcgcatatcattgcaatcaaagatatggctgggctgcttaaaccgcaggcagcttatcgtttgattagtgaattgaaagaaacgacagatctgccaatccatctgcatactcatgataccagcgggaatggaatcatcacttattctgctgcttcaaaagcaggagtagacatcgttgacgtggcaatgagtgcaatgagtgggaatactagtcagcctagcatgagcagcttgtattatgcactggtcaatggtccacggctgccagaaatcacgattgaaaatgcacagaaattaaaccattattgggaagatgtgcgcatgtattacaaaccgtttgaaaacggcttgaatgctcctgaaacagaagtatatatgcatgaaatgccaggaggacagtattcgaatctacagcaacaggcaaaagctgtcggattaggtcatcgctgggatgaaatcaaacaaatgtatcatactgtcaacttgatgtttggcgatatcgttaaagtaactccatcatctaaagtagttggagatatggcactatttatggtccaaaatgatcttacagaagaagatatttatgaaaaaggcgaaacactaagtttccctgaatctgttgtgactttcttccaaggagaactagggcaacccgttggcggatttcctaaaaaattgcaaaagattattcttaaaggcagacctgcattgaatgaacgtccaggtcttttggctgaatcagtcgacttcaacgaagtaaaaaaagaattggcagaaaaaattggctatgaaccaaaacaagacgaagtattaagctatttgatgtatccgcaagtctttttggactatcaaaaagcatataatcaatttggcgatgttacattactggacacaccaacatttttccaaggtatacgtttgggtgaaacaatcaatgtacaaatcgaacgcggaaaaacgcttatcattcgtttagatgaaatcggagaacccgatatcgaagggaatcgcgtactgttcttcaatttgaatggacaaagacgtgaaatcactatcaaagataattcgatcatcagtacggtccaaacccgattgaaagctgaaccgacaaaccgagaacaaattggagcaacgatgtctggttctgttttggatgtattagtgaaaaaaggcgataacgttaaaaaaggtgatacgttgatgattactgaagcgatgaaaatggaaacggccatcgaagcacgttttgacggagaagtcgcacatgtatatgtgtcttcaggagacactatttcgtctggtgaccttttgattgaagtgactgagaaa

SEQ ID NO: 21759 - DNA, 597 bp, Enterococcus faecium
atgccgcttttaaacagaggagcaattgctaattttttcggattagctgatgaggaagagtacgaataccaagattatcctgaaacaacaaaaaaggctgtacagccaactaaaaaaaatacaacacagaatcaatcaactcattctgtatctgctgcgaatactcatgaaaaacaaaaaacggcgacttcacgtcctgtaacgcatgaaagtattcagccggctgaaaagaaaaaagtaattgaactacatcaatcacctacaaaaactgtagcgaaagaaagaacagcttcaagaacctctacacaacctaaagcaaatcttgctggaaaaatcactgtaatggaaccaagagcttattctgaagctatggcgattgctaaacgaatcattgctggagaagcaaccttagtgaattttcatttagtagaagaaaaacaagcgagaagaatcgttgattttctaacaggaacagtttatgcactagatggagatatcaaacgtgttggagatgagatttttctttgtacaccgactgggatggagattgacagttcaaccgctcaatcttttgcagatgcgaatttgtttgatctg

SEQ ID NO: 21760 - DNA, 859 bp, Enterococcus faecium
gaagtaaatggaacagtggatgtaccaaaggggaaaagtttttttaaaacacttcttgcttactctggacctggtgcgttagtagcagttgggtatatggacccgggtaactggtctacttcgatcaccggaggacaaaatttccaatatttatgatgtcagttatttgatgtctagtctgattgctatgcttttacagtatatggcagcaaaattaggaatcgtgacccaaatggatttggcccaagcaatccgagcacgcacaagtaagacattgggtgtcattttatggatcttgactgaattagccattatggcaacagatattgcagaagtcattggtgcagcaatcgccctctacttactttttgatattccattggtgattgccgtctttattactgtattagatgttttcgttctcttactactgacaaaagtcgggtttcgtaagatcgaagcactggttgtctgcttgattttcgtcattttattcgtttttgtctatcaagttggcttgtctaacccagattggcacagtttatttgctggctttatccctaacagccatacattctccgactcacctgtcattggtggcgaaactccgctaactggagcattagggattattggcgcaacagtcatgccacataacttatatctacattcagcagtttcacaaactcggaagatcgatcaccaagacgaagaagatgtagcacaagctgtacgtttttctacttgggactctaatatccaattgtcgatggcttttctagtcaatgcgctgctattgattatgggtgtcgctgtcttcaaaaccggttctgttcaagatccttccttttttggtctg

SEQ ID NO: 21761 - DNA, 1458 bp, Enterococcus faecium
atgacgaaagtacgcgtacgctatgcaccaagtccaactgggcacctgcatattggaaatgcaagaactgcattattcaattatttgtttgcccgccacaatgatggagactttattattcgtattgaggatactgaccaaaaacgtaatatcgaagatggcgaaaaaagccagttggaaaaccttgcttggttgggaatgaattgggatgaatctcctgaaaatcctggagaatacggcccttaccgtcaatctgaacgtaaagaaatctatcaaccgctgattgatcagctgcttgctagcaatcgagcatacaaatgctattgcacagaagaagaattagaagcagaacgggaagcacaacgcgcaagaggagaaatgcctcattacgcaggaacatgtgcgaacttgacacctgaagaacaagcagaaaaagaagcacaaggtctagaatctgttgtacgtttccgtgtgcctcgcaatacagaatacgcatttacagatatggtgaaaggcgctatttcgttcgaatccgataatatcggtggcgactttgtcatacaaaaacgcgatggtatgccaacttataattttgctgttgcggtcgatgatcatttgatgaaaatcactcacgttttacgtggagatgaccatattgccaatacaccaaaacaactgatgatctatgaagcatttggctggacaccaccaaccttcggacatatgacattgatcatcaacagtgaaacaggtaaaaaactaagcaaacgtgacgaatcaatcttgcaatttatcgaacaatatcgcgaattaggctatctaccagatgcaatgttcaactttattgcattattgggctggtcacctgtgggcgaagacgaaatcttcgaacaccaagaattgatcaaaatgttcgatccaaaacgcctaagtaaatcacccgcagctttcgatgcgaaaaaactgcaatgggtaaacaaccattacatcaaagcaatggatctagatgcatttactgacatgtgtctgccttatctaatcgctgatggacgtgtagcagaaaacccagatgaaaagacaatcgaatgggtgaagaagatcgttagcctgtatcaacctcaaatgagctatgctgcagaaatcgttgatctgtctacgctatttttcaatgaacatcctgtattgaatgaagcagcaaaagaagtacttgctggtgaaacagttcctactgttctccacgcattcaaagcacagctagaacaaatggaagtagtagatgctccaactgtcaaagctgccatcaaagctgttcaaaaagaaactggcgtaaaaggaaaaaatcttttcatgccaatccgtgtagctgtatcaggacaaatgcatggtccagaattgcctgaaacgatcgaattgcttggtcgtgaaaaatcattagcacatttaaatcaagtactgaac

SEQ ID NO: 21762 - DNA, 198 bp, Enterococcus faecium
atgccaaaacaaaaaacacaccgcggatcagcaaaacgtttcaaacgtactggtaaaggcggattgaaacgcttccgcgcgtttacaagtcaccgtttccacggcaaaacaaaaaaacaacgccgtcaattgcgtaaagcaagcatggtttctagtggcgacttcaaacgtattcgccaacaactagcaaaaatgaaa

SEQ ID NO: 21763 - DNA, 1540 bp, Enterococcus faecium
atgaacgtttcaatcggattagatatcggaaccacacaaaccaaagcagttgctttcacagatgaagcccaagaagcagcatccgcttattttcgctaccctttgatccaagaaacacaagggatggcagaacaagatcaggaattgatctttcaaggtgtctgcaccgttataaaagaagtaattaaacagttgccttcagacacaatcattcaatttgtctccttctcctctgcgatgcatggcctgatattgttggatgaagagaaaacaccgttatctcgaatgatcacttgggcagataaccgagcagcggacgaagcagaaaaactgaaatataccgtgcttggcaaagaattttatcggcagactgggacgccgattcatccaatgacaccattgaacaaaatcaagtggctgcaaaacagccaacctgaattattcaaaaaaactgcttattttgtcggtatcaaagactatatcttttatagattgtttggcgaactgatcagcgactacggaacagcttcaggaactggatattttgatatccatgaattccaatgggcagaagaagtgcttgactacttgaacattcgaatagagcaattgccgcaagtctttccttccacctatcaagtaacaggtctaccatcaaaaacagcagcagaactaggtttgccaaatgatatatcatttgttttgggaggggcagacgggccgctttctaatctagggttaggtgcttttggtgatacgatcgccgctttgaccgtaggaacgagcggagcacttcgttttattactactcagcctcagttccatccagaaatggagacgttttgttatgttctggatcagaaacattgggtagtgggaggagcgactagcatggtgctggcatctttgattgggcagggcatacatttttacaggaagtcgttcatctgctaaagaaaaaggagaaaatccatatgatgcactgctttcggctatcgcttttgtgccagcgggtgccaatggtctgatttttcatccctatttacttggtgagcgagcaccgctttgggacgcagatgcgttatggcagttttatcggtttacagcggcaacatacagaaaaagaaatgatgaaggcgattctagaagggatctgtctcaacctttatcggattttaaaaggagtttgtccaggaaaatcagctcacagagatccgtgctacaggcggctattgctcaatctccgatattttcgtcagatgatggctgatgtactgggttacccgcttgataaaaccctactgtcacagaagcatccgcattaggagctgtgattttaggctggagaagcatcggaaagatccaaagtatcagtgaagcacaggaattgatagaattgaaagagcaagttggagtacaagaaactgatcataaaaaatatcagaaaatctatccattatttgtttcgacacaaaagcattttagcacagacttatcagcaatttgctcaactgcgagaagaattagctgattctgaaaa

SEQ ID NO: 21764 - DNA, 879 bp, Enterococcus faecium
atggcatatcaagcactttatcgagtctggcgttcgcagcgtttcgaagacatcgttggacaaaaagctgtgacacagacactaaaaaatgctattgtttcccacaaaacctcacatgcctacttgtttacaggacccagaggaaccggaaagacgagtgcagcaaagattttcgcaaaagcaatcaactgtccgaacagtaaagacggtgagccatgcaacgaatgcgaaatgtgtcgatcaattactgctggtacgcaagaagatgtgatcgaaatcgatgctgccagcaataacggagtcgaagaaatccgatttatccgtgatcgggcaaattatgcgcctacaaaggcagcgtacaaagtgtacattattgatgaggtacatatgctttcaacaggagctttcaatgccttgttgaaaacattggaagagccaaaagaaagtgtcatattcatcttagcaacgaccgaacctcacaaaataccagctacgatcatttcacggactcagcgatttgattttaaacggatcaatacggcagatattgtcgaacatcttgaatttatcttgaaagaatcgactatcagctatgaaccagctgcattgaatgtgattgcccgttctgcagaaggcgggatgcgggatgcattgagtattcttgatcaggcaatctcgtttagtgaaggaacaattactttagatgatgccatgcaagtgacaggtagcttaactgacgaaatgatggacagttacttgagtgcttgcgtgaaaaaagaagtaccagaagcattggaaacattgaaccaaattctcgcagccggcaaagaatcacgtcgctttctagaggatatgttacaatacatgccgttgacttgc

SEQ ID NO: 21765 - DNA, 2157 bp, Enterococcus faecium
atgagtcttaaaaatttacaagatgtcagttatttcaagctgaataatgaaatcaatcggccagtcaatggtcaaatccctttgaataaggataaagaagctttagttgccttttttgaggaaaatgtcaaaccaaatacgatgacttttccatctattatggaaaaaatcaattacttgatcgatcaagaatatatagaagcagaattcattcaattgtattcaccatcatttattgaaaagctatatcaatttttggacgagcaacatttttctttcaaatcttttatggctgcttacaaattttattctcaatatgcgttgaaaaccaacgacggttccgcttatctggaaacttatgaagatcgagtagccttcaatgcgctttactttgcgaacggggatgaagaattagcacttgctcttgcagacgaaatgatccatcaacgatatcagccagctacaccttctttcttgaatgctggacgtaaacgtcggggcgaattggtgtcttgtttcttgactcaagtcactgacgatatgaactctatcgggcgctcaatcaactctgctttgcaattgtcccgtattggtggcggcgtagggattactttatcaaatcttcgtgaagccggcgctcctatcaaaggatatgagggtgctgcaagtggtgtcgttccagtcatgaaattattcgaagatagtttcagctattctaatcaattaggtcagcgtcaaggagctggcgtggtttatttgaacgttttccatccagacattattgctttcctttcagcaaaaaaagaaaatgcagatgaaaagattcgcgtaaaaactctttctcttggcgtgatcgtacctgataaattttatgaattgacacgtaaaaacgaagatatgtatttatttagtccatatagtgtcgaaaaagaatatggtgtcccattctcttatgtaaatattacagctgagtatgatcatctagttgcaaatccaaacattcgcaaacaaaaaatcaaagcgcgtgatcttgaaaatgaaatctcaaaattacaacaagaatctggctatccttacgtaatcaatattgatacagcgaaccgcgagaatccaatcgatggcaagatcatcatgagtaatttatgttcagagattttacaagttcaaacgccttctgtgattaacggcaaacaggaatatgaagtattaggaacagatatctcatgtaacttaggctcgacaaatatcgtgaatttgatgcaaagccctaactttggtcaatctgtgcgtacgatgactcgtgcattgacatttattacagatgcatctgatatcgatgtcgtaccaccgatccaaaacggaaataagctgaatcatacgattggattaggtgccatgggcttacacacttatcttgcaaaagaacaaatggaatatggctcagaggattcattagactttacaaatatttacttcatgctgttgaattattggacacttgttgaaagcaacaatatcgctcgtgaaagaaaacaagttttccataattttgaaaaatcagcttatgctgacggcacttatttcgaaaaatacgtaactggagaattccagccaaaatcagaaaaagtcaaagcattgtttgaaggcatttttatcccaactgctgaagattggaatgctttgaaacaagcagtaatgaaagatggactgtatcatcaaaatcgcttggcagtagcaccaaatggctcaatttcatatatcaacgatacgagtgcaagtattcatcctatcactcgcatgatcgaagaacgccaagagaagaaaatcggtaaaatttattacccagcgccttatctatccaatgagacgattccgtattacacttctgcttatgatatggacatgcgtaaagtaatcgatgtttatgcaacggcacaacaacacgtcgatcaaggcatgagtttgactttattcatgcgttctgaaatcccagaaggcatttatgaatggaagacaacaacgaagcaaacgacacgtgatttgaatattttaagacattacgctttccacaaaggaatcaaatccatttattacgtacgtacctttactgatgatgcagaagaaatcggaagcaatcaatgtgaaagctgcgtgatc

SEQ ID NO: 21766 - DNA, 345 bp, Enterococcus faecium
atggcagaacaaatcacatcagctaaagcaactgcaaaaacagttcgcacttcacctcgaaaagcccgtttagtaattgaccttatcagaggtaaaagtgtcgcagatgcaatttcaatcttgaaattcacaccaaacaaatctgctggaatcattgaaaaagtattgatgtcagcagttgcgaatgcagaaaataactttgacttagatgttgaaaacttggtagtaagcgaagcttttgttaacgaaggacctacaatgaaacgtttccgtcctcgtgcaaaaggatcagcttctccaatcaacaaacgtacaagtcatatcacggtagtcgtatcagaaaaa

SEQ ID NO: 21767 - DNA, 915 bp, Enterococcus faecium
atgaaagacaaactgataattggaaagaatgctatagataccccgacggattttgaaactatccaagaaggaatcgattatttggcaggcctgccggatagccatccaaaggtcttgatagtaaaagaaggaagatatgatgaatatatagaaagcagattatccaattttaaacttgtgggagcaggaacagtagttatctccggtaatcgttttgcaaaacaggagtatcttgacggtagccagttagggactttccgaagtgctacttttttcttagaaggatcgaatgtcgtattagaaaatcttcacatcgaaaatacagcaggtccaggagaaaaggtaggacaggctgttgctttattcaattcaggagatcgcgtatctttaaaaaactgtcgactatctggttatcaggataccttatgcacgggtccgttgcctgatttgcaaaaagatggtactcctttttgtacaccggcttctgccaatcctgagtattgtcgtcagacctatgaatattgctggattgaaggaacggtggatttcatatttggtggggcagatgccgtttttcatcagtgtcatatccatagcttagccagtaaaaatcctggatacatcacagcagcatctacgccgaaaaatcaaaaaacagggtatcgttttgaaagctgtaccttgactgcagaacctgatactagaaacgtctatttaggaagaccgtggcgtccgtatgcaaatgtcttatttgaagcgtgtaagataggtgggcatgttcacccaactggttgggataattgggatgacaagaaaaatgaacagactgtcaaattctctgaacgtaataacaattatgaaacatcgatcaaaagacctgaatggatacatttagaaaagcagggggttcagaaa

SEQ ID NO: 21768 - DNA, 1175 bp, Enterococcus faecium
ctctcgcctactcctcgtgcttgtagaagttgtggttctactgtggtagatggaaacgggaaagcaattatagtgaaaaatgggaagaaggaaacgattgtccgttttgaacaatacaatcatatgcctttggttacgcgcctaaaaaagcaacgctatacctgtaaaaactgtcgtacccattggacggctcaaagttattttgtccgactcagccattcaatcgcagatcatgttcgatataaaattgcttctttactgactgaaaaagtatctttgtcttttattgcgaaaagttgtcaggtatctttgactaccgttattcgtacattgaaagagtttaaaagctatttaccaaagccttctaagaagattctccccagagtattgatggttgatgaatttcgttcgcacgcttccatagaagataaaatgagctttatttgcgcagatggtgaaacaggaaacttaattgctgtcttgcctacgcgtaaattacctcgattaacaagctatttcttaggctgcaccaatccagaagaagtagaattcttagtcacagacatgaacgccgcttacttccagcttaccaaacgtgttctgccaaatgcgaaagtagtgattgatcggtttcatattgtcaaacacatgaatcaggcactcaatgagttgcgtatccgtgaaatgaatgagcttcgtaaagcaggacagaaaagtcaggcagaaaaactgaaaaagaactggcgctttctgctaaaaaatcgtgcaagcatcaaccattatgagtacaaaacatggaaaagtttccgagcaccaaaatacccatttctcactgaagcaatgatgattgatcgattgcttgagttttctgcgcctctaaaggaggcgtatcccttttttcatgaattagtcgaagcctttcgagacaaagacctgacttatttttctccttattggcagaacttcccgaaacgttagatgacggctttcgggagaagcttcaaaaccttctgacctatgaagaaggtatcaccaacgcaatgatctatccttattccaatggaaaaattgaagcgaagaatacccacataaagacaatgaaacgagtatcctacggatttaaatcattcgagaacatgagaattagaatctttttgatcaatcaattaatcaat

SEQ ID NO: 21769 - DNA, 339 bp, Enterococcus faecium
gtgtcagaagaaagaatttatattcctaaaaaaggtgatattgtatggattgattttgatccctccgtaggaaaagaaattcaaaaaagacgaccaggactagtcgtctctcgttatgaatttaaccgtaaaacaatgttttcggtcatatgtccaattacttccactataaagaatttaccgacacgttactcattacctgaagagctagatataaaaggacaagtaattattacacaattaaaatctcttgattttaaggaacgaaaactcaaaaaaatagaaaacttaccattgcaagacatggctaaaattgatcagattatacagtatatgttt

SEQ ID NO: 21770 - DNA, 1065 bp, Enterococcus faecium
atgtatactataatggaaattatcaattatttatttggaggaatatccatgaaacaaaaaatcgcagttcttggtcctggatcttggggcactgctttagcacaaacattggcagaaaacgggcatgatgtccgtatttggggaaatgtacctgaacagattgatgaaatcaataagtatcatacaaatcagcattttttacctgatttgacgatcccagaatcgattatcggatataaagaattggcagaagcagtggataacgcagatgctattttatttgttgttccaacaaaagcgattcgttcagtcgcacaggaacttattggtaaaatgaatactaagccaatcattatacatgcaagtaaaggactagaacaagatacgcataaacgaatctcagaagttttggctgaagaaattccagaagaaaaaagacaggcaattgttgtattatctggtcctagccatgctgaggaagtggcagtacatgatatcacaacaattacagctgcaagtattgatcaaaaagcagcagcctatgtacaaaaactgttcatgaatgattatttcaggatttatacaaataatgatgtgattggcgtagaaactggtgcagcactgaaaaatatcattgcaattggtgccggcgctatccatggattaggattcggagatgatgcaaaagcagcaatcatgactcgaggattggcagaaatcagccgtcttggtgtcgcgatgggtgccaatcctctgacatttatcggtttgagtggtgtgggggacttgatcgttacttgtacaagtgttcattctcgcaattggcgtgccggtaacttgttaggacagggacataagctggaagaagttctagaaaacatgggaatggtcgttgagggtgtggcaacgacaaaagcagcagtagagctagctcaacagctaggtgttgagatgccaattactcaaacaatctataatgttttgtataatggagaagatatcaaaaaagcagcaaaagaaatcatgttacgtgacggaaaaatggagaatgaattttctcttcgt

SEQ ID NO: 21771 - DNA, 3624 bp, Enterococcus faecium
gtgaagagcttggctggacacgtagtaaaatacggaaaacatcgcgaacgtagaagtttcgcaagaatcagtgaagtgttggaattaccaaatttgatcgaaattcaaacagactcttaccaatggttcttagatgagggacttagagaaatgtttgaagacattttgccaatcgatgacttcaatggcaatctatctttggaatttgtagattatgaattgaaagaaccaaagtatacagtagcagaagctcgtgcgcatgatgcaaactactctgcaccattacatgtaacattgcgtttgacaaaccgcgagactggcgaaatcaaagcacaagaagtattcttcggtgatttcccattaatgacagaacaaggaacattcatcatcaacggggcagagcgagtaatcgtttctcagttagtccgttcaccaggtgtctatttccatggaaaagtcgacaaaaacggaaaagaaggattcggttctactgttatccctaaccgtggagcttggctagaaatggaaactgatgcaaaagacatctcttatgtacgtatcgaccgtacacgtaagattcctttaaccgtattagttcgtgcgttaggatttggttccgatgatacgatctttgaaatcttcggcgacagcgaaacattacgcaatacagtcgaaaaagacttgcataaaaacgcaagcgactcaagaacagaagaaggtttgaaagacgtttacgaacgtttgcgtccaggcgaaccaaaaacagcagacagctcacgtaacttgctgaatgctcgtttcttcgatccaaaacgttacgacttagcaaacgttggtcgttacaaagtaaacaaaaaattagatttgaaaacacgtctattgaatctgacattagctgaaacattagttgatccagaaacaggcgagatcatcgttgaaaaaggaacagttctgactcaccaagtcatggaaacactagctcctttcattgataatggcctaaattcagtgacttactatccatcagaagacggtgtggtcacagatccaatgactgtccaagtcatcaaagtattttcaccaagagaccctgaacgtgaagtaaacgtgatcggaaacggctatccagaagcagctgtaaaaacggttcgtccagccgacatcattgcttcaatgagctatttcttgaacttgatggaaggtatcggcaatgtcgatgatatcgaccacttaggaaatcgtcgtatccgttcagtcggtgaacttttacaaaaccaattccgtatcgggctagcacgtatggaacgtgtggttcgtgaaagaatgtcgatccaagatactgaaacattgacacctcaacaattgatcaatatccgtccagttgtggcaagtatcaaagaattctttggttcttctcagttgtcacagttcatggatcaaacaaaccctcttggcgaattgacacacaaacgtcgtctttcagccttaggacctggcggattgactcgtgaccgcgccggttatgaagttcgtgacgttcactactcccactatggccgtatgtgtccgatcgaaactcctgaaggcccaaacatcgggttgatcaatagtttgtccagttatgcgaaagtaaataaattcggatttatcgaaacaccttatcgtcgtgtagaccgtgaaacaggtcgtgttactgaccaaatcgactacttgacagctgatatcgaagaccattacatcgtagcccaagcaaacagcccattgaatgaagatggaacatttgctcaagacgttgttatggctcgtgctcaaagtgaaaacttagaagtatctattgataaagtagactacatggacgtatcacctaaacaagtagttgccgttgcgacagcatgtattcctttcttggaaaacgatgactccaaccgtgccttgatgggtgccaacatgcagcgtcaagcagtgccgttgatcaatcctcaagcaccatgggttggtactggtatggaatacaaatcagcgcatgactcaggagctgctttgttatgtaaacatgacggtgtcgttgaatacgttgatgcttctgaaatccgcgtacgccgcgacaacggtgcattagataaatacgatgtaacaaaattccgtcgttcaaactccggaacaagctacaaccaacgtccaatcgttcatttgggtgagaaagtcgaaaaaggggatactctggcagacggaccatctatggaacaaggcgaaatggctctaggccaaaacgttttagttggtttcatgacttgggaagggtacaactatgaagatgcgatcatcatgagccgtcgtttggtaaaagatgacgtatacacttctatccatattgaagaatatgaatcagaagcccgcgatacaaaattaggacctgaagaaatcacacgcgaaatccctaatgtcggggaagacgcattaaaagatttagacgaaatgggtatcatccgtattggtgcagaagtccaagatggcgatttgcttgtagggaaagtcacgccaaaaggggtaacagaattatctgcagaagaacgtctattgcatgcgatctttggcgaaaaagctcgtgaagtccgcgatacatcattacgtgtaccacatggcggcggcggtatcgttcacgatgtgaaaatctttactcgtgaagctggagatgaattgtcaccaggcgtaaacatgttagttcgtgtttatatcgttcaaaaacgtaaaatccatgaaggggataaaatggccggtcgtcacggaaataaaggggttgtatcccgtattatgccggaagaagatatgccattcctacctgatggaacaccaatcgatatcatgctgaatcctttaggggtgccttcacgtatgaacatcgggcaagtattggaattacacttgggtatggctgcacgtcagttaggtatccacgtagcaacgccagtatttgatggtgcaagtgatgaagacgtatgggaaacagttcgtgaagccggtatggccagcgatgcgaaaactgttctgtacgacggacgtacaggtgaaccatttgatggacgtgtgtctgtcggtgtgatgtacatgatcaaacttgctcacatggtcgatgacaaattgcatgcacgttcaatcggaccttactcattggttacacaacaaccattgggaggtaaagctcaatttggtggacaacgttttggtgaaatggaagtatgggcactggaagcttacggtgcggcttatactttacaagaaatcttgacatacaaatcagatgacgtagtcggacgtgtgaaaacatacgaagcaatcgtcaagggtgaaccaattccaaaaccaggtgtaccggaatcattccgcgtattggtgaaagaattgcaatcactaggtctggacatgcgtgtcttggatatcgaagaaacagagatcgaacttcgcgacatggacgatgaagacgacgatttgatcactgttgatgctttgacaaaatttgccgaacagcaaactgccaaagaattagaaaagaaagctgctgaacaagtggaagatgaaaaagacgatgtcatccaaaactttgaaaccgcagaagataatttagac

SEQ ID NO: 21772 - DNA, 1371 bp, Enterococcus faecium
atggataaattgttgaatttgtttgtgtcaatcgtcagtcagccctccatcctcgtttctttgattgcactgcttggtctcgttcttcagaagaagaaattttcagaagtgatccaaggaactatcaaaacatttgtcggattcctagtactgatcggcggtgctggtttaatcagtaattcactaaccccttttgcttcgatgttccaaacagctctgcatactcaaggagtagttcctagcaatgaagcagtagtggcgattgctttgcaacaatacggtacacctactgctttgatcatgctagtagggatgatcgtgaatattttacttgctagattcacaagatataaattcatttttcttacaggtcaagcaatgctttatgtttcttgtctaacagcagtcattttagtaagcgcggggtttactgcaaatttgtggatgatcttattaggcggggtcttcgaaggaacactattaactattacgcctgctctttgtcaaccgtttatgaagaacatcactggaaacaatcaagttgcgttagggcataccggaaatatcggttatgcttctagtggatggatcggaaagttttttggaaacaaagaccgttctacagaggacataaagattcctaaaagtttcagctttttgcgagattctactgtatcgatcatgctcttgatgtcgatcgtatatgtcgcacttgctttgttagctggtcctggatttgttgaaagagaactaagcaatggagacaacgctgtaatctttgcactgatccaagctggaacattcacagctgggtttgttatcgtccttcaaggggttcgaatggtgttggcagaaatcgttccagcattccaagggattgctaaaaaactcgtacccgattctaaaccagcattagatgttcctatcgtttttccatatgcacctaatgctgtattaattggcttttttgttagcttctttgtaggaacactatccatgtttgctatgataggcttgcaaactacagttatcattcctggggtagtaggacatttcttctgcggagctgcttctggtgtcttcggcaactcgactggcggtagaagaggggcggtattaggttctgctttcaatagcttattgattagttggctgccattatttatccttccagtattaggagatcttaaaatcgcttcttctacatttgccgatactgattatctagtaccaggacttgtacttgggaaactaggagaatacggtcaaatagccttgacagttggaatcatcgctttctttttacttgtcgtattatctagctttctttttgccggaaaaagaacaaacattgtttctaaagaacagaat

SEQ ID NO: 21773 - DNA, 756 bp, Enterococcus faecium
atgacaaaagaaattatttcatctaaagatcttcatctgtattatggaaagaaagaagcactaaaagggatcgatctaagtttcaatcaaggggaaatcactgcgatgatcggtccttctggttgcgggaaatccacttatctgcgttctttgaaccggatgaatgacctgattccgaatgtaacgatcaccgggagtgttttatataaagacaaagacatctatggtccaaaaacagatgttgttgaactaagaaaagaaatcggcatggtattccagcagccaaacccatttcctttttctatctatgaaaatgtcatctatggattgaaattaaaaggggaaaaagataaaaaagtccttgatcaagtagttgaagaaagcctgaaggcagcgtctgtttgggatgatgtgaaagacaaattgcataaaagtgctttatctttatccggtgggcagcagcagcgtgtatgtatcgcacgtgttttggcagttaatccggaaatcatcttattggatgaaccaacaagtgcgcttgatcctgtttctactgggaaaatcgaaagtatgctgttagaattaagagagcggtatacgatgatcatcgtgacccataatatgtctcaagcttcacgtatttcagataagacggcattctttttagatggtcacttgatcgaatacaatgatacgaagaagatattcatgaatccagaaaaacaagagacagaagattatatttcaggtcgatttgga

SEQ ID NO: 21774 - DNA, 1152 bp, Enterococcus faecium
atgtatcaactaactttgccgcaaaaaatcatttacggcgatcaagcaatcaaggaaacaggaaaaatcgctggtaaccttggtttgaaaactttgattattacagataaactaatcgtctctttgaaccttttggaaggtgtgcttgccagcctaaaagaggaaaatctgacctggaaaatttttgatggcgttgaccgcgagccaacggaccagattgtagctgaagcattagctttttaccaacaggaagattatgattcgattattgcggtgggcggtggcagctgtatcgacactgctaaagctgtggctgtgttaatcaataatagtgggtcctatgctgaatttgctagtggccaactgattgcccaaaatccactgcctctaattgcaatacctacgactgccgggactggctccgaagtgacagatgtgaccgtaatcacagatacgcaaaaagatattaaatatatgatgaaacaggctgcttttttatcctatgcagcgattgttgatccacaaatgagtcgtacaagtccagcatcagttacagcagcaaccggactagatgcattatgtcatgctttagaaagttatatttctaaaaaagcccagcctattacaaggctcttttcactttcagcaataaagttgattatggaaaatttaccgattgcctatagcgagccggaaaacttaatagcccgtgaaaacttggcgcaggcagcaatggaagcgggaattgccttttcaaatgcttcggttaccttgattcatgggatgtcaagacctgttggcgctctgtatcatatccctcatggcatttccaatgcgattttattagaggcggtgattgattacacaaaacctgtaatcatctcggagttggctggtattgcgaaatatcttaatcctgaaaaagaaggtacggatcaggagttggcagagtgcttctttcaagaattgcaggacttgattgagaaattagctgttcccaattacgcaagttttggtattgaaaaggcagcttttattgcatctttggataaaatggcaaatgatgcaattgccagtggtagccccaataacaatcctttggtaccaacaattgaggaaataaaaatgatttatttagctagttggcaagaa

SEQ ID NO: 21775 - DNA, 345 bp, Enterococcus faecium
atgaatccattaatcgaagaattaacaaaagaacaattacgttctgacatcccagcgttccgccctggtgacactgtgcgtgttcacgcaaaagttgttgaaggtactcgtgaacgtatccagttatttgaaggtgttgttatcaaacgccgcggtgctggaatcagcgaaacttatacagtacgtaaagtttctaacggagtgggcgttgaacgtacattcccattgcatacaccacgtgttgcaaaaatcgaagtagttcgctacggtaaagtacgtcgtgcaaaattgtactacctacgtgcattacacggaaaagctgctcgtatcaaagaaatcagaaga

SEQ ID NO: 21776 - DNA, 1578 bp, Enterococcus faecium
atggcaaaaaacgaactgactttggaagaactggcaaaacaaatttataaaggggcaggcggcatgggcaatgtagaaagcattgtccactgcatgactcgtgtgcgtatgaagatcatcaatgatgatcttgtaaatgtctctgaattaaaagcgattccaggagtgcttggtgtagtagaagatgaacagcttcaagtcatcatcggacctgggaaagtgaacaaagtagcacagcaaatggttgatttggcaggcgtgaaattaggagaaaaactttcttctgtaagtacagctacagcaaattcatcagcatctggaaaagaccgtgtaaacgaacgggcacaagaaatgaaagcggcacaaaaatcgaaacaaaaaccatctaaaatcaaatcggtattaaaagacatttctaatatctttgtgccaatgattcctgcatttgtcggtactgggatcgtggcagggattgccgcagttttagcaaacttagtcacagccggaacacttgatgcagcaacatggcaacaatatatcgatgtgatgaacatcttgaaaaacgggatgtttagctacctagttatctatacaggtatcaatgctgcacaagtttttggtgcaacaccaactcttggtggagttatcggggccgttgtgatgctgacagggatgaatccggaagcaccactgaaaaacttatttactggtgaagctcttgcagctggacaaggtgggatcctaggtgtcatcttcgctgtttggctattgtcaatcgttgagaaaaaactgcataaagtagtacctgatgcggtagatatcatcgttacaccaactctttcattgattgccatcggtctgattgaaattttcttcatcatgcctttagcaggtttcatttctgatggcatggtcggtgggatcaactgggtacttggcgttggtggagcatttgccggcttcgttctaggcacattattcttgccgatggttatgttcggactgcatcaaattttgactccaatccatgtgcaaatgattgatgaaactggtcgtacgctattgcttccaattcttgcgatggctggtgcaggacaagtgggtgcagcattggcattatggattcgctgcaaaaaagataaagaattaacagaaatgatcaaaggagctttaccagtcgggatcctaggaatcggcgaaccattgatttacggagtaacattacctctaggacgcccatttattactgcttgtatcggtggaggtatcggcggggcagtgatcggaatgatcggaaatgtcggggctatcgctattggaccttcaggagccgctttgatcccattgatctctgacggtaaatggttaggctacatccttggattattggcagcttatgctggtggcttcgttgctacattcttcttcggtattcctaaagaccgtttagaaaaagaagaattagcgactgaaacagccacagtaaatgaagtgcctgaaaaagtagtacctcaaacttcagctgaaagtgtgactatcctctcatcagttgctgacggaacagttgtttctttagca

SEQ ID NO: 21777 - DNA, 726 bp, Enterococcus faecium
atgattggacagacgttagaagattattgtaaaaagcttcgattaagccatatcatcacgaacataccaagagcttctttcgaagctccagaacaatttattaccgatttattccgtttagaactggagaccagacagcagatcaaattagaacggatggaaaaattagccaaatttcctgtaccaaaatcgctaaagaactatgaatggcacgaagatatttttctaccatctcatctagataaggagacccttgtctctcttgattttctaaaaaggcaagaaaacattgtttgtgttggctctcctggtacagggaaaacacatctagcgatcgcattagggagaaaagcctgtagtgaaggtgtttcaaccaaatttttccgagttaacaatctcgtagagcaattagagaatgcattaaaaaaacaacagctagccagtttcaagaagcgattcgaaacaacagaattaattattcttgatgaaatggggtacttaccattgacaaaagaaggagctgaacttctcttccaactgatttcagattggtatgagcaaaagagcattattattacctctaatttagaattcagtcaatggaatcgagtgtttatggattctcgattaacagctgctctcgttgatcggctaatccatcacgctcacattatcagcttcaaaggcgaaagtttcagattgaaaaattcattatctaaatcatat

SEQ ID NO: 21778 - DNA, 1041 bp, Enterococcus faecium
atgtctctacaagcacaattacagagcttgaaagaagcaacgctcgtcaaaatcacagcggcacaagatttaaatgaattaaatcaaatacgtgttgaaacgttaggaaaaaaaggaccgatcacagaagtattacgtgggatgaaagatctaagtccagaagagcgaccaaaagtcggaagtttcgcaaatgagatccgagatcttttgacagaagagatcgagcgaaaaaaacaagtattagaagaagaagcgttaaatgcagctttggcaaaagaaacaatagacgtgacactacctggtagaaaagtaaaacatggtacacgtcatatcgtgacacaaatcatggaagaaattgaagatatttttgtgggtatgggctatcagatcgtagaaggatatgaagtagaatctgatcattacaatttcgaacggatgaatctgccaaaagatcatccagcaagggacatgcaagatactttctatatttcagacgagatattgattcggacacatacttcaccagtccaagcacggacaatggaaaaacatgatttctctaagggtgctctacgaatgatctcgccagggaaagtcttccgcagagatacagatgatgcgacccacagtcatcagttccatcaaattgaagggctagttgttgataaaaacatcacaatgggcgaccttaaaggaacattagaagtcgtaatgaaaaaaatgtttgggaaagatcgtgaaattcgtttgcgtccaagttatttcccatttacggaaccatcagtagaagtagatgtcagctgtttcaaatgtggtggtgccggttgtaacgtatgtaaatacactggatggatcgaaattttaggagctggcatggtacacccgaatgtgttgaagatgtcaggaatcgatccagaagaatattcaggctttgctttcggccttggaccagaccgcgtagctatgttgcggtatggagtgaatgatatccgtaatttctatcaaaatgacttacgtttcttaagtcagttcaagggggag

SEQ ID NO: 21779 - DNA, 303 bp, Enterococcus faecium
atgacagaacataaccattcccacgaccatgaaggacacgaacacatcacattggtggatgaccaaggaaatgaaacattatatgaaatcctactaacagttgacggacaagaagaatttggacgtaactatgttcttttatatcctgctggtgtttcagaagatgaagatgtagaattacaagcttatgcatacatcgaaaacgaagatggaacagaaggcgagttagaacaaatcgaaacagacgcagaatgggacatgattgaagaagtattcaatacattcatggcggaagaagaagaa

SEQ ID NO: 21780 - DNA, 985 bp, Enterococcus faecium
tccatgcgtgccatttcaatcaagcatcctggttctgtagatgtattagaacaaattgaagtgcctgttcctaaaccaaaacaaggcgaattactgatcaaagtccatacagcagctgtcaatcgaacagatattatgaaaagagaatcagtctctttgaaacctccctaccctattttgggagtcgaagtagctggagaggtagttgagaataaaagtgatatctccacttttactcctgggacaaaagtatacggattagtcaatctaggtggttatgccgaatatgctgtgatgcctgccgatcgtgcaatccttctccctgatacgctagactatgtttctgctgctggaatctcagaagtttttttgactgcttatcaaacactttactggcttggaaaattacaagaaggcgaaactgtcttgatccatgcaggagcaagtggtgtgggaacagcagcgatccaattagctagacagctttctcacgcgaaaatcatcgttactgcaggatcagaagaaaaactcgccttttgtaaagaacttggtgcagatgaattgatcaactataaaaaacaagactttcaagaagaggtacgaaaaatcactgaaggtcggggagtcgatgttattttggatttcatcggcgcttcttactgggaaaagaatttagcttctatagccgttgatggacgttgggtcttgacttggtatgctaggtgggaccatcgtgcctgagatagaccttggtgtattgattgggaaacgtgtccaactgcttggtacattattgacacctagaagtgatcagtataaagcagagctcgcacaaacttttatgcaaaaagctgggccttttctagaaaatggcaagattcggccaatcattgaccgtacattccaattcagcgcagtcaaacaagcgcatgaatatatggaagcaaacaaaaacatcggaaaaatcattttgaagataactgaa

SEQ ID NO: 21781 - DNA, 1453 bp, Enterococcus faecium
atgaatgatgcaacagaattagcaaaagagcttaaagaaaaagaatttagttttcaagaactagttacggatatacagaaaaaaataaagaagcaaaatcatgaattgaatgcgtttgtcgcgcttgaaccattcgagagtaattcccacgagctattgattccccagtcagaaaaagggccattggctggtatcccatttcctttaaaaatgctcggtcaagaaaaaaagggatggctagctacttcaggatctcgtttatttgaaacacaccgagcttctcatacatctaattatgtgcggcaagcagaagcgataggtctagttccttttggacaaaccaatgcgccagagtttggtttcaaaaatattacagacccagtcatctatggcccagcaagaaacccttggaaccttgaatgtacaccgggcggatcaagtggaggagctgctgctgcagtttcatcaggaatcgttcctttagcctggtgctagtgatggcggtggttctattagaatacccgcttcgttttgcggattgattgggctgaaaccttcgcgagggacgatgccagttggtccatatgcttggagaggatggcaaggagctgctattgatttcggcttgacagtttctatgagagacacggaggctttattttatgggatgagaagtatccattccggtgcgccatatcaagtatcgccagttgagtggcaaacacatccaagaaaaaaacggttgaagatagctttttgtgttgattcaccgatccactcacagattagtgaagaggcagtacttgctgtaaaaaaagctgtagatttccttggaaaagaagggcatgatttgacagagattccttacccactagatggtcgtaaactgatcacgtcttattatcagatgaatggcgcagaaacagcagcaatgatccgctcgattgaaacaggcatccagcgagctgtcagaaaagaagaacttgaacccatttcttggactttgttccaatatggtcagaagctctctgccgctacttacatcgattctctgcatgtatgggatgaagcagcaattgtcatggaaaacctacatcaagaatacgatctattcctttcaccaacgactgcatttaccgcccctaaaatcagcgaagatttgcaaagtgatgcgataagagcacagatggaacacatcagtgattgttctgaagtagaaggtttagacgttgtttcttccatgtttgaggagagcttgaagatcacaccttatacacagttggctaatctgactggacaaccagcaatcagcttgcctactcatttgacaaaagaaaacatgcctctaggaatccaatttatggctgccagaggaagagaagatttgctatttcaaatcggctatctatttgaagcaaatcatcagttccatttaccaaatccatggaaatag

SEQ ID NO: 21782 - DNA, 882 bp, Enterococcus faecium
atgaaagtatctcaaaaaatcatattatctattttgttactgcttacattagtagttggctatttttcgattgagtttatccatggattttcgtctgcaaaacagagttcaactgtgaaaaaggtagagccgaaaagtgtccctaccacactaaatgtggctttgattggttcagatgctcgttcgaaagacgaaaacggtcgctcggattcacttctggttgcacaatacaaccagaaaacacaacaagcaaaactgatctctatcatgagagattcatatgtcgatattccaggttacggaatgaataagataaatgcagcttactcttatgggggagttgatttattaaatcaaacattaaaggaaaatttcaaatttgaagctccctattatgcaagtatcacatttcaagattttatcgattgcgttaatgaactgtttcctggtggagtcaagatcgatgcagaaaaatctctagatttagatggcgtatatataaacaaaggagagcaagtgatggatggtaatactttactccagtatgctcgatttcgggaagacaaagaaggagacttcgggaggatcagaaggcagcagcaagtgatcaaagctatctctcagcagctgaaagacgtaacttcaatattcaagctacccaaagcggttgggaaattacttggtagtatccaaacgaaccttccagaaagtgtgcttctggattgtggtatggatttcctcaaagacaataataaaaagatcgatacattatccgtaccagtagacggcagttgggacttcaacgacaatacgccttccggaagtgttctggaattagatttgaccaaaaaccaagaagcaatcaaaaaatttctgaataat

SEQ ID NO: 21783 - DNA, 1131 bp, Enterococcus faecium
atggatattatgtttttagctttttcattatcttcaatgattacttcttttcatattagtggtacgcaagcgggtttcatttcaacgatcactaatttggggatgctcattggaggtattttttttggcatcatagctgataaatatggacgtgtgaaagtattttctcaaacggtccttctgttttcgattgcttctttattgatgtattttgcttcaaacatctacttggtttatctctttcgctttatcgcaggtgtaggagcgggaggagaatacggggcgtgtatgtccttgatttccgaaagtttttcaaaaaaacaaattggacgagcttcttcggttgctggtattggtgcgcaggtcggtgcggctttggctgcgattttagctgctgtgatcattccaacgtttggttggaagatgttgtatgtcgtaggtgtactgccggtgttgatggtcttgttcattcgtcgcggcttgactgaaccaaaggaattcaaatctgtacaatctgccgaaaagaaaaccaaacttagcagactgtttgaatcaaaacatcttgcttggcaaacatgtggccttagtatcatggtaactgtccaaattgccggctattttgggttaatgaattggctgccttcaattatgcaaaatcgattagggctttcggtttctgggtcttcattgtggatggtcagtactattttaggcatgtctttggggatgatgacttttggcataatcatggataaattggggcctaaactagccttttctttgtttttaatttgttcatccttatctgtctatctacttgtgttagcccatagccagtggagtttggtagcagccgctgtgatagtcggctactttatcaatggcatgtatggtggatatggcgcagtgattagtagtttgtatccaacagaaatccgcgcgacggcgaataatttcattatgaaccttggacgagctgttggtggtttttcttctatcgtcatcggtttcttgatggatcattatagtttaactgccgtaatcttgtttttgagcggtatttacctagtcagtctgctggtcttgacaactcttactggtgttacagcattaagggaaagcttgcagcat

SEQ ID NO: 21784 - DNA, 1257 bp, Enterococcus faecium
atgaaaaaaagaagtgtgaaacagttgggtttagggttaatctctttaggaatcttaggcggattagcggcttgtggcaatggtaactcttcagcagaaggggaagccgatgaaggaaaaacgttaacagtttccgttgattctggatataaagattatataaacgaaataaaaaacactttcgaaaaagaaaacgatgtgaaaatcaagctagtagaaaaggacatgttcgatcagttggaatcattagcgttagatgggcctgctggaaagggacctgacgttatgatggcagcatatgaccggatcggtgcgttaggacagcaaggacatctggcggaagtaaaactgggaaatgaagcagcttacgatgaaacagacaaagcccaagtgacttatgatggaaaaatctacggagaacctgcagtaatcgagacccttgttttgtactataacaaagatttagtcgatacagcaccatcaacgtttaaagatttggagaatctatccaaagacagtcgttttgcttttgagtcagaagcaggaaaaaatacaggatttttagctaaatggactgacttttattattcctatggtttaattgcaggttacggtggctatgtatttggtgatgatggcacaaatccttcagatatcggtttgaataatgcaggtgctgtagaaggaatctcttatgcaacagattggttcaaaaatgtttggccaaagggaatgcaagacataaaaagtgcaggagacttcgccagccagcaattcatgtccaataaaactgcagcaatcattgacggtccatggcaagcgcaaacatacaaagaaaacaatatcaattatggtgtagccaaaattcctactctaaataatggacagccttatcaaccgtttggcggaggaaaaggatgggtagtcagcaattatgctaaaaacaaagacctctctcaaaaatggcttgattatgtaacgaatcaggaaaatcaagaaaaattctttgaaatggtaaatgaaatccctgcaaaccaacaagctagggaaacagcaaaggctaaaaacgatgaattaacaacagctgtgattgaacaatatgaaacagctcaagcgatgccaaacatcccagaaatgggcgaagtttggacaggtgcagaaaacttgatgttcgatgcagcatcaggttcaaaaacaccaaaagaatctgcagatgaagcagtaaaaacaatcagtgaagccatagaacaaaaatac

SEQ ID NO: 21785 - DNA, 1105 bp, Enterococcus faecium
gaagaattacaatgtatcggctgtggtgccgttatacaaacaaacaaacccggtgaattaggatacacgccgcaaacggctttggaaaaaggtttagcttccggggaagtctattgtcagcgttgtttcagattacgccattataatgagatccaagatgtctcattgacggatgacgactttttgcgcttactgaatgaattagggcaaaaagatgcattgatcgtcaatgtggtggatatttttgacttcaatggttcactaatcccaggactacaccgttttgtcggtgacaatccagtacttttagttgggaacaaagtggatatattacctaaatcattgaaaaaaactaaattaacacaatggatgaaggaacgtgcttacgaagcaggaattcgtccagtagatgtattattaactagtgctaagaaatctcatgagatgacggaactattagaaaaaatcgaagaataccgcgatggacgggatgtctatatcgtcggagtaacaaatgtcggaaaatcgacgcttatcaatcaaatcatcaaaaatacagcgggagtacaagatgtaatcacaacttcgcagtttccaggaacgacctggataaaatcgagattcctttaatgacgggcattttttgattgatacaccgggaattatccatcgccatcaaatggcgcactacttaggtaaaaaagatttgcggatcattgcaccgttaaaagaaatcaaacctaaagtttatcagctgaatgaagggcaaacacttttcttgggcggacttgcaagatttgattttatcagcggcaatcgtgcttcatttattgcttatgtgtcaaatgatgtaaatattcatcgaacgaaactggaaaaagcagacgaattttatcaaaaacatgtaggtggattattacagcctcctcgtcctgatgaagtcgaggcatttccggagcttgttcgttttgagttttctgtgaaagaaaaaacagacatcgtttttgccggtctaggctggatcactgtaacagcgccagtagtaattgcgggctgggcgccaaagggtgtagatgtattgaaacgcaaagcattgatttaagga

SEQ ID NO: 21786 - DNA, 213 bp, Enterococcus faecium
atgaattatatcgcagcagcaatcgcaatcatgggagcagcaatcggagccggttatggtaacggtcaagttatctctaaaacaatcgaatcaatggctcgccaacctgaaatgtctggtcaattccgtacaacaatgtttatcggggtagctctagtcgaagctgttcctatcttaggggtagttgtcgccttgattctagtttttggtgtt

SEQ ID NO: 21787 - DNA, 2643 bp, Enterococcus faecium
atgcctcaaaaaactaaaaatactcctatgatggaacaatatctaagcatcaaggcccaataccaagatgcttttttgttctatcgtttaggagacttttatgaactattttacgaagatgcgatcaaagcgtcacagcttttggaattaacgttgacgagcagaaatcgaaatgcagaagaacctattcctatgtgcggtgtacctcaccatgcagcacaaggatatatcgatgccttgattgaaaaaggctataaagtagcgatttgcgagcaggtagaagatccaaagacgactaaagggatggtcaagcgcgaagtgatccagctagtcactcctggtacagtcatggacagcaaaggattgtcggcaaaagacaacaattttttaacagctgtagttagtcaaggaaatgaatttggctttgcttatgccgatttaagtacgggagaattgaagacggctcggttgcatgatgaagaagctgttttaaatgaagcctctgcattgcagacaaaagaactcgtattaggcagtgagatcactgatacccttcgtgaacagctaagcgggcgtttagggctagtcttttctcaacaaaatgagatggaagaaaacgcggaatttagctttttgacaagcgaactagtcgatccgctggaaaaagaagcaaccggcaaactattgacttatttatcggtgacacaaaagcggagtttagctcatatccaaaaagcagtagaataccaaccagatcattttttgaaaatggattattattcaaaattcaacctagaattaagccaatctattcggactgggaaaaagcacggcactcttctatggttgttagatgaaacaaaaacagcaatgggtggccgtttactaaaacaatggctagaccgtccgcttatccaggcaaaacaaattaaagcaagacaagaaatggtcgcttctttgctagacagctattttgaacgtatcgatttgcagtcagcattaacgaaagtctatgatctggaacgcctagcaggtcgagtagctttcggtaatgtcaatgggcgagacttgatccagctgaaaacttctttagaacaagtgccaatgatcagagggttgattgaaggaatcgatcaaggtcaatggcaaagtctgctttcagaaatgcagccgatggaccatctcgtccaattgatcgaccaagctatccaagatgatccgccgttacaaataacggaaggaaacatcatcaaagatggattcaatgagcagctcgatatgtaccgttctgctatgagaaacggaaagaaatggttggcagaacttgaagcaaaagagcgtcaagaaacaggaatcaagaacttaaaaatcggatttaaccgcgttttcggttattatatagaaattacaaaagcaaatcttggaaatgcagaactggagaagtatgaacgaaaacaaactttagcaaatgcagagcgtttcatcacaccagaactaaaagaattggagacacaaatcctcgaagcagaagaaaaatctgttgatttagaatatcagttgtttttagctgtgagagaagaagtcaaaaaggctatccagccgctacaagtacttgcaaaagcaatcagtgcagtagatgtgctacaaagttttgcaacgatcagcgaacgctatcagtatgttcggccagaacttgtcagtgacaagcatcagcttctgatcaaagacggacgacatcctgtagtagaaaaagtattaggacatcaggaatatatccctaacagcgtagaaatggcagaagacgaaatgatcttgctgattacaggaccgaatatgtctggtaaaagtacgtatatgcgacagttggcattaactgttctgatggcgcaaatgggctgtttcgttccggcaaaacaagcagttttacctatttttgatcggatttttacccgaattggtgcaagtgacgacttaattgctggacaaagtacttttatggtagagatgatggaagccaatcaagccctgcgttatgctacgccaaacagtttgattttgtttgacgaactagggcgaggaacagcaacctatgacggaatggcgttggcccaagcaatcatcgaatatatccatcgtcatgtacaagcaaaaacactcttttctactcattatcatgaactgacggtacttgagaaagaacttccgcagcttaaaaatgtccatgttggagccgttgaaaaagacggagaagttgtcttcttgcataaaatgatggatggacctgcggataaaagctacggcatacatgtggcaaagatcgcaggattgccttccaatctactagaacgagcagcagatatcctgcatacgctagaaaatggcgataacggacaccatactgttccagctgaagtagaagagaaaactaaaacagccaaacaggagcaaataaaaccacctgcagaaaaagtaaatcaagaccatatacaagaccgtgtaaaagaagaaaaccaacagctttctttattcagtgaattatccgaaaatgaaacagaagtcattgaatcactgaagcaaataaatttactagaaatgacgccaatggatgcactaaacacattatatgaattacaaaaacaactg

SEQ ID NO: 21788 - DNA, 1167 bp, Enterococcus faecium
atggcatttgaaagcttaactgaacgtctccagcaggcgatgggaaaaataagaaaaaaaggaaaagtatcagaagctgacgtaaaagaaatgatgcgggaaatccgccttgccttactagaagccgatgttaacttgcaagtagtcaaagattttactaagcgcgtacgcgaacgtgcggtaggggcagaagtgctggaaagtttatcacctgcacaacaaatcgtaaaaatcgttgatgaagaattgacgatcacacttggttctgaaacagcagagttaaataaatcaccaaaaataccaactgttatcatgatggctggtcttcaaggggcaggtaaaacgacctttactggtaaattagccaattatttaaagaaaaatgaaaatgctcgtccgctcctaatcgcaggggacgtatatcgaccagctgcgatcgaccaattgaaagtattaggtcaacagctagacgttcctgtatttgatatgggaactgaagtcagcccggtagagatcgtccgtcaagggatggagttagcaaaagaaaagaaaaacgactatgtattgatcgatacggcaggacgtctgcatatcgatgaaacattgatggatgagttgaaacaaatcaaagaattgacgcaaccaaatgagattttgcttgttgtcgatgccatgactggtcaagatgccgtcaacgtagctgatagcttcaaccagcaattaggtattacaggggtcgtcatcactaaacttgatggggatactcgaggcggggcagcactatcgatccgctcagtgacaggcgcaccaatcaaattcatcggttctggtgaaaaattgactgacttagaagtattccacccagatcgtatggctagccgtatccttggtatgggggatatgctgacattgattgaaaaagcgcagcaagactacgacgagaaaaaagcggaagaacttgcacagaaaatgcgggaaaattcattcgatttcaatgactttattgaacagcttgatcaagtgatgggtatgggcccactggaagatctaatcaaaatgatcccaggaatgaatcaagtccctggaatcgaaaacgtcaaggtagatccaaaagatgttgaacgcaaaaaagcgatggtttattctatgacgccagcagaaagagca

SEQ ID NO: 21789 - DNA, 762 bp, Enterococcus faecium
atgatcgatctacattgtcatatcctaccaggaatcgatgacggggcggaaaacctagaggcaagtatcgcaatggctgaaaaagcgattcagcaaggcatcacgcatattttatgcacgccacaccacaataatggaaaatacagcaatgaaaaatcacaagtcatttctctagtcgcttcgttacaagcagaattagagaaaagacaattgcctttgacgttattggaaggacaagaagtacgtattaccggaacgctcatcgaagacacccatcgagataaaattttatttacagatttagatgatacatatcttctgatcgaatttccgacactggaagtgccgttatatacagaacggcttttttttgagttattagaactaggaaagacaccagtgatcgtccatccagaacgcaatgcgcattttcgtaaagacccgaatcatttgcttccgttcctagatatgggatgtttggcccaacttactgcgccgagttatgttggtgtatttggcaaagacatccagaaaacagccaaaacgatggtcaaacataatctcgtgcagatggctgcttctgatgcccatggggtctctaagcgtaccttttacttaaaagagtgctatgagcagattgccaaggactttggtaaggaaaaagtagtacagatgaaacaagttgcaaaggatctgatcaacggggatgaaatcagttatccaatctatgaagaggtaaaaaagaagaagtttggtttattt

SEQ ID NO: 21790 - DNA, 567 bp, Enterococcus faecium
atgacaagcctcatcgaaaaacaaatcgtcaataaagagattcgagtaacggatccgctctttgaagtgatccatcagatccaagctgaaaacgaagagcctttagcagcgctgaatactgggtaccatgaaccagcagatatccgcaaacggctagaaaatatcattagtgacaaagtagatgatacggtgactgttctgctgcctttttatacagatttcggcaaacatattagtatagggaaaaatgtctttatcaatcgtcaagtgatgttcgttgacttaggtggcatctgtttagaagattcagtattgattggtcctcgtgtcaacctcatcacggtgaaccatctaaccgatccaaaagaacgaagaggcttgtcagtaaagccaatccacatcaagaaaaatgcttggatcggagcaggagcaactattctgccaggcgtaacgattggcgagaatgccattgttgcagcgaatgcaactgttacgaaagatgtcccagacaataccatcgttgcaggaatccctgccaaaatcgtcaaacctgtcgaacggattatt

SEQ ID NO: 21791 - DNA, 1023 bp, Enterococcus faecium
atgaagaaagtagcaatcataggcgctggacaagtagcagaaaaagtacatgctgcttattatcaaaaaagatcagatgtcttagaattggccgctgtggttgatccagtcagccagcgagcagaagacttttgccgacgtacaggattttctcatgcgtatacatcagttacacaaatgctgaatgagatttctcccgatatcgtgagtgtctgtacacccaatcgctttcacttcgaacatgtattggctgccctcgaagctaatgcttcagtgatgtgcgagaaaccaccagctatgacagctgatcaagcaagaaagatggcagagacagccgataaaaacgggcagattttggcttatggattccagcatcgtttttctgacgaagcaacaatgatcaagaatcatcttgatgttctcggggatatttattacgtagaagcgaatgcgcttcgtcggtctggtgttccaggctggggaacgtttatcgacaaagaacttcaaggaggcgggcctttgatcgattatggcattcacatgcttgatacagcgatgtatattactggatttcctaaagtaaaaagcgttcgggcgtacagcttccaaaaaattggtacgaaaaaaaattcagggaaattcgggaaatgggatccaagcaaattcacagtagaagatgcaatttttggcacactggaattagaaaacggcaagatcatccaactgaatacttcgtttgctttgaatatcagagaagacaaactgaatgtggctttttgtggcgatcaggcaggtgctaatctgtatccaggcgaactattcgaagatgtagatggaaagctggtttccttacaaaagaccacgccagttaatgacccacatgaactaagtatggctcattttgtgaatcgggcgctcggtgaccagactcagatgattgcagatggctggcaaggatatgtcatccagaatctggtggaaaatttatatcgttcggcagaaacaggagaagttattacctta

SEQ ID NO: 21792 - DNA, 750 bp, Enterococcus faecium
atggagtacacaataaagaaaatgtcagagatatcaggagtcagtccgagaaccttgcgcttttatgatgagattggactgctaaaaccagctaggatcaattcttcaggttatcggatttatggcaaaaaagaagtcgatcgtctgcaacacatcttattttatcgaacaatggcattcaagttggatgatatccaagaggtcttagacaatccatcttttgaccaccagaaagctttaatcaagcatcagcaaatgttgctggaaaaacgggcacaaatcgataccctcttgacaactgtccaacagacacttgatatgtacgaaggaggaagaaaaatgagtgacaaagaaaaatttgaagggtttaaacaacaaaagttgaaagaaaatgaagaatcctatggacaagagattcgacaaaaatacggaaaaaaaaaggttacagcatccaatgaaaaatggatgaatatggataaagaaacgtatgaagaaatgcaaactgttgaaaagcagatgttatttgatctcactctttacttaaaagaaccagaagatgaaagcttagcagaccgtatcttccaagctcataagaagtggttctcttacagctggcctgaatatcagccaaaagcgcataaaggactaggaatgatgtacgaagccgatgaacggttcactgcatattatgacgagcgaagtggtcatggtgcagcaaaagctttaaatgaaattatccaaaaaaaggcg

SEQ ID NO: 21793 - DNA, 1353 bp, Enterococcus faecium
atggaactcaaggaagatttgggtgtaaagagtaaaagtactgagttaaaacgaaagctagggcttggtactgtaattgcccttggagtcggaacaactgttggttcaggaattttctcttctttatctgaggtggcgggagctgccggaagtagtttaattctcgttttatcatttcttattggtggattggttcaaattccagcgaatttatgttatgcagaattagcatcggcatatccagaagatggcggaggatatatttactttagagaggcgggctctaaaccgttagcgtttcttggtggttggattagtttttgggcaactgatcctccatcaatttcaattatggctttagcaattgctaattatttaggatttttcatcccaatcagtggcctatctttgaaattagtgtctgtactttttgtgctagtatttatgtatcttcatattagaactgttgaaggtggaggaacttttcaaaatattattacggtgctaaaaattcttccttttattttgattattggaattggattgttcaatttaaatggagaattactcctttcttcaacaccgttacaaggcgcttctacaggctttatggcattaattgcagggatttctgctactacttggtcttttgatggaatgtcagctccggtatatatgtctggagagattaaaaatccaaagaagaatatacctaaaggattaatttttaccacttttatcgtgttagcgatttatgttggactaacatttgtagcttctggaattttgagtgttgatgaattagctagttcagatgcaccgattgcgttattagcttcgaaaatccctgtgattggtagttttgcaggcacatttgttgcagtgacagccgtaatagtgattatcggctcactctcaagctgcatcatgtttcaaccgcgaattgaatatgctatggcaaaagacggattgttcttcaagtcctttgggaaagtacatcctaaatacgaaacaccatacttttccattatgattcaatgtttctatgcgattgtattgatttttgcaacagatatttcgggtttattgggttactttactcttgttgcattgttaaaaagctttttaacctttggaacaatttttatcctaagaaggaaaaaatctggatatgatccttcatataaaacgccatttggctatttaatgccggttgttgcgatgtttatgaatggaactttaatttattcaacatttttatgggcacctgttggtggtttaatagcagctgtagtagctgtagcgactggtttgccagcgttttatttttggaacaaaagaaatagtgttggt

SEQ ID NO: 21794 - DNA, 1662 bp, Enterococcus faecium
atggacgaaaaaatgaaacaaggttcgaaatctgtagtagaaagtttgattaatcatcatgttgattatgtattcggtataccaggtgcaaaaatcgatggtgtatttaatgaattagaggatcaaggtcctgaattaatcgtgactcgtcacgaacaaaatgctgcatttatggcacaagcaatcggacgtattacaggagagccaggagtagttatcgcaacaagtggtcctggtgctagtaacttagctacaggtttggtaacagcgacagcagaaggtgacccagttttagcaattgccggacaagtaaaacgaagcgatctattgaagttgacccatcaaagcatggataatgcagcactgttccagccaatcacaaaatacagtgcagaaatccaagatccagaaacaatttcagaagtgattgccaatgcttatcgtatggctaagagttcaaaaaaaggcgcgagctttatcagtatcccgcaagatgtagtggatgcacctgtccaagggaatgtcatcaagccattgagcgatcctaaattaggttctgcttctgcagatgatatccgttacctagctgaacgcattagagaagcaaaactaccggtactattagtaggtatgcgaggatcaagtgaaaaagaaacgttagccatcaggcaattagttggaaagacagcattgcctgttgtagagacattccaagcagctggagtgatctcacgtgaattagaagcgcatttctttggtcgtgtgggtttatttagaaaccaaccaggagatatgcttttgaaacgaagtgatctagttattgctattggctatgatccaatcgaatatgaagcaagaaactggaatgcggaaaaagatgcgcggatcattgtgatcgatgaagcgccagctgaaatcgatccttttatgcagcctgaaagagaattgatcggtgatatctcagccactcttgatttattgacaggttcattagagcctcaacaagtgtcagaagatgcaaaagaatatttagcatctcttcaagcagaattaacggagcgggacattgttcaatcaaaaggagaagcaggtatcttgcatcctttagaagttattaacacgcttcagtcaaaagtaacagatgatatgactgttaccgtagatgtaggtagtcattatatttggatggcacgccactttagaagttatgaacctcgtcatttgttattcagtaatggtatgcaaacgcttggtgttgcattgccatgggcgatttctgctgcattggtgcgtccaaatacacaaatcgtatcagtttccggcgatgggggatttttattctctgcccaggatttagaaacggcggtacgtaaaaaattgaatatcgttcatttgatttggaatgatggacactacaatatggtagagttccaagaaaaaatgaaatatcagcgggcgtcaggtgtagactttggtccagttgattttgtgaaatatgcagaagcttttggcgctaaaggaatccgagctacaagtgtagaggaattagaaaaagctttagaagaaggatttgcgacagaaggacccgtaattattgatattccgattgattaccgtgataatgagaaattgggagaaacaatcttaccagatcaattctat

SEQ ID NO: 21795 - DNA, 1086 bp, Enterococcus faecium
atgaaaaacaaatttagaaagattgttgggactatcgctattttgaccgcaagcattctattaagtgcgtgtggcaattcaggatctgcagatgatagtacggggtatgtaggaatcgctatgccgaccaaatcagcagaaagatggatcgctgatgggaacaacatggtctcggaattagaaaaactgggttataaaacagatcttcaatatggagaagataaagtagaaaatcaagtagcacaaatagaaaatatgattacaaaaggggtagatacacttgtgattgcttctatcgatggttcggctttaactgatgtgttagctaaagcaaaagaagcagatatcaaggtgatcgcctatgatcgtttactgatgaattcagaaaatgtcgattattacgcgacttttgataattttggagtaggtgtatcgcaagcagcttatattgaagagcacttaggattgaaagaaggaaaaggaccattcacgattgaattatttggtggctcgcctgacgacaacaacgcactaatcaattacaacggagtgatgtctgttttacaaccatatatggacaacggtcagttggtcgtgccatctggacagacgagtttcagtcaaatcgctacgcttcgctgggatggttctacggcgcaagcaaggatggataatctgttaagcgcaaattatactgaccaaacattggatgctgttttgtcgccatatgatccaataagtttaggaatcatttcgtcattaaaaggcgtggggtatgggagtgaaagtaaacctttacctgtgattactggacaagatgcgacagttgctggcgttaaatcgatcattgccggggaacaaacacaaacgatctttaaagacacacgtatcttagcaaaaaatacgattgaaatgatcaaagcaatcagtgatggagaagaggttccggtcaatgatactgaaacttatgataatggggtgaaaactgtccctacgtatttagcaaatacagtatctgtcgataaagataattatcaagcagagctgatcgacaccgattattataaagaatccgatctgaaaaat

SEQ ID NO: 21796 - DNA, 1916 bp, Enterococcus faecium
tggcaaaaaaagtcacccgattacaatgactcgtccatccaagtatggaaggattagaggcagttagaaaaagaccagggatgtacattggatccactgacagccgaggcttgcatcatttagtctatgaaatcgtcgataatgcagttgacgaagcattatcaggttatggcagtgagattgatgtgaccatccatgaagacaatagtataactgttgcagatagcggacgtgggatgcctgtaggaatgcatgcttccggaataccaacagttgaagtgatttttactgtgctgcatgctggcggaaagtttggtcaaggagggtacaaaacttctggtggactgcacggtgtaggagccagtgtggtaaatgccttatcgaaatggctaattgtaacgatcgttagagatggcgtagagtatcagcagaaatttaaaaacggcggtaaacctgacggtactttgaaaaagataggaaaaacaaaaaaagcaaacgggacgactgtccattttttaccagatgatacaatattcagtacaacgaaattttcatatgaaattttagccgaacggttaagagaatctgcctttcttctaaaaggcgttaaaatctctctttctgatcttcgtggagaagaaccagtcaaggaaatttttcattacgaagaaggaatcaaagaatttgttgattatctgaatgaagaaaaagatacattgacaccagttgtttatttttcaggagaaaaagaaggtatcgaagtagaggtcgcttatcaatacaatgacggttattcagaaaatgttttatcttttgtcaataacgttcggacaaaagatgggggaacccatgaagctggtatgaaagcggcgatgacgaaatcttataatgaatatgcgagaaaagttggtttgctgaaagaacgggacaagaatctggaaggtagtgatttcagagaagggttagctgctgtactttctatccgtgtacctgaaaatcttctgcaatttgaagggcaaacaaaagaaaaacttggtacgccagttgctcgtaccgtagtagataacgtcatcagtgaacaaatgggcttttatttgcaggaaaatagcgaaatgagccagatgttggtccgtaaagcaatcaaagccagagaagcgagagaagcagcacgtaaagccagagaagaaagccgaaatgggaagaagcgtaaaaaaggcgaatctcttctttcaggaaaattgacacccgcacaatcccgaaaccctaagaaaaatgaattgtatttagtcgaaggggattctgctggcggatctgctaaacaaggaagagacagaaagttccaagcaattctacctttacgaggaaaagtcatcaataccgaaaaagctaaaatgcaagatatcttgaaaaatgaagaaatcaatacgatgatctatacgattggtgcaggagtcggtcctgagttttctatcgaagactgtaattacgacaaagtaatcatcatgaccgatgcggatacagacggcgcccatattcaagtattactgcttactttcttttatcgttatatgaaaccgctgattgaagctgggaaagtatatatcgcgttaccgcctttatataaagtatccaaaggacaaggaaagaagcaagtcattgaatatgcgtggacagatgacgaattggcagcaatgattaaaaaagtcggcaaaggatatatgctgcagcgatataaaggacttggagagatgaatgcggaacaattgtgggaaacaacgatggatccgacttcccgtacgttgatccgcgtccgtatcgatgatgctgcgcaagctgaacgtcgagtaaccacactgatgggtgacaaagtagaacctcgaagaaaatggatcgaaaatcacgtgcaatttacgctc

SEQ ID NO: 21797 - DNA, 2220 bp, Enterococcus faecium
atgaaaacattgaaagaaccgacagctgaagagatcaagaaaaaaagaatctatgccgaatggggattgactgatgaagaatatcgaatgatcgaagaagatatcttaggaagaatgcctaattatacggaaactggactgttttctgttatgtggagcgaacattgttcctataaaaattctaaaccggttctacgcaaatttcctactagtggacctcatgtgttgcaaggccctggagaaggcgcaggcatcgtcgacatcggtgatggactagcagttgtcttcaaagcagaaagtcacaatcatccttcagccgtggagccttatgaaggagctgcgacaggagttggcggaatcatcagagatattttcagcatgggggctcgtccaattgcgttgctagattcattgaggttcggcgaattagataatccaagaacgaaatatttactagaagaagtagttgcaggtatcggcggatacggcaattgtatcggcataccgactgtaggcggcgaaattgcatttgatccttgttatgaaggaaacccattagtcaatgcaatgtgcgtaggtttgattgaacacaaacatatccagaaagggcaagccgctggcgtcggtaattcgatcatgtatgtaggtgcaaaaacaggtcgcgacggtatccacggagcaacttttgcctcagaagaatttaatcaagaagaagaacagcaacgttctgctgtacaagtaggcgatccttttatggaaaagctgctgcttgaagcgtgtttggaattaatcttgcatcattcggattctctaataggtatacaggatatgggagcagcaggacttgtttcatctagtgcggaaatggcttcaaaagctggctcaggacttatattgacattagatgaagtcccacaaagagaaactgggatgacaccttatgaaatgatgttatcggaatcacaagaacggatgttgatttgtgttaaatcaggagaggaagaaaaaatccaagaactatttcagaagtatgatctagatgcagtcactatcggtaaagtaacagacgacgggcaatatcggctatatcatcaaggagaagaagtagcaaatctgccagtcgatgcattagctgaagatgcaccagtttatcataaagaaatgaaagaaccagctcgaatcgtagaatttcagcagttagctccttatcagccagttatcgaagaacctggacaagtattgcttgatctgctgcagcaaccgacgattgcttcaaaacgttcaatctacgaaacttatgattcacaagtacaaaccaatacagttgtccgtccaggaagcgatgctgctgtgatgagggttagagggacgaataaagcgttagctatgaccacagactgcaacgcgcgctatctgtatttggatccaaaaatcggaggacaaatagcagtggcagaagctgctagaaatattattgctagcggtggtaagcccttggcgatcaccgactgcctgaactatggttctcctgataaaccagaagttttttgggaattatcgacttcagctgacggaattgctgctgcgtgtgaaacgttaggaactcctgttatttcaggaaatgtctctttatataatgaaacggatggtcaagcaatctatccaacaccaatgattggtatggtcggattgattgaggatcataaacatatcactactcaggaattcaaaaaatcaggggatctaatctatatattaggtaagacgtttgcagattttgatggcagtgaattacaaaagatgcagcttggaagaatcgaaggtgtgatccgaaactttgatctatccattgaaaagagaaaccaagagttagtattgacagccatccaaaacggattgattgaaagtgctcatgactgttcagaaggtggcttggcaattgcactggcagaatcagctttcaaacatcagctagggatatctgtacagtttgaattgtcctctgctcaattatttgcagaaactcaatcaagatttgtgttgacagtcgcaccggaaaataagacacgattcgaagaaatgatgggagatgctgctgttttagcaggtaaggtgacggatgaagcgataatcgaaatttcagcaactgacggtcagatcaaaatagaaactgcagtagcaagaaagtgctgggaggatgcaatcgtatgtcttatgaag

SEQ ID NO: 21798 - DNA, 964 bp, Enterococcus faecium
atgcgctacggacgactagtagcattattagttattttaagtagtatttcattgttcatcggagtatcgaatgtacaattgtcagaactgctccagttagatgggcaaagcttacaaatcttgctagtgactcgtttgccacgaacgatttgtttgatccttgtgggagcgaccagtagtatttgtgggttgatcatgcaacatttgacccaaaataaatttgtttcaccaacgactgcgggcacgatggatagtgcgcgtttaggtattttagtggctatgattttcctacctggtgcatccttgattgtccgatccttgacagcatttagctttgcttttgcaggaacattgctttcttttatcccttacgcgattgttcctccagaaaaatcaattgatgcttccgttgatttggagtcatgttagggaatatcattggttcagttgctacttttatttgcttatcaattccagttggtacaaaatatgacttcatggcttcaagggaattttgcgactgtgatacgaggaaattatgagttatttgtatgctgttgttccattgttgctcttggtttggctatttgcttaccgatttacgatcattggtctgggcgaatcgtttgcagtaaatctgggaatagattaccagaagatgcagtttttaggcattggcttagtatcattggctagtgcagtcatgttgatcatggtaggaagcattccttttatcggagtgatcattccgaatcttgtctctagaatatatggagatcaagtgcacaaaacaattggcgtaactgctttagcaggtagtttgttcttagtattttgcgatcttgtcgctcgcgtgttgatttttccttatgaaataccagtcagtgtgatcgttggaatcatcggtggggctatcttcctttatcttctgataaggggacgacgatatgcttaaaaaaaagcc

SEQ ID NO: 21799 - DNA, 801 bp, Enterococcus faecium
atggaatttagtatggatatgtttcgtttagatggaaaagtagcattagtcaccggtgctgtctatggtattggatttgagattgcacgctctttagctacagcaggagcaaaaatcgtatttaataacttgaatcaagaatcagttgatgaaggtatagcgcattataaagaagcaggcatcgatgcaaaaggttatgtctgcgatgtgaccgatgaagaagcggttcaagcgatggttcaacagatcaaagaagatgtaggttcagttgatattctagtcaacaatgcagggatcatcaaacggacaccgatgatcgaaatggatgcggcagacttccgccaagtaatcgacgtggatttaaatgccccattcatcgtttcaaaagcagttattccggatatgatcgaaaaaggcggcggtaaaatcatcaatatctgctccatgatgagtgaattaggacgcgaaacggtcagtgcttatgctgcggcaaaaggcggattaaaaatgctgacgaaaaacatcgcttctgaatacggtcaatacaatatccaatgtaatggaattggaccaggttatattgctacaccgcaaactgctccattacgcgaaacacaagaaaacggtgaacgtcatccattcgatcaatttatcgttggacgtacgccagcagcacgctggggcgagccaatcgatttggctggaccatctgtcttcttggcttctagcgcatctgatttcgttaacggccatgtcttgtatgtggacggaggcatacttgcctatatcggaaaacaacct

SEQ ID NO: 21800 - DNA, 540 bp, Enterococcus faecium
atgaaactagataaatatacagtaggaagacgttacgggaaagctttatttgaactggcgatcgattcaaatcaagcagaagaaatctatcaagatctcgtaagcttacgtcaaatctatgaacaagtacctggattaggtaatatgttaagtgatgttcgtctagaacctcatgaaaaacgagaaatcatggacaagcttgttagtggctatgatggaatcgttaaaaactttttagaagttgtttatgcgtataaccgaatggatgatcttttgttcatgatcgaagaatatgaacgtcgatatgatgaacatcaaggtttgctgttgggaagtgtcacaacagcagttccactttcagacgaacaacgaatacaattagaaaagaatgttgcaaaaacaatgaactatcaatcagtcgaattaaaacaaatcgttgattcttctattattggtggcgcgattgttgaagctaaccatcgagtaatcgacggaagcattcgcacgcaattagaaaatatgcgtaatcaattaaataga

SEQ ID NO: 21801 - DNA, 2151 bp, Enterococcus faecium
atgatgaaagattttatgaaaaaaatattaaatacttcttggttagaaaaaataagaaaaggtgcacaagaacctaagaacaaaacgtttcgccggtcccatgttccttttcgcttaaattttctttttttcattatatttacgttatttgttgcgttgattgctagattgggttatttgcagatcgtgaacggcgaagagatggaggcgcgagtgaagtctacttctacgattacggtccaagaaagtactcctcgcggaatgatctacgactccacaggaaaagctttagttacgaataaagcgaatcaggccatcacatatacgagaggaacacaagttacggctaaagatttgcttgaaatcgcaacgaagctgaactcgctgatcgatgttccggtagatgaaaatctgacagatagagataaaaaagatttttggctggctgatcccaaacatttgaaagaagccacaaaaagactttcggcaaaagaaaagcaattagggaacagcgaacaatatagtgcgatggtcaataaagtcacagctgatgagattaatttaaacgaggagcaattaaaaattgctaccatctttaaacggatgaatagtgcatatgaattaaacactgtctatatcaaaaactctggtgttactgatcaagagttagctgttgtggcagaacgcgcttctgaacttccaggagtttcgactggcacagactggacacgagaatataatgcagcaagttcactgaaaagtattcttggcagtgtgacgactgaaaagcaaggacttccagcagatgaagcagagaaatacctagcaaaaggttattctcggaatgaccgtgtaggacaaagttatttggaaaaacaatatgaagatgtcctgcaaggaaccaaaacccaatatgaagtttcccttgataatgaaggaaatgtttcgaatcaaaaagaaatcttctctggggaaaaaggttctaatttaatgttatctatgaatgcagaattccaatcaaaagtagaagaaattttgaaaaggaattatcaaacattgatcaacaacggcaaagcacagtattcgcctggtgcttatgcagtggctatgaatcctcagacaggagaagtgctagcaatgactggtttcagtcatgaacaaggttccaaagaaatcaccgagaatgctttaggcacgattactagcgcctttgctccagggtctgtagtcaaggctggtactttgacagcaggctgggcaagtaacgcgatcagcggaaatcaagttttgattgatgagccgattcgtctgcaaggtgcttcagaaaaaagctctgtctttaatcgaagcggacaagttgctcttgatgcagtcaaagcattggaattgtcttctaatacgtatatgatcaaagtggcgttaaagatgttaggactagactatacacctggaatgggactacctagtttagatgaagaagctaaagcttatcagcaattgagagactctttcaaagagtttggtcttggtacaacgactgggatcgatttgccgaatgaatctcctgggatctcacgttctgttgattatatgaagaagttcaatgcggataatggcaaagaatggtatactccaggtaactttaccgatttggcatttggacagtttgacacatatacaccaatccaattagctcaatatgcttcaacagtcgctaatggcgggaaacgagtacagccgcacctagtcaaagcgatctatggcaatgacgaaaatggaaacttgggtgaagtgaagaaagaaattggcacaacagtagaaaatacggtcaatatttctgcagaaaatatggcgatcctccgtgaaggattccaccaagttgtccatggtaccgatccttacacaacagccaaaccattagccagtgcgaaaatggacctttccgcaaaaacagggactgcagaaacggttgcggaaggtcatccagatattacgacagtcaatagtaatatcgtggcatacggaccaacagacaatccggaaattgccatcagtgttgtcttgccgaacttattagacgaacaagaccacatgaacttgacgattgctaaagaaataatggacgcgtattatgatatgttcatggcaaaa

SEQ ID NO: 21802 - DNA, 573 bp, Enterococcus faecium
atgaaacttactgttttttgcggttcccgttttggtaataaagaaagttacaaatttattgcgcaaacgttaggaaaatacatggcacaagaagaaatcgaactggtttacggtggttcatactccgggattatgggagtgattagtaaaacagtactggaaaataacggaaaagtcacaggtatctatccgaatgggctttttgaaactgaattgcctggaaaagatgttactacatttattcctacagaaacgatcgatgaaagaaaggtattattatttgaaaagggagatgctgtcctcgttttccctggaggtctaggtacattggaggaattctcacaacttctttcttggatagcaatcggtctgacgcccgacaagccaatcggaatattgaatattggcggttattacagcggcttgcaacaattattagaaacttttgcaaaagaggattttatggataaaaaatggttggatcaagtaatcttttccaacaatccattggaactggtcaatgaattacgagcagtatctattaaaaatcagttattattgaaggaggcaaaa

SEQ ID NO: 21803 - DNA, 1561 bp, Enterococcus faecium
cgtatgtataagcgacaattattagaattaattcgagttaatcttttatatgttaatccacagctcacgaataaagcaagagagaaaggaaaaaagggaaagcgattaactatctatcttttgtctcaaaatcttttttcagggctgatttttttactgatttacggatttgctatgtttgctatgaactttgttaaattgccaggtttctttacttattacgtggcactttttggtatgttaggtttaactcaaagtatatcagtcatttataatatcttttttgaaggaaatgacctgcaagtatttttgcctctgccttttggaccaagaacaggttttttcagcaaagattttggtagttgctttgaccatcattccttttgtttttccacttctagtcatgtttattttaaccggatggcgagctgatctagggattttgcttactatcattatctcaatccttttgttttctctatttttgattattcttttttgtctggctagtttgattgtttttggtttggctcgaacagcagtgtttaaaaaacatagaaaaacagtttctagtatcttgcttggcagctcgatgctgatcgcatttgctggaatcatgtggatgaatcatcaaacggggactattgaaaatgagttaacagatcggcatccgatttcgatattattgccattctatgatgctgccagtcagccactttctcaacaaggtttattgggttggggaatactagctatcacggctctgggatttttccttgctgtaaaacagctgatagtaccaaagcttacagagcaactgactgattcaaacagtgagttcaaaataaaaagaacccataaaaagaaccaaaatgtgcatcagcttttatttagttacaatgctcaattagtaaaagaacctaatttgattatgcaagttctttcttcttccttgttaactccaatcatttttattcttgcttttgccctaggaggcgaaataaaattaactgatttagataataagttaatcggtgttgttttcctggtagggatcgcattggctttcttaacagttaatcagacttcttttatcagcaatcttatttctttggatcaagaaaattttctgtttatccgttctttgccaatctctatgaaccaatatttaaaagaaaagttcagattcggatggatattgcagagttttttaactggtgggatcgcattattaagcggactgtcttttcagctgcctttgttttttatccctagcttgctatttggttctttattcggctgctacttattgtcactacgttatttcgctagagattatcggttgctgctgctgaactggaccaatattaaccaattatttaacagaggttcaggaagtttgggtttagtcgcaactatgatgggttcattgatcatcagtattattcttatcgtcttatacggaatgttggctttgttttatccattttggttagtgaatattcctgtgatcggtttagttctaatactttccgctctatggatcgtttattatcaacga

SEQ ID NO: 21804 - DNA, 573 bp, Enterococcus faecium
ttgttatcttttatttttagttcaacagttttaggagagttaagtgatttttatggctatttttcaatgtgggatacttttctacatgcattcagcggatttttagctgggggtgtcggcttttcccttgtttatttgctcaataaaaatacaaaaaccatgaacttgactcctttattactagcagttgtttccttctgtttttcgatgacagttggtgttatgtgggagtttgtggaattttcagcagataaattactgcaattcgatatgcaaaaagatacgatcatccagcaaatcaatagtgtggagttaagtaaagacggaaacactgtctatcatgttccagatatcactcggacaatcattgaaagtcaaaatgcagatggtaaaacagataaaacaatcatccaaaatggttacttagacgtgggaatcatggatactatgaaggatttatttgttaattttattggagcagttgttttcagtgtatttggttacctctatagtcgaaacgattaccaaaaatttacgttcatcaagaattttattcctaaaaaaatcaaacga

SEQ ID NO: 21805 - DNA, 627 bp, Enterococcus faecium
atgaatgttgaacaaagtatcgcaaaagacttattagaaattgaagcagtatttttaaatccaagtaatccttttacatgggcaagtggaatcaaaagcccaatttactgtgataaccgaatcacgatgagctatccaaaagtccgaaaagagatcgcaaaaggattagcaagcaaaatcaaagaagcttaccctgaagtacaagtgattgctggaactgcaacagcaggaatccctcatgccgcatgggtagcggaaatactggatttgccaatggtctatattcgaagtaaggcgaaagatcatgggaaaggtaaccaaatcgaaggacgtatatttgaaggtcagaagatggttgtgatcgaggatttgatttctacaggcggaagtgtcttggaagcagctgaagcagcaaaaagagaaggtgcggatatccttggtgttgcggctatctttacgtatgagttgccaaaaggaaaagcaaatttcgaaaaagccgaaatccctcttatgacgttgaccaattattctgtattgattgaagcagctttagaagatcgttatatcgatgagcaagaattaactctgctaaaagaatggaaaaaagatcctgaaaattggcagatt

SEQ ID NO: 21806 - DNA, 891 bp, Enterococcus faecium
caactgactgcttcgacagcggattcccctgaacagcaacctttggatattacggaaagtggaacggtagaaggtttattagcggaaacgaaggtaacttacactattacgccagctgaaggtgaacaaattgcttcagtcgctgttaatggtgccaaagaagtaaattatgatgcaaagacctttacagtaggtacgaacaatttatctattactgcagaatttaaagctggaccggatacttcaacagagaaaccaactgatcctagtgaagaagtccctagtacaccagatccggaaacgccaaacaaaccagatgtgggtaataacaacaataataatggttcaaataattcaaacaataataacaataattcgaacagcgggaattcttcgaatcaaacaaacccatctggatcgaataacaatggaaatactcagagagaaccaaaccatccaaacaatggttcatcgaatggcggaacgaacaatgcttcatctcgtccaaatacagcaaatcaaagcggtatagagaatccatcttctgcttcttctgattttgttgtaaaatcaccaattgatgctgtattgcctacaaatacaacgaatgtccaacaagcaatcgttcgagaagcattcaagcatcttggaaaaccatatgtatggggagcaaaaggtccaaatacttttgactgttctggtttgacttattacgtatatatgaaagcaaccggtcattatatcggtggctggacaggcgaacagcaatatgcaggtacgcagattccagtaagtcaggcccaacctggcgacctcgtcttctggggaccttcttccggtgttactcaccatgtaggtatctatattgggaacggacaatttatccatgcg

SEQ ID NO: 21807 - DNA, 1195 bp, Enterococcus faecium
ctttccatcaaaaataacgagacaggcgtctttgctattggtggattaggtgaaatcgggaaaaatacgtatggggtacaattccaagatgaaatcattttgattgatgccgggatcaaattcccggaagacgatttacttggaattgactatgtcattcccgactacagctacatcatacaaaacttacacaaagtaaaagccttggtgattactcacgggcacgaagaccacatcggcggaataccctacttgctgaaacaagcaaatattcctatctatgctggtcctctcgcattagcgttgatcacaaacaaattagatgagcatggcttgcttcgagatgcagagctccatgagatcaatgaagatacgatcatccgttttagaaagacttctgtcagctttttcagaacgacccatagtatcccagatgcattagggatcgtggtgaaaacaccttctggaaatatcgtagcgactggagacttcaaattcgatttcactcctgttggcgaaccagcaaacttgcataaaatggctcgtatcggggaagaaggagtcttgtgccttttatctgatagtacaaatgctgagattccaacatttactaaatcagaaaaaacgattgggcattctattttgaagatcttttcaaaaatcgaaggacgtatcatttttgccagctttgcttctaacatcttccgtttgcagcaagcagcagatgccgctgtggcaactggtcgtaaaatcgctgttttcggacgaagcatggaaaatgccatcgtcaacggtcaacgtttaggatatatcaaagttccagacggcacatttgtagatgcacacgaaatcaatcgcttgcctgccaatgaaacgatgatcctatgtacaggttctcaaggagaagcgatggccgcgttgagccgcatcgcgaatggtactcaccgtcaaatccaaatccagccagacgatacagtgatcttttcaagttcacctattcctggtaatacaacaagtgtcaatcatttgatcaatttgctgtctgaagctggtgcagaagtgattcacggaaaaatcaataacatccatacttccggtcacggtggacaagaagaacaaaaattaatgcttcgtttgatgaagccaaaatattttattcctgtccacggagaattaccgcatgttgaaagtatga

SEQ ID NO: 21808 - DNA, 765 bp, Enterococcus faecium
atggcacaaataatatctgttgcgaaccaaaaaggtggcgtcggcaaaacaacgacgacggtgaatctaggtgcttgtcttgctagccttggcaaaaaagtattgctagtggatatggatgcacaaggaaatgctaccagtggtgtcgggatcagaaaacctgatgtgacaagagacatctatgatgttctagtcaatgaattgccaattgatgaggcaactttgatcactgaacacgaaaatttgagtattgtgcctgcgactctccaattagcaggagcagagatcgaattgacgtcaatgatggcaagagaatcaagattaaaaggatctttagcagaagtaagcagtcagtatgattatattttgatcgattgcccgccttctcttggccatctgacaatcaattcatttacagcaagtgattcgattttgatacctgttcagtgtgagtattacgcattggaaggattaagccaattactgaatacggttcgtttagtccaaaaacactttaatccagaattagagatcgagggagtcttactgacaatgtatgatgcacgaacaaatctgggaaatgaagtcgtagaagaagtacgtaaatacttccgcgaaaaagtttacgaaacgatcattccaagaaatattcgtttatcagaagcacctagtcatggaaaaccgatcatcgactacgatccacgttctcgaggagctgaagtctaccaagcattggcaaaggaagtggtaagtcgtgaagaaaag

SEQ ID NO: 21809 - DNA, 435 bp, Enterococcus faecium
atgcaaagtttgccattcgacatgatcgagctcaatcgatcttttaaaaccaaagaagaagcgatccgctattgcggtcagatgcttgtagaagcagggtgcgttgatgaggaatatatcgatgccatggtagatagagacaaaatgttatctgtttatatggggaattttatcgcgattcctcatggaacagatgaagcaaaaaaatatgtgaaaaaatccggcatctgtgtcgttcaagtaccagatggtgtagattttggtaccgaagaagaagaaaagattgcgactgttttgttcggtattgcaggagtcggagatgagcatttgcaacttgtacagcaaatcgcactttattgcagtgatatggacaatgttgtccagctagcagacgcgctcagcaaagaagaagtaacggaaaatctagcaattgct

SEQ ID NO: 21810 - DNA, 750 bp, Enterococcus faecium
atgccttttggtttttccggtgtgctagatggtgcagctcttgtgttttttgctttcttgggatttgatgccgttgcaatggcagccgaggaagtcaaaaacccgcaaaaagatgtgccaagaggaatcattggttcgatactgattgctactgtcctttacatcatcgtgacgctgatcttgacaggaatcgttccgtatactgaactaggagtcaatgacccagtggcttttgcaatgaggtatgtaggacatggaacagtgggcgcggtgatcgctgtaggggcaattttaacgctactgacggtaacgatctcgatgatgtattcacttgctcgtttactgtttgctgtcagcaaggatggcttacttcctaagtttatgacagaaatcgatcaaaagcatcgtacaccgaaaaaagcgacttatgccgctggtgtggcagctgtattctttgccggatttttcccattgaatgtattagcggaactaacgaatatcatggcgctcgcctatttgatgcttgttagtctaggcttactgaagttgagaaaaatgtttggcaaaccaaaagctggagaattcaaagtgccattcgttccgctattgccaatcgtctccatcttgacttgtattgtattgatgcttcgtctgcaaactgtgacatggatcgtgttcggtatcgtaatggttattggactgatcatttattttggctatggctatggacacagcaagatgaatgagaaa

SEQ ID NO: 21811 - DNA, 267 bp, Enterococcus faecium
atggcaatttcaaaagaacgcaagaatgaaatcatcaacgaatacgctcgccatgaaggggatactggttctccagaagtacaaatcgctgtattaactgaagaaatcaaccacttgaatgaacatgcacgcgtgcacaaaaaagaccatcattcataccgcggcctaatgaaaaaagttggtcaccgccgtaacttgttagcttacttacgtaaaactgacgttcaacgttaccgcgaattgatcaaacgtttaggcttgcgtcgt

SEQ ID NO: 21812 - DNA, 945 bp, Enterococcus faecium
atggcagaaataagaatcggacattcacaagtctacgcagaacagcttggattaggagcaaatgccgttggaggacataatctttttgacggtttggaagatgagacaggaaaacaagtagttcgtacagctttgaatagcgggatcaatttgatcgataccgcttatgcttacggaaacggccgttccgaagaactgattggcgaggtactgaaggaaaaagaatatgatcgctcacgtgtcgtcatcgctacaaaagctgctcatgtaccaaataaagggcgaacatttgataattctcctgagtttctcaaacaatcggtggaagatgcactaaaacgtctgcaaactgattacatcgacattttttatatccactttccggatgaaagcacaccaaaaaatgaatcagttgctacattgcacgaattaaaagaagcaggaaaaatccgagcagtcggtgtgtcaaacttcacgttagaacaattgaaagaagcgaatgcagatggatatgtcgatgtagtagaagataaatacagtttgatccatcggcaggctgaaaaagaattattcccttatcttgaaaaaaacaaaatcagttttgttccctattttcctcttgcttccggtttgctgacaggaaaatatgaacttggtgaggaaaaacaatttggtgaaggagatcctcgaaaaagaaatccagatttccaaggagaacgtttcagagaaattttaaccgctgtcgatgtacttcgccccattgctaaaagataccaagccactcctgcgcaacttgttttagcttggtacatgaagaatccacgagtgtctgtagttatacctggagctaagcgtccagagcaagtatctgacaatgtccaagctttagatttgcatttatccaatgaagattatcaaaccattgatgaagcatttcgtggattt

SEQ ID NO: 21813 - DNA, 1296 bp, Enterococcus faecium
gtggaacaaattcaaatcatcgattcgaaaaaccatgtgggagaaacagtaacaatcggcgcttgggtcgcaaataagcgatcaagcggaaaaatcgcatttttacaattaagagacggaacagcctttttccaaggtgtagttgtaaaaagcgaagtgtcggaagaagttttccaaacagctaaaaatctacaccaagaaacatccgtgttagtaactggagaaatccgtgaagacagtcgttcaaaatttggttatgaaatcggaattacaaatgtggaagtggtaagcgagagccacgattatccgatcacaccaaaagaacacggaacagatttcttgatggatcatcgtcatttatggctgcgttcttcaagacaacatgcgattatgcagatcagaaatgaaatcattcgtgcaacgtatgaattctttaatcaacatcattttgtcaaaatcgatccgccgatcttgactggttctgcaccagaaggcactacggatctattcgaaacaaattactttgatcaaaaagcttatttatctcaaagtggccaattatacatggaagctgctgctatggctttcggaaaagtcttttcattcggtccgactttccgtgctgaaaaatcaaaaacacgacgtcatttgatcgaattctggatgatcgaaccagaaatggctttcactcatcaagaagaaagtttagaagtacaggaacaatatgtagcattcttagtacaaaatgttttagatcattgcgaatatgcattagatgtactaggacgagacaaagaagtcttaaaaacttatacaaaattgccattccctcgtattacttacgatgatgcaatcgaattactgaagaaaaatggatttgatgacatcgaatggggcgaagactttggttcacctcatgaaacgttcattgcgaattcattcgaacagcctgtctttatcctaaactatccaaaagccatcaagccattctacatgaaaccacatccaacaagagaagacgtggtaatttgtgcagatatgatcgcaccagaaggttacggtgaaattattggcggaagcgaacgggcaacagactatgatttcttgctagaacaaatccgtaatcacggtttggatgaaaaagaatattcatggtatcttgatctacgtaaatacggttctgttccgcactctggttttggtctaggccttgaacgaacagtcacttggattgctggtatcgaccatgtacgtgaagctattccattcccacgtttgttgaaccgaatttatcca

SEQ ID NO: 21814 - DNA, 1038 bp, Enterococcus faecium
atgaacaatccgaaattcagcataatcgtaccagtatacaatgcagaagcaactattggtcgaacgattgatattctaaaagaattggattatgaagagtacgaagtcgttttagtaaatgatggatcaacagatcaaacacaggaaatcattcaagaactgattgaaaatgatgaacgttttgaattgattactacgaccaatcaagggcccggattagcaagaaacgaaggaataagacagtcaaaaggagaatatctcttattcttcgatgcagatgacacgccagtaaaaacgatcttgtcagattatgatcatttgctagaaaagagtccaaaagcggatcttgttgttagttcgtttgtttttcgtacaatggacgagggaagaatcgtttccgaaaaagaaaacttagttacagaatgtcactatctaactcacgaagagtttataaaagacatgtatcagttaatgaatgaacagttgatgtatgttgtatggaacaaatgctatcgtagcgatattctgaaaaataaccaaattctatttaaaacttataatagttgtgaggatcgaatatttaacttacattattatgaatactgtcatcaagtgatcatgaacccaaaagtagaatatatttatgaatttgaaggtgggaaggggatcactaatcaataccgacctaacaagttcgaaacatttaaagaattctattcattagcaaatactgtaacagacgatattaataaagacggtatggcggcgcttcttttaaaagggacaacttcagttattttttctatttatagtacctctgcaagaacttcaaaagagaagaaagacgaagcaaagcagatattgagtgatccagtgatccgagaagccaagcaaattgctaagacggattcttcagcaaaaaaaataacaaagttgctttacaatatgccagctccactatttttatctgctgtaaaagttggaagcttcgttgaagtgaaaatgccagggttaatggctgctttgaagcgagtatat

SEQ ID NO: 21815 - DNA, 114 bp, Enterococcus faecium
atgaaagtaagaccatcagtaaaaccaatgtgcgaacattgtaaagtaattcgtcgtaaaggacgcgttatggtgatttgcccagcaaatccaaaacataaacaacgtcaagga

SEQ ID NO: 21816 - DNA, 201 bp, Enterococcus faecium
atggcagatttaaaaggacgttctaaagatatgaaagataaagtagtcggtgaaggaaaagaagcatacggcaaagcaacagacgacaagagcaaagaaacagaagggaaagcacaatcactaggtgctgacatcaaagaaaaagctcgaaatttaggcgacgaagtcaaagacaagttttctcgaaaagacgaaaaaaaa

SEQ ID NO: 21817 - DNA, 732 bp, Enterococcus faecium
atgaatactgaagaactaacgaacaaattaatacaagacattgaacaagaaaaatataaatacgcgcaagctattccttcagaacgtgattttgttcaaatttatgaaatgaatcgttcagccgtaaaaaaagccattcaacaattagtaaataaagagtacctactaaaaatacatggcaaaggaacttttgttaaaaaaaatatccatgaacatttgcaaatcaaatttcatggtttgtctgaattgttggaacgggaagggattcagcctagcagcttaattttagcttcagaaataaaaccggctggacacattgtcgggaaagctttacagctggaaccaactgaagaagtatttcatttggttcgtttaagaagcggcgacggtgagccaatttctattgaagacacttatattccattaaatctcatacctgatcttcaagcttttgatttccaaattttttcattttattccacattggctgcttatcattatcaaattgaaaatatctatcagacaatttccagctcaaaagtgcgcaataaagaagcccgtttgttaaaaaccagcttaaatcgtccggtaatcagtcttgctatcactgcggttacgacaaatgaacaagcggttgaatacactgaagtagtggttttgcctgaattcgccgccatctatactaaaaatgttcatcaaggaaaggagatgaaaatctatgcccaaattgat

SEQ ID NO: 21818 - DNA, 1035 bp, Enterococcus faecium
atgtcagaaaaggaattaatgaaggtagtcggtttttatgaagggttgccgatcgatgatccaaaaagctttattgatgaaaaagaacagatacctgtacccagttcacgggatcttctggtaaaagtcaacgcagtatctgttaatcctgtcgatacgaaacttcgccaagataacgggataagaaatgctttacgtatcttaggttttgatggagtcgggaaagttgttgctgtaggtgacgaagtgcaaaaattttctgtcggcgatcgcgttttttacgcaggtacaacaacaagagcaggaagcaatcaagaataccaactagttgacgaacgtattgtcgctcttgcaccaaaaaatctttcagatgaagaagctgcagccttgccgttgacctcattgaccgcttatgaattgttatttgaaaaatttggtctaactccagaagaaaatgccaatcgcgggaaaaaaatcttagtgatcaacggatccgggggcgtcggttcgattttgaatcaactagcgcattgggctggcctagaagtctacgcgactgcaagtccgaagaattttgaatggctgaaaaaaacaggtgtagactatccaatcgattatcatcacgacttaagtaaaagttttcgtgaattaggaatcgatcaagtagagtatgtcgctgtattattcgatattacccgctactttgatcaaatcaagcaccttgtccgaccatttggacatgtgggaacgatcgtagggatcaaagagccgttagatataggtgtttggaaaaaccaatctatcagcttcgactgggagtatatgttcgctaaaacagactataactatgaaatcgaaacgcaaggagaagctttagcgcacattgctgctttagcaaatgaagggattatccgcagtacattgagcaaggtctattcagatgggatgaatgcgaagaacttgaaacaagcaaccaaagacgtagaaacaggacatatgttaggaaaagtcgttgttagtggtccgttcaacgga

SEQ ID NO: 21819 - DNA, 858 bp, Enterococcus faecium
atgaccatccaatggtttccgggacatatggcaaaagcccgacgagaagtttctgaaaaaatgaaatatgtggacatcgtatttgaattggtagacgcacgattacctttatcttctcgtaatccaatgctagatcagatcattcagcaaaaacctcgccttgttttattgaataaagcggatctggcagatccacaacagacaaagctgtggcaagaatattttcgtaaacaaggccatcttgcattagctatcacggcacaagaaagtaaaggaattaaaggtctagtacctgcggctaaagaagcattgaaagaaaaacgggcaagagatgctgctcgggggatcaagcctcgcgctattcgggcaatggtcttaggtattccaaatgttgggaaatctacgttgatgaatcgactagtaggcaagaaaattgcacagacaggaaataagcctggcgtaacaaaaggtcagcagtggcttcgtttaggtaatgagttggaattgttagacacaccagggattttatggcccaaatttgaagatgaagaaatcggcaaaaaactagcgctgacaggcgcgatcaaagaccagcttgtccatttagatgatttagcgatttacggattagacttttttgcccgatattattcaggaagaatcagcgatcgttatggtttatcaatcgagcaagaagaaaaattggcaccggaattactgatggatattacagcaaaacgtgggtataaagaagactatgatcgtggcagcgaattagtcgtgcatgatattcgtcaaggaaaacttggacgatacacactggatcgttgcgaagaaatggagcaaaaaagtgatgac

SEQ ID NO: 21820 - DNA, 744 bp, Enterococcus faecium
atggtacgttacaaagcaatcattgcgtacgacggaacaaattttaatggattccaaaaacagccaaatgggcgtactgttcaagaagaagtagaaaaaacattacaaaaaatggcaaatggaaaagaaatcacggtctttggttcgggaaggacagatgccggagtacatgcgatcgggcaagtaatccattttgattatccagaggagcgtccgttagaacgaatgcgtttcgcgctagatacccagtcaccagaggatattgctgtaagacaagtagaaattgtttcagaagacttccacgcaagatatttggtcaaagaaaagacgtatcaatttcgagtggatatagggaaaccacgcagtccttttcgacgccattatgcaagttattttccttacccacttgatttggaaaaaattcagcgggcgcttcctgatttattagggactcacgatttcacctctttttgtgcatcaggaagctcgatagaggataaaatacgtacgatctacgaggctaagatggaggtaaatgaaacaaaagacgaattgttgtttacatttaggggaaatggcttcttgtataagatgatacggatcttagtaggaacgcttttgaaaattggcaatggccgattgcctgaagatagtatcccagatattattgcgaaaaaagatcgtaatgcagcaggacctacagcacaccctgaaggactttatttgtatgaagtgaaatatgaa

SEQ ID NO: 21821 - DNA, 2178 bp, Enterococcus faecium
atgacggaaaatttgaaccagacgatcattcagcttgtacaaaaagaactttcagactatcgtcctaagcagttgactactgtacttaatttgttaaatgaaggaaacactgttccttttatcgcgcgttaccgaaaagaaatgactggaagtcttgatgaagtccagattcgtgaaatcgaagagcggtatgcctatcttgaaaacttagaaaaacgtaaaactgaagtgattcggctaatcgatgaacaagggaaactgactcccgagttagaagcagaaatcacccaagccgtgaaaatgcaacaagtggaagatttgtatcgtccatacaaacaaaaacgacggacaaaagcaacgattgctaaagaaaaaggacttgaaccactcgcgaagtggctgatgcagcttacagatggagaggtgcaatctgaagcagaaaaatatattgacaaagaaaaagaagtctcttctgccgaagaagcgttgcacggtgctcatgagattattgctgaacaagtcagcgataatgcaaaatttcggacttggattcggtcttatacgtataacaaaggtatgtatgtcagcaatgtcaaggatgagcaagcagatgaaaaaggcgtatatgaaatgtattatgactttgcagaacccgtccataaaatggtttctcatcgaatattagctactaatcgtggagaaaaagaagatattctgaaagtattctttcaagtagatgaagcagcaattttagcttacttggatcgccaaatagtcaaaaatcctgcctctccttcttcttcattcgtcagagaagcctatcaggatagttataaacgctttattcagccagcaatcgagcgagaactgcgcaatgaattgactgaaaaggcagatgagcaagcaatcgctattttcggcgaaaacctccgtaatcttttgttgcaaccgccactaaaaggtaaagttgtcctgggatttgatccggcttatcgtactggatgtaaactagcagtcgtagatgcgacagggaaagttttagcaatcgaagttatttatcctcataaacctgcagcgcaagcaaaaagagaagctgctggaccagcttttatccaattaattaataaatatcaagtagatatggtagctatcggaaatggtacagccagtcgggaatctgaactttttgtggctgagcagttgaaatccgccgaccataaaacctattacgctatcgtcaacgaagcaggcgcttctgtttactccgctagcgaaattgcacgaaaagaatttccgcatctacaagttgaagaaagaagtgctgtttctattgcccgtcgcctgcaagatcctttagctgaattagtcaaaatcgatcctaaagctgtcggagtaggccagtaccaacatgacgtttctcaaaaacgtttggctgaacaattggattttgttgtggaaacagcggttaaccaagtaggtgtggatgtgaatacagcaagcccgcagctcttgcagcatatatcaggattgaataaaacaactgcccaaaacattgtcatttatcgtgaagaaaacggagaattcaccgcacgaactcaattgaaaaaagtgccacgcttaggaccaaaagcatatgaacaagcaatcggattcttgcgagtccctggtgggaaaaacattttggacaacacaggtatccatcccgaaagttattctattgcaaaagaaatattaacttcagtccaactttcagaaaaagagcttggtacagaagaagcagtagaaaaattgacacgattatccgtagagaaactggctgaaagcctatcagtcggagaagaaacgttagccgatattttagctgggctgacacaacctggacgagatatgcgtgatgagatgccagcgcccttattacgtacagatgtattgagtatggaagacttgaaaccagggatggaattgactggaacggtccgtaatgtcattgacttcggcgcatttgttgatatcggtgtgaagcaagacggacttgtccatatatcgaaactcagcaaaaaattcgtcaagcatcctacagatgtcgtgtcagtaggagatatcgtaacagtttggatagaacaagtcgatacgaaaaaaggcagaatcagtttgacgatgctttccccttatgaagag

SEQ ID NO: 21822 - DNA, 1188 bp, Enterococcus faecium
atgtcttccaaagaactaacaatgtatttagagaaagaattggatcaactgaaagaaaaggggttatacaatacgatcgacatactagaaagtgaaaatggtgcttgtatcatcgtagacggaaaaaagatgatcaatctagcatccaacaattatcttggatttgccaatcgcgaagaattgaaaaaagcatgtattgaagcaaccgaaacttatggtgtaggagcaggagcagtccgaacgatcaatggttcgctgaaaatccatcagcaattagaagaaaaaatcgcagaattcaaagggacagaagcagcaatcgcctttcaatctggattcaactgcaatatgggcgctatctctgcagtaatgacaaaagaagatgctatcttatcggatgaattaaaccatgcatctattattgacggttgccgcttatccggagcaaaaatcatccgaattaaacatcaagatatgaaagaccttgagaaaaaagcaaaggaagcgatagaaagtaagaaatataaaaaaatcatgtatatcacagatggtgttttctccatggatggagacattgcacgattgccggaaattattccgattgttgaaaaatatggactgatcacctacgtcgatgatgcgcacggctcaggcgtaactggaaaaggtgcaggaaccgtcaagcattttggattaagcgacaaaatcgatatgcaaatgggcacgttatcgaaagctataggtgttgttgggggttatgtagctggatcgaaaacactaatcgactggttgaaagctagaagtcggccattcctattttctacttcgctaactccaggtgcagctgcagctgcattggcttcgattactttgatgcaagaacatccggaacttgtcgaaaaagtttgggaaaatgctaattattttaaagaagaattgaaaaaagtaggctataacatcggtatgtctgaaacacctattactccagtcattttgggagacgaaaaagtgactcagactttctctaagaagctgatcgaacatgggatttatgctaaaccaatcgtttatccaactgtgcctcttgggacaggcaggatcagaaatatgccgactgcggaacatacgagggaaatgcttgatgaagcagtagcagtttatcaaaaaataggaaaagaaatggaaattatt

SEQ ID NO: 21823 - DNA, 1128 bp, Enterococcus faecium
atgaaagttactttaaaccgagctagctttatgcaggaattgcaaactgttcaacgagctatttcaagcaaaaccacgatccctattttgacaggtgtaaaaatcacactgacacaagaaggtttgactttgacggggagcaacgctgatatatcaattgaaacttttttgtctgttgaaaacgaaaaagcaaatatgcaaatcgaatctactggttccattgttttacaagcacgtttctttagcgaaatcattcggagacttcctgaagaaacatttactttagaagttttagaaaataaacaagtagcgatcacttctggaaaagcgaattttatcgtaaatggattagatgcagataactatcctcatcttcctgttgtcgaaagccataaccagatgaaattacctgtacacgtattgactaaactaatcaacgaaacagtttttgctgtctcacaacatgagagtcgtccaatcttgacaggtgtgcatttcattttatctgataattctttattagctgtagctactgattctcaccgtctaagtcaacgcgtgattccagtagaacaagcggctgatcattttgatattgttattcctggaaaaagtttgatcgaattatctcgctcattaacaaatgaagaagaaatcgtcgaaatcagcattatggaaaaccaagtgttgttcaaaacagaaacgatgtatttctattcccgtttgctagaaggaaactatccagataccaatcgtttgattccttcaagttttaatacagaggttgaattttctgttcctagctttttagcggcgatcgaacgggcttctttactttctcatgaaggccgtaacaacatcgttcgtttatctattcgtccagatgcggttgttttatacggaaattcgccagaaatcgggaaagtagaagaaagcttgagttatacagcaagcagtggcgatccattagatatttctttcaatccggattatatgaaagcagcgttgcgtgcatttggagatatgagcatcaaagtgaaatttatctctgctattcgtccatttacattggaaccaacggaagatggcgttcaatttattcagctgattactcctgtacgtacaaat

SEQ ID NO: 21824 - DNA, 714 bp, Enterococcus faecium
atgaacagtgatatgactcaaatcatgggggagtttattgggacactgatcctagttttgcttggagatggtgtgtgtgcggctgtgaatttaaacaaaagtaaagcacaggcttctggctggattgtcatcgcatttggttggggactcgctgtaacaatggctgtctatatttctggattcatgggcccagctcatttgaatcctgcagtctctctagctatggcgatgacaggggcaattagttggaatcttgtcgttcctttcatcattgcgcaagttttaggagcttttgcaggggccattcttgtttggctttcttatttgccacattggaatgcaacgaaagatgaaagcgcgattttaggaacgtttgcaacaggtcctgctatacggaattatccagcaaatgtgatcacagaattaattggtacatttgtattagttcttgggttgctagcttttggacaaaacgaatttgcacctggaacgaacgtattcgctgtaggtggattgatcttagccatcggtctttcattaggagggccaacaggatatgcaatcaaccctgctcgggactttggtcctcgattagcacatgcggtattgccaatagctaataaaggaacttcagattgggcatattcatgggtaccaatcgcaggtccaatgatcggagcaattatcgcggtaggtgtctattcattaatggtg

SEQ ID NO: 21825 - DNA, 757 bp, Enterococcus faecium
atgactgaatccatccaaagtatcaaagaacgattgaaaagcatacagagaatagatgatcctacactagaatcattaagaaatgatccacgcaaaggcgtgcagcaagcactggcttcttttgaacgacgattgaaaaaggaagcattaattaaggaaaaatatgaagaaatgttttgctttgaaaagcaagggtacgcacaaggtcaccaatggattgccggcattgatgaagtaggaagaggaccattagctggacctgtcgtggcagctgcagttatcttgccgaaaaatgagatcatattagggctgaatgactccaaacaattatcagagaaaaagcgagaacttctttatcaacaagttcaagaaaaagcccctggcaatcgggatcgggatcgttgatcagcagacaatcgatgatgtgaatatttatgaagcaagtaaattagcgatgatccaagcagtagaaaaattgtccattgtaccaagctatttgttgatcgatgcgatgaccttggatttgcctattcagcaggaaaaaataatcaaaggggatgcacgatctgtgtcgattgctgctgcaagtatcattgctaaagtatatcgagaccaattgatgaaagaatatgacgtgctttatcctggatatggtttctcgcataatgcaggttatggaacaaaggaacacttagaaggacttgaacgacaaggaattacgccaatccatcgtaaaagttttgcacctgtaaaaaaa

SEQ ID NO: 21826 - DNA, 1038 bp, Enterococcus faecium; identical to SEQ ID NO: 21486

SEQ ID NO: 21827 - DNA, 678 bp, Enterococcus faecium
atgactgatttctttaaaacatatttgcccaatgtttatttgattccggatgaatttgtcgaagcgacgaagcaaacactatatatgtctttttggacagcattcattggcgggatgattggaatcatcttaggtgtgacgttagtagtgacacgccctaatggattactagctaaccgtctgctatttgaaatacttgataagctgatcaatatcattcgttccatccctttcattatcttgctttctcttttagcattgactactcgtttcttagttggaacgacgattggtgcgaaagcagctttagtgccattgatttttggagttgttccgttttttgctcgtcaaatcgagaacgcactgctagaagttgatcctggggtgatcgaagcggcagaagcgatgggaaccagtccaatcggtatcattttacgtgtgtatttgttagaaggtttgcctggtatcattcgggtctcggcgttgactatcatcaacgtgatcggactgactaccatggctggagcagtaggtgcaggcggattagggaatcttgctatatcgagagggtataatcgattccaaacagatgtaacgattgtggctacattattgattctaatcttagtttttttaagtcaatttatcagtaatcaactgattaaaaaaattacacat

SEQ ID NO: 21828 - DNA, 276 bp, Enterococcus faecium
atgggtcgtagtttaaagaaaggaccttttgtcgatgagcatttaatgaaaaaagttgaagctcaagcaggggttgaaaagaaaaaagttatcaaaacttggtcacgccgttcaacagttttcccaagttttgttggatataccatcgcagtttatgatggacgtaaacatgtaccagtttacatccaagaagacatggtaggacacaaattaggtgaatttgcacctacaagaacttatcgtggacatgctgctgacgataagaaaacgaaacgc

SEQ ID NO: 21829 - DNA, 1062 bp, Enterococcus faecium
atgaatcgaaaagacgaacatgtttcactagctaaagcctttcatgataaacaaaaaaacgaatttgacttcgtacggatcatccataaccctttgccgcaaatagcagtttctgatgtcgatctaagtacacaggcagttgggtttacactaagcagcccattttatatcaatgcgatgactggcggaagcgaaaaaacaaaaaaaatcaaccaagatcttgcaatcgtcgcaagagaagcagatttgatgattgccactggttcagtcagcgctgccttgaaagtcccttctttagccgatacttatacgattatgcgacaagaatatcctcacgggaaaatcattgccaacatcggtgcagggacttctgtcgaaagagccaaagaagctatccgattgtttcacgcagatgccttacagattcatttgaatgcacctcaagagttggttatgcctgagggagaccgtgattttaccaattggaaagtacttattcaagaaactcaaacagccattgacgtccccctcatcgtaaaagaagtcggttttggcatgacaagagaaacgctcaatgatctagctgctttaggagttcatacagttgatatcagcggtcgaagcggaacaagcttcacccagatcgaaaacgcccgtcgctccaagcgggaactgagttatttagctgactgggggcaatcgacagtctcttcattgcttgaagcaaatgaagcagacacttctatggaaatcctagcctccggaggtatccgcaatgcctatgacatatttaaagccctttgtctcggcgcaaatgccgtgggtacttcaggaaccgtactgacgcatctgatgaatcacggcgtagaagaaactattatactgatgaagcaatggcaagaagagcttcgtctgctttatactatggtcggcgcaacgaataccgcggccctacaccaacaatctctgatcttttccggaccagtgaaggattggtgcgaagcaagagggatcgacttagtgaagtatggaagacgcacagaaaagagcgtgggacaaaag

SEQ ID NO: 21830 - DNA, 3126 bp, Enterococcus faecium
atgaaaccgaaaaaattacaacttaaaaattttggtccttttatcaatgagaccgtagatttttcacgtttgacagaagcaccgctttttttgatcagcgggaagacaggagctggcaaaacgacgatttttgatgggatcaccttcgcactttttggtgaaacttccggaagacttcgctctggaaaagagatgcgttctttgtttgctacaccagacgaagaaacaagcgtgactttttcttttgaacatcagcagatgagctatgaaatcgaacgaaaaccagaacaagttttagcaaaacgaaaaggaaacggaacaaaaaaacaggcagccaaagtaacgttgaccatttttgatgggaaaggaaaagaaataaaacaaatcacaaaacgtacagaagcagatcagttgatcagagaactgatgaatctcgatgcgaaacagttttctcaaatcgttttactaccccaaggagaattccgtaattttttggtttcatcaagcagtgataaagagactgttttacgtcatttattcggtactcaatttttccaacagttcaatgagcgattaaaagaaaaagcaaaacaacagcaacaaaaattggatcatttagagcaagagctgcatcttctgcaaaaaaggtttgttttagtcaaagaagaggaaccagcagcagggtttgaagccgttttagcccaatggacaaaccatcaggcaatactcgaaaaacaaatcacggaagaaaaagaagctctaacggaacttcaggaaaaacaaaagcaactagaaaattcctactatcgttttgaaagcttgaaaaaaagttatgaagaaaaaacgatattaataaacaagcaaaaggaattagctgctcaaaaagacgaaatagaggaaaagaaacgatggattgggtattatgaatttacgcaacgattagtcgaaccaatccagcgcctacaagaaataaaagttgaaaaaatagaactgtcacaaaaaagtagtgagcaaacaaagaaactagcgatgactacgcagaattatgaagagtggcaaaaaaatgaagcaaaccgcgtacgccgacaaacaaaaatcaaagaagctgctcaaaaactgcaaaacaaacagatgatggtgccaattgtcgaatccttacgtagtaaaaaacaagacgcagaacaattaacaatttcattggataaagaagaattgaatgccgagaagctgtatcaaaatctcgctatctatcaggaaagaactcgaattcttcaagaaaatttactggatcaggaaaaactgcaagaagatcgtcttgcttttggacagttaaaatatctagatgaaaagcagcaagaaatagaaaaacaaaaagcaaaagacactgggtcgctcgcacagataagagaagaactcaaaaaagcaactgaagaaataacaaaaaatagtcagctattgaaagaacagacagaacaagcagaacagctgaaaagccaatgggcaaagcagcaaattgctcgtcttcagctttttttgcgtccaggggagccatgtcttgtttgtggatcaacggaacaccccatacaacaattaaaacacgaacagccaaataaggaagatatcttaaaagtagaacaacaactggcagaagctgagtctgctgtagaaagaactcagcaaatcattgccaaaagtgaagcacatgaaaataatcttcaacaacaattatcagatttagaacaaaaaatcatggcaacgaatatacaattggctgaacaagaagaacacttgcaacaggctttgaaaaaggcatttcctgagataacagaacaaaaaacaaaaacaactcttgtagtaatcgaacaatctttagatagacgaaaaagcaagatggccaatgcaagaatagagctggaagaaataagacaacaagcagaaaagctcgaacaacaattagctgtctacaaacagcagcagacagaaaaaaataatcagctccagcaactgcaaggagaaatcaaaagtttagaacaacaattgcaagatacggatagtaactgtttagaagaggagatacgacgacttgaaaaacagttagaagaagactcgaatcaactagctgttgagcagaaagcaggagtgcaattgttgcaagatcttcatacgcttcggacacagcttgatcttcaacatgaacaaatagaaaaaatagatgaaaaaatagaaaaggaacaagaaagaatagctaaaaagttagaaagccagtcgtatttttcaacaattgaagaaatctgtgcatttgcacaacagcaagcacaatataaagaaaaccaacgtacagttacttcttatcatgaagagcaattagtgacagctgaccggctgcgtcaattagaaaatatccagctaactgagacattcccagatacagaagagatcagccaacagttagaagaaataagacgtatgatcgaaataaagcaagaaaagatatacggtttacaagaacaaaaaattagtaatcaaaaaatctacgatgaatgtctttcgatttatcacacaagccagacgaaattagatgagcttacgcaattacagcagctttcgcaaacattcaacggagaaaatcctaagaagactagtttggaacggtatgtgcttcaggtttatcttcaagaagtgttacaagtagcaaatgatcatctccaacgtttaacgaaaaatcgttatcaatttgagctagcggataccattggcagttatcgagggaaaaccggattagaaatcaatatctatgatgatcaggcaggtatgtctcgaagtgcgcataccctgtctggcggtgagagttttattgcagcactttctttagcattagctcttgccgatgtgatccagacacaagctggtggtgtagcaatcgatgcattgtttattgatgaaggatttgggtcattagatgaagaagctttggaaatggcaatggaagctttagaaacgatcgaaagtgaaggaagaatgatcggcatcattagtcatgtaagagaattgaaagaacgagtattacaacaaataagaattgatacagaaggtagcggacaaagcaaaatacgctatcaacttgga

SEQ ID NO: 21831 - DNA, 429 bp, Enterococcus faecium
atgttgatgggtgaattccaacataatattgatgcaaaaggacgtttaatcgtgccctcaaaacttcgtgaagaacttggcgaaaagtttgttctgacacgcggattggatggctgtcttttcggctatccgatgagcgaatgggaaaatctggaagctaaactgaacgaaatgccgttggctaaaaaagacgcacgtacttttgtgcgattcttctattcggctgccactgaatgcgaacttgataaacaaggacgaatcaatatacccagcacgttaagaaattatgcagctttgacaaaaggttgcgtagtcatcggtgtatctaaccgaattgaaatttgggatgagacacgatggcaagatttttctgcagcagcagaagagaactttgacgaaattgctgaaagtatgattgatttcggacta

SEQ ID NO: 21832 - DNA, 3060 bp, Enterococcus faecium
ttgtatttgaaacgaattgaaatagccggttttaaatcatttgcagacaagacagtcattgattttgaaaatagcgtcacagcagtggttggaccaaatggcagcggaaaaagcaatattacagaggctatccgctgggtattaggagaacaatctgctaaaagtctgcgaggcggaaaaatgccggatatcatctttgccggttccgatacccgtaagcagctgaatattgcagaagtcacagtgattttagacaatagtgatcattatctgccattggagtacaatgagatcagtgtaacccgccgttatcgacggactggggaaagcgagtttttcatcaataaacaaagctgcagattaaaagatatccaagaattgttcttagattctggattaggaaaagaatcgttctcaatcatttctcaaggaaaagtagaagcgattttcagtagtaaaccggaagaccgtcgtgggatctttgaagaagcagctggtgtcttgaaatacaagcagcggaaaaagaaagcagaacagaagctttttgaaacagaagacaacctcagccgcgtccaagacatcatccacgaattggaagaacagttaactcctttggccgcccagagtgaggcagcaaaggagtttttacggctaaaagaaacactgactcaaaccgatgtctctttgatggttgctgaaatcaagacagcaaaaaaagattgggacaacaaacaagcacagcttgcgaaattcaatctagaattaggcaaactatctgagtcgatccaagaacaagaatccattttggcgaagcagcgtaaagaaaatgcgcaagccgatcgtctgatcgaaaaaaatcagcaagtattattagatctttcggaaaaactgaagcagacagaaggacaaaaagatgttttgcaggagcggacaaagcatacacaaaaaagctcgcaagaatatcaaacttcattagcagaagcacaaaaaaaggttaaacattttgaaaagcttcaagaaagcttgatgaaagcagcagcagaaaaagaaacagagatccaaaaagctgaagcaaatctcataaaaacacagcaagaattagaaaaataccaaaaatcaacgaaagaattattggcagaattaagagatcaatatgttgatttgatgcaagaacaagcagctgtaggaaacgaactgaagtatctagaacgtcaatatatacaagaaacagcaaaaagcaagcagacgttagccaagcaatcggaagtagaagcatcagtagaccgattgatcttacaaaaagaagaattgacacaaaagcaggcgcagctaaaatcatctttaactgaaacaaaagagaagttagaaatgatccaacaaaacgggaaaaagttccaagaagcattagcaaaagaacagcctaaaatgtatcaattaatgaatcaagtccagcagctacgtgctcgtaagaaaagccttcaagaaatccaagaaaactattttggtttttaccaaggggttcgattggtcttgcagcataaacagcagctttcgggtattgtcggagcagtggctgaactgatcgatgttcctgcagatttcacgttagctatcgaagcagctttaggtggggcagcccagcatgtcatcgttgaaaatgaaaaagatgctcggcaagccatcacgtatttgaaacagcaaagaggaggaagagcaacattccttccactgacgacaatcaaaccaagacaattaccggctcatatattgacacaagcagcagctgtagaagggtttatagggattgccagtgaacaagtcagttatcccgatcaaatccaaactgtggttcaaaacctgctaggaacgatccttttagccaaagacttaactagtgccaatgcaatcgcgcaaacgatccgctatcaatatcgagtggtttccttagaaggtgatgtgatgaatgccggaggatccatgacaggtggagcgaataaacgaggaaaccaaggcagtttgtttgtacaaaatcaagaattgaaacggttgactagtgaatttgaagaagcagataaacaactccaagcacaagaaaaaaaagttcaggagctgcaacaagaaacagctcgtttagccgaagaacaagaagttttgcgtacacgaggcgaacaattacgttttgaagaacaagaagcgacaaatcagctacaaaacatcataaatgaacttgaacgttttgaaaaagaaaagcaaatctcaacttttgagacacgtgaactgcagcagtttatcgaagattacgaaaagcaaacgaacgaattgaaagacaaacaaacagatcttgaatcgcaacgacaaaaaatcgacgaagaaatcaaatcgttaagtcaagaaagcgaccagatggaagccagaagagcacaagtacaaagtcaaaaagcacaagaacaagcagatcttgctgtcttgaaagagcagtttaatcatctgcagatccagctccgcggtgcccgagtccaaaaagcagaggcaaccgaacgtcaagaagcgatagaaaagcagttggcgacattgacagcagacttttctgatcatgaagtcacagaagaaagtttggaaaaacaaattaacgaattatctgctcagcgagaaacattaaaagccgagttggcaaaagccaaagagcagcgagatagaaggcaaaaggagatcgataagcttgaagcagtcttggcagagcgtaatcgtgagcaaaaagcacgactgtcggaacaatccaaattagaagtccaaaaagaccgagctgaaatgattttagataatcatttgacctatctgcagtcagaatatcagctgacatttgagaaagcttcccaagactatcaagaaacaaccgatatcgaagacagtagaacaaaggtttcatccttaaaagaacagattgaaaaactgggaccagtaaacttaaattcaatcgaacaatacgaacaagtcagtgaaagacatacattcttagcaacacagcgagatgatctgttagcagcgaaaaaccaatttgtt

SEQ ID NO: 21833 - DNA, 1344 bp, Enterococcus faecium
atggcacacattcattttgactattcaaaagtagcaccgtttgtcaacgaacaagagttagggtacatgcaaagccaagtaacagcagcccacaacgaattacgggaaggtactggcgcaggaagcgacttccgcggctggatcgatttaccaacgaactatgacaaagaagaatttgcacgtatcaaagaagcagctaaaaaaatccaatctgattctgaagtattagttgttatcggtatcggtggttcttatttaggcgctcgtgcagcgatcgacttcttgaatcacacattcttcaatttattagatagcaacacaagaaaagcaccacaaatcttctttgccggaaattcaatcagctcaacatatattgctgacttgatcgaagtaatcggtgatcgcgacttttcagtaaacgttatttcaaaatctggaacaactactgaaccagcgattgcgttccgtgtattcaaagagcttcttgttaagaaatatggacaagaagaagcaaacaaacgtatctacgctacaacagataaagcaaaaggtgcagttaaagtagaagcagatgcagaaggttgggaaactttcgtgattcctgatgacatcggcggacgtttctctgtattaactgctgttggtttgttaccaatcgctgttagtggtgcagatatcgatgcattgatgcaaggtgccgctgatgcaagcaaagcatactcaagcgacaaactagaagaaaacgaagcttaccaatacgcagcaatgcgcaacattctttaccgtaaaggcaaagtaactgagttgttgatcaactatgaaccaggaatgcaatacttctcagaatggtggaaacaattgtatggtgaatctgaaggaaaagaccaaaaaggcatctatccttcaagcgcaaacttctcaactgatttgcactctttaggacaattcatccaagaaggacgtcgcaatatttttgaaacagttgtgaaggttgaaaaacctcgtaaatcaatcacaattcctgaacaagcagaagatttagacggtctaggctacttgcaaggaaaagaagtggacttcgtaaatacaaaagcatttgaaggaacattgcttgctcatacagacggtgacgtgcctaacttgctagtcaaaattccagaaatggatgcttatacattgggttatacaatgtacttctttgaaattgctgtaggtatttcaggttacttgaatggaatcaacccattcgaccaaccaggtgtagaagcttacaagaaaaacatgttcgcacttctaggcaaaccaggctttgaagatcttgctaaagaattgaacgaacgcctg

SEQ ID NO: 21834 - DNA, 1137 bp, Enterococcus faecium
atgcttgtttcttttagtatggttataagattttttctgacaattttattatcactgatattaacacctgtattcaaaatcatttcagtacaaacaggtatggtcgacaaaccaaatgaaagaagaataaataaagttccaatgccttcagcgggcggactgcctatctttatttcatttgttatatcgactttattcttattccgtaaaattatccctcaatcgtatattgtaccgatcttgattgcttctttagtaatcatagtcacaggagtgctcgatgataaatatgagctgacacctaaacaaaaaagtatagggatcttgattgcttctcttattatttattttgtagcagatatacgtattgattccttcacgcttccttttattggatatatccaactaggctggcttagttttcccgtaacgattttttggatcttcggtatcacgaatgcggtcaatctgattgacggtttggatgggctggcggcagggatttcattgatcggtttaattacgataggaatcattggatattttttcctccatgcttctacagtgtatattccagttgttattttctgtcttgtagcaagtattatcggtttttttccttacaatttttatccggcaaagatttatttaggcgatacaggagctctattcctagggtttatgatggccgtcctttcactacaagggctgaagaacgtgacttttgtttcatcgatttctttgctgatcgtcatgggagtgccggtaacagacacgttttttgctatcattaggagaaaagcaaaccgtgtttctttttctacagcagataaaaaacatcttcatcaccgactaatcagtttaggctttactcataaaggtgctgtcctgacgatttatgcgatggctttgatgttttctttcacagctatggtcatgaattatactggaagaatcggaacgatcatattgattattgccatgttgtttgctgcaattttattatttgaattgattggtctgatcaatgagaaacatcagtttattttaaaaacattgcgatttttagggaataaagagtaccgtacgcaagtaaaacagaaatatttgaagaaatggaaccgtcatatagatgaa

SEQ ID NO: 21835 - DNA, 1338 bp, Enterococcus faecium
atggtaaagaaacagataacaggtgaagaaatcaaacgaatcattgaggaagaaaacgtacgatttttacgattgatgttcacagacatcttaggtacgatcaaaaatgtagaagttccagtgagccagatcgacaaagtattagaaaataaaatgatgtttgacggttcttcgattgaaggatttgttcgaattgaagaaagcgatatgtatttgtatccagatctctccacttggatgatcttcccgtgggaaagtgctcatggaaaagttgctcgtttaatttgtgatatctataatccggatgggacaccatttgccggcgatcctcgcgggaatttgaaacgagcattgaaagatatgcgcgaccttggttttacctctttcaatttaggacctgaaccagaattcttcttatttaaattagacgaagacggtgggatcacaacgaccttgaatgataaaggtggttattttgattttgcaccaacagatttaggtgaaaattgccgccgtgacatcgtgttggaattagaaagtctaggctttgaagtggaagcttcacatcatgaagtagcgccaggacagcatgaaattgactttaaatatgcagatgtggtagatgcttgtgataatatccaaaccttcaagctcgttgtcaaaacgattgcacgcaagcatggacttcacgcgactttcatgccgaaaccgttatttgggatcaatggttctggtatgcattgcaatatgtctttgttcaatgatgaaggaaatgttttctatgataaagacggtgaattggaactaagtgaaacagcttatcatttcttaggtggtttgctgaaacatgctcgtgcctacacagccgtttgcaatccaacagtcaattcttataaacgtctcgttccaggttatgaagcgcctgtttatgtcgcatggagtggccgtaatcgttcgccattagtacgtgtaccagaatctcgcggtttatccacacgtttggaattgcggtcagttgatccatctgcaaacccatacttggcaatggcagtattgttgcaagcaggactagacggtatccgtaatcagatcacaccgccagcagctgttgaccgtaacatttatgtaatggatgaggaagaaagagaagctgcacatatccaggacttaccttcaactatccataatgctatcaaagaattgcgtaaggataatgtaatgattgacgcattaggacaacatatcttctcaaattttgttgaagcaaaacgtctcgaatgggcggcattcagacaaactgtttccgagtgggaaagagaacaatatctagaactttat

SEQ ID NO: 21836 - DNA, 1899 bp, Enterococcus faecium
ttggaacattatgaagcagatgcgtatgacgtgatcgttgttggcgcaggacacgccggttcagaagctgcacttgctgctgcacgtatgggatcaaaaacattattactgacaataaatttggacatggtagcattcatgccatgtaatccttctgtaggcggaccagctaaaggcgttgtcgttcgagaaatcgatgcgttaggcggagaaatgggtaagaatatcgataaaacctatatccaaatgcgtatgttgaacacaggaaaaggcccagctgtccgagcattgcgagcacaagcagacaaacatgcttattcaacagaaatgaaacatacgatcgaaaaagaaccaaatttgacgctaagacaaggaatcgtcgaagaactgatcgtcgaagatggtgtttgtcatggagtagtgacgtccacaggagcgagctaccgggccaaagcagttgttattacagccggaacagcacttcgcggagaaatcattatcggtgaattgaaatattcatcaggtccgaataactctcaaccttctattggactagcgaatcatctaaaagaacttggctttgctatcgaacggttcaaaacaggaacaccgcctcgagtaaaatcaagtacgatcgactattctgttacagaagagcagcctggtgacaaagagccgaatcattttagcttcagcacaccagatagtgcctataaactagatcaggaatcttgctggctgacctatacaggtgagacgactcaccaaattattcgagacaacttacatcgtgccccaatgtttacagggatcgttgaaggggtaggcgctcgctattgtccatccatcgaagataagatcgtgcgttttgcagacaaaccacgtcatcaattatttttggaaccagaaggcttaaatacggaagaagtctatgttcaaggtttatctacttctttaccagaggatgttcaagtcaacatgcttcattctattgctggattagaaaaagtagaaatgatgcgtacaggatatgctatcgaatatgacgtagtagagccacaccagctccgtccgacattagaaactaaagtcgttgaaaatctttatacagctggacaaacaaatggtacaagcggttatgaagaagcggctggacaagggctgattgccggtatcaatgcagctttgaaagttcagggaaaagaacctttagtgatcaaacgaagtgacggttacatcggtgtcatgatcgatgatttggtaacaaaaggaacgaacgaaccttatcgtttgctgacttcacgtgctgaataccgtctgcttttacgtcatgataatgcagatttgcgattaacagaaatgggtcaccgtgtaggcttagtaaaagaagatcaatacaagaattatttgaagaaaaaagaagcagttgaacaagaaatcaaacgtttgatgaatgtacgaatcaaaccaacagaagaagtccaagactttttagcaacgattaatgcggcaccattaaaagatggtgtactagcaagcgactttttaagacgtcctgagattacttatgcagaacttctacggtttattccagaaaatgaagaattgacacgaaaagaaatcgaacaagtagaagtccaaatcaaatatgaaggctacatcaaaaaagccatggaaaaagtagaaaaattaaaacgcatggaagcgaaaaagattccagaaaacatcgactacgcagcaatcaacggattagcaacagaagcaaaacaaaaattgcagaaaatccaaccagaaacaattgcccaagctagccgaatcagtggcgtaaaccctgcagacctaagtatcctaatggtctatatcgaacaagggaagattgcgaaagtcagtgaaccagcg

SEQ ID NO: 21837 - DNA, 207 bp, Enterococcus faecium
atgaaacaacaattttcaatcgaaggtatgagctgcaatcattgtgcagcaagagtagaagaaacagtaagcgcacttgacggcgtgcaaaaagtgaaagtaaatttgaaaaaagcaaacggtacggtcaagtttgatgaaacaaaagttcaatccgaaaagatttgtcaagcaatcaatggattgggttataaagcagaggtgatt

SEQ ID NO: 21838 - DNA, 987 bp, Enterococcus faecium
atggtagggattatcctagcaagtcatggacaatttgctgaaggaatcttacaatccggttcaatgatctttggcgaacaagaaaacgtcaaagccgtgattttgaaaccaagtgaaggtccagatgacttgagagccaaattggaagaagcggttgcttcttttgataatcaagacgaagtgttattcttagttgatttatggggcggaacaccgttcaatcaatcaaacacattattcgaagagcacaaagataaatgggcaatcgtcagcggtttgaatttaccaatgttgattgaagcctacgcatcacgcttttcaatggaatctgctcatgaaattgcagcacacatcattgaaacagcaaaagacggtgtaaaagtaaaaccggaagaattagaaccggcagaagcaccgaaagcagcagttgaagacgcacaacctaaaggagcacttccagaaggaactgtggtcggagacggaaaaatcaaatatgtattagcacgtgttgactcacgtctgttacatggacaagttgcgacagcttggacaaaagcagtgcaaccaaaccgtattatcgttgtttcagatgcagtatcaaaggatgatctgcgtaagagactaatcgaacaagctgctcctccaggtgtaaaagcaaatgttattcctattagcaaaatgatcgaagtagcaaaagaccctcgttttggaaataccaaagcattgcttttatttgaaaatcctgaagacgtattgacagctgttgaaggtggcgtagacatcaaagaattaaatgttgggtcaatggcgcattcggtcggtaaagtcgttgtaagtaaagtattgtctatgggacaagaagacgttgaagcgtttgagaagcttgaacaaaaaggtgtgaaattcgatgtacgtaaagtacctaatgattcacgcgataacatggatgatattttgaaaaaagcaaaagctgaattagcaaaagcg

SEQ ID NO: 21839 - DNA, 780 bp, Enterococcus faecium
atgatggagtttcagttagaccaagagtggcggttacgtcccatcaaaggcgacacaggaaaaacatacataggcatgcgtgatgaggacaaagtctttattaaacgaaacacgactccgatgttggctgctctttcaagggaaggaattacaccaaaacttgtttggacaaaacgaacggggaatggcgatactttgacagcacaagagtggctggaaggtcgcttgctgactcctaatgagattggtcaaagaaacgacgtgattgatgttttgtaccatttacatcattcaaattctcttaaaaccatgctgacccgtatcggtggtcgtgtcatgacgccggagaagatgctgcaaaaatatgaaaaagaattaccggaagaactccagaaaaatcaatttctgcaaattgtccatcgttttcttcgtgagcagatcccgtcaatagataaggaaaacttatcagtagtacacggagatgtaaaccatcgtaattggttagtatgtaaaaattatttatatctagtcgattgggattcaatcatgtttgcagaccctgcggtggatattgcaacgattttaggaaattatgtgccactgtctagctggaatcagtggctgatcagttatggcatacgcccgactgacgaaatgcttgaaaaatttcattggtatgcggccatgaatttgctccaagaaatcaccagatattgcaaacgtgaagatcatcgacggatgaacgaagaaattttacaattaaaacgaattttcagtggc

SEQ ID NO: 21840 - DNA, 1359 bp, Enterococcus faecium
atggaagttttccaaaccattatcaattatgttttgaacttaggatcagccatttttgttcccctgattattttgatacttggattgttggcagggatgaaattaaaaaaagcattcatgtctgctttgactttagggattgcttttagcggaatgtctatggtcattggctatatgtctaacgcagtaagtccagcatcagaagcattggctaaaaatacgggaatcagtttgcctgcacttgatcttgggtggacaggtgcagcaagcatcacatggtcgtggagttatgcttttatattttttgcagtaacgattggggtcaattttgtactgttactttttaattggacgaagacgttaaatgttgatatgtggaatgtttgggggaaagctttaactgcttatttagtttattatgtttccggtagtttggctgcaggctttcttactgcaatggtccaagttatattggaattaaagcttggtgatatgtttcaaaaacatatacaagatctcacagggattccattagtaacagtgactcattttatgacatctgccgctgtcttgttgctgcctttcaatatgatcatggataaaattcctgctttaaataaacgagcggatacgaatgcattgaagaagaaaattgggatcttctctgaaaactctgtaatgggattcattattggattggggcttggctttgctgctgcgtatggcgtttcaggttctcttaatctagcgatccaaacagctacagcattaagtttgtttcctatgatctctaaaatgttcatgcaatctttgtctcctctagcagacgctatgtcagaatttatgaaaaagcggtttaaggatcgtgaagtatatatcggattggactggccgatattagctggtcgttcagaaatttgggttactgctattttacttgttcctgtgtttattggttatgccattattttgccaggaaaccaagtattgccattagcagggattatcaactattcgattgcggtcggcggattacttttaacaggaggaaacttggctcgtatgctgatcttgggaatcatcactatgcctatttatttgtacggggccacttaccttgcgccaatactcagtgatttagcagaaaaaagcggagcagtcgagggaatcaagaaaggacagttgatcacatggtcatccatagaagggccggagttcagggttttatttgcggaggcatttaataggaatattctcgctattgtaggatgcgtgatttttctaggactgtttgttctactttataaatatatgataaaagcgaaagtaccgagtgaacgttatgctgaactacaaaaa

SEQ ID NO: 21841 - DNA, 884 bp, Enterococcus faecium
aaaattacacttgcaaaaaatgctgtttttaacatactatataaagctttgacagtcgtttttcctcttataacagtatcgtatgtttcacatattttaggagctgaaggaattggtgaagttacgtcagtgcataattttgtgacctatttttacaatggctgcttccttggatattccaacgtataatgtgaaagctattgcaaaaaagggaccagagcgatggaatatttacagatataattttctctgaattatttataattaatgcatttgcaactactataagtttactcatatatttgactgttgtatttatttcgggatataatcaactttctttgattttttgctctttaattgttctaaattattttaatattgaatgggtttaccaaggattcgaagaatataaatatataacagttagaagttttattatcaagcttgtatcgttgatttttatgcttctttttgttaaaaaaaagacggatattgtgatttatgcaggagtagtgtgttttggtatatcaggaaactatattatgaatatgctccgtctgaataaatatgtgaattttacaataagaaatattaaattaaaacaacatcttaagccaataatgattctttttgtatcagttatagctatcgaattgtacagtttaatagatgtaacaatgcttactcatatgacatcatctgctcatgtaggatatttttcaaatgctgtgaaaattgtaaagttgatagctaatacttttatagcaatgggggcagttctcttaccaagacttagcctttattacgctgagaagaattcctttaaaatggaagaaactatacataattttttaaaaacgccgtttgtataattaagcgag

SEQ ID NO: 21842 - DNA, 999 bp, Enterococcus faecium
atgcgcgaaatagatacctgtattgtgggggcaaccggattagtcggccaaacgatgctcaaagtgttagaagaatatgattttccagtaggacgattgaaattattagcttcaaaacgttcagccggtaaagtttgtgtattcaagaaaaagaaacacactgtacaggaattgacagaaacttcatttgaaggatatgatttagcgctattttctgcaggtgcttctgtatccaaagagtttgcgccaatcgcacgaagtcagggactatttgtcatagataattcctcagcatggcgggaagattcggatattccattaatcgttccagaggtcaatctggaagactatacattgaatcggctgattgcaaatccaaattgttcaaccattcaagcggtacttccgcttaaagctttacaagaagcctttggtatccagcgagtcaattattcgacctatcaagcagtttctggttccgggcaaaaaggcattgaagatcttcatcgtacgcaaaatgacgaggaaccagttttgtatccttataatattagccaaacggtgattccggaaatcgatcagcctttggaaaatgggtatacaaaagaagaacagaaaatgataaatgagacccgtaagattctgcatcagcctgctttgccagtatcagcaacctgcgtacgtgtgccaatcgaaaatggacatggagtctctgtggcagttcaactgcaaaaagagtttacgacggaagaaattagagagtgtctcagccagtttccagggattcaattagaagatgatctagcagcacataaatatccgacgagcattcttgctagaggaacagatatggtttatgttgggaggatcagaaaagacacttctttagagaacggattgttgttctatacgactgccgataacatacgcaaaggagccgctgcgaatgccgtacagattgctgcagctttaatgcagaaaatagcggaggtggcaaga

SEQ ID NO: 21843 - DNA, 942 bp, Enterococcus faecium
gtgctaaattattctctgggacaaaaggaaggtgagaaaatgacagaagccacgtgggaacaaaaatttttgcgttatttgattgtcgaaagaggatattcagaaaaaacgaaagaagcatatgaagaagacattctccatttcaaacattttttggaggaatctggagacgctgatctgctgaaggcggaatattttacggttcgtgtctatttgagtgcattagctgatcatcgtcctagctatagcagaaattctatcagtcgcaagatagccagcctacgttcgttttatcagtatcttctcaaagaagaagtgataaaagaaaatccattttcttacgttcatctcaaaaagaaaaatttgagactgccacgttttttttatgaaaatgaaatgcaagcactttttgacagcgtagcaggagatagtcctttggatttgaggaaccgcgctttactggaagtcctttacgggtcaggcatccgtttaagtgagtgtagcagtttgtcggtatcagacattgattttgattcagaggtcatgttgatccatggtaaagggaacaaagagagatatgctcctctaggttcttttgctcaagatgctctgcaagaatatttcagggaaggccgccaggtattgatgacaaaatatcacgaagagcatgatatcgtttttgtgaatcatcatggaaaaccaatcacgcctactggaattgaatatgtcttgaatcaaatgatcaaaaaaagcagtttggatagtgatatccatcctcacatgctgcgccatacatttgctactcatttattaaataatggggcagatttgcggacagtccaagaattgctaggacatgccaatttatcgactacccagatctatgcccatgtaacaaaagaaagtttacaaaaaaactatcgttctttccatccaagagcg

SEQ ID NO: 21844 - DNA, 1221 bp, Enterococcus faecium
atgacaacaacaatctcaacaaaccaattgaaggatctaatccaatatcgtttaccagaatatcaagcacttgctctagatatccacgaacatcctgaagtaagtaactatgagttttattcctcagcagcgttgattaaacaattagaaaaagaaaggttttgggtagaaaaagaagtagctggacaccgaacagcctttgatgcacgttatatttccaataaacccggtcccacaattgcctttttggcagaattcgatgctttaccaggtattggtcatgcatgcgggcataatttgtttggtacttactccgtattagccgccagcatagtgaagcaattcattgatgaaactggtggagaaatccgtgtatatggcaccccaggggaagaagggggcgagaacggatcagctaaaggcagctttgttcgagaaggtttttttgaggatgtcgatgtagcgttatgcgtccatccagcttttcgttatgggaaaacgacagaatctttagcgaatgatccagtcgacatcaaattttacggtgtcgcttcccatgcagcagcagcacctgaaaaaggagtaaatgctttggaagcattgatccaagtgtttaatggaatcaacgctctacgcttgcaattgccaaaagatgtcaatatccatgggatcattacagacggaggagtagctgccaacgtcattccagattacgctgctggacgtttctatttacgtgcaggaaatcggcaaacattagataaagtatatgaaaaagtggaaaatatcgtacgaggtgctgcgataagtacgggcacgacttttgagtttggattgttccaaaatgcagttgatgatgtcatcgttactccttcttttgatgacttattcttccagcatgcaaaagaagcaggtgttccagatgaagaaatagaaacggaacaaagaacaagtctcggttcttctgatgtaggaaatgtcagccaagtcataccaacaatccagcctacggtagcaatctctgagacatatattgccggacacacagaagaattcaaagctgctgctaaaagtgacaaaggccttgcttctattgcgattgcagcagaactactcgccaatacagctcttgatctgttgaaagagccaaagctattagaaagaatcaagcaagaacatcaagaaatagtagcaagaaaaaaacaagagggcgctactttc

SEQ ID NO: 21845 - DNA, 3147 bp, Enterococcus faecium
atgaaaattagtcaccgtgaggaagcggaagtcgaagaacagttgatccgtgtattgggggaagggcataatcagtggacgtatcgtcccgatctaaaatcagaagaagatctttgggtcaatttacgccaaaaaatcatctcaaataatcaagcagaactgaatgattttcctttgaccgataaagaatttgaaacgatcaaaacagaattgttactacgaacgaaaaccccctttgatgctgcgaaatggttaaaaggtgaaaatggaatggctcggatcacgattgaacgggaagatccgcaactgggttctgtctcgctcattctttattctaatcaagacattggtggaggaatctctacctatgaagtggtccatcaaattgcaaaacgtggaagtaacatagaagcacgggatcgacgttttgacgtcaccttactgatcaatggattaccgattgtccaaatcgagctgaaacaagtaaccgcaaaagatagtttttatcaggcgtttaaccaaatcaaaaaatatgcagaagaaggtatgtttcggaacaatatcttttcgaccttacagttgtttgtggtttccaatgaacaaaccactcggtattttgcaaatgccttaccaaaggatttgcatcctaagtttttatttagttggcgaacgaaagataataaaaaggtagaaaacttatatgagttttgcaaacaagtgctaaatatcccggatgctcatcgcttgattgcggattatacgattgtcagtgaagatcaagacaataaaatcctcatggtgttacatccttatcaagtacatgcgattcaagccttgtttattgctgcaaataaacatcaatcaggatatgtgtggcatgcgactggttcaggaaaaacgttgactagttttgtatctactaagcttttagcacgaaaatcggggatcgatcggacgatcatgttagtggaccgcaaagatttagataatcaaaccaccacagagtttacgaaatttgcttcggaatttaatactgggatttcttccgggaacgccaaagcgaatagcttgatcgtgggaacaggaagtgccaaagagttaagtgaaactctgttggcagatgccaatgcaaatgttgtgattattacaacccgtcaaaagctagatgcggcgttgaaatatgcaaaaaaacaagaagagaaaaaaggaaccaatcgcttccaaaaattaatggggcaacatatcgtgtttgtagtagatgagtgtcatcgagcgttaagtgctgaaaatatggaagaaatcaaaaaaatgtttccgaaatccacttggtttggctttacaggtacaccgattttccctgagaatcggaaacaagccaaagggcaattggcacgtacgacccatgatcagtatggagaggtcttgcatacctataccatcaagaatgcattagaagatggctcggttttaggatttcaagtagagcatgaaaacaccgtggagccgacttcattagagaataaaatctatcggaaattaaaagaagtagaaacatatgcagagtattcaccggaacagatcaatcgtatgattgatcaaatggagcctgtcaaaaaagaaagttatttggaccctactgtttttgaagcagatgaacatatccaaaaagtcattcataaaatgttccgtccagacaatgcctatacaaaatttgattttcgaaatggccgtccaacgaagtctgcgatcttaaccacgagttccattgacatggccaaaaagtattatcgagcgatcaaagaaatgacgaaagaacctgactggttaacaaaagagtttcctaatcagcccattcgtgaaggaagaacgatggaggatcctgattttccacgaatcgctattacctattcattagaagaaaacagccgagattcaagtgtccaacaagaagaaatgcaaaaaattattgaggaatataatcagtattatgatacttcctggtcattagcagacattgagcgttataacggagacatcaataatcgtttggcacgaaaaagagcggaattcaaacaatttgggaaacaaattgatttagtgatcgtagtggatcgtctattgacaggttttgacgcacctacgattcaaaccctatttgtggatcgtaatctagagtatgcaggattgatccaagctttttcacgtacgaaccgtacgtatccagaaaaaacaaaaggactaattgttactttccgaaagccagccacaatggagaagaatgtcgaggatgcgacaaaactgtattcagaagcaaaagaagaatcgggtttgatttatccaagttatcaggaatccaaaaaaagattcaagcaagcatatggtaagttaaaagaggtttcatccatggaatccattgatgaacatacgccacttgaaatccgtatcgagtacgtcaaagcattccaagaattgaatcgtgcttatgaatcgttagtgacttatgacgattacaatgatgacatggtgaaatcttcaaccttgaacaatcaaattcaacttttggaagaacaaattggcgtgtacgagaccgtgaagggttcattaatagaggaagaaccagaaaaagagggagaagatttttccacgatcgaattttatagtgaaaataccacgaagttgtatgatattgattctacttatattgatcaattactaggaacttatgcggcgaatagttcagatgcacgagaagaaattgaaaaagctttggctaaattgaataaaacagaaggagtcaaagaagtttaccgacaaattttaaatgcgtttgatgtggggactttagatagtaatgaagatatctttgtcattaaacgtcgctattttacacaagcgagtgatgatttgattcatgtcttttccaatgagtggtttgtttctgagaaagaattacatgcttctaatctgcaatatatgccaggtgaagatccaattcctaatatgaaagcaattatcaacagtaaggattacgaaggatataaagccaaccatccagaagcgaagccatttaaatacccacaagaaatgaagcgagcatggcgtaaaatgttagatgatgagctgattccacttgaaaatgaattgagg

SEQ ID NO: 21846 - DNA, 1383 bp, Enterococcus faecium
atggaaaaaatagtgattttacatacgaatgatctgcattctcatttagaaaattggccaaggatcagaaggtttttggatcaacgtaaacgagaaaacgaaaagaaagaaaaaacgacaacgattgcagtagatctaggtgattttgtggatcgttggcatccattgtcagaagcaacgaatggacaggaaaatatcttgctgatgaatgaagttggttatgatgcagcgacgataggaaacaatgaaggcgtaggaaattccaaagaagagttgaatcatttatacgatcatgctgagtttgatatcatcctggataacttattcgataaaaatacgctccagccaccggcatggacgaaaccatataaaatcattacaacgaaacaccagacgaaaatcggactaattgcatttactgctccatttccgcttacttataatccgaatggctgggacatacggaatccttatgatattttgccagaattagtcgaagatttacgttcacaagtggatgttttagttttgatgagtcatctcgggattcaggatgatttccaaattgcaaaagaaataccagcaattgatgttattttaggatcgcacacccatcatttattcagagaaggtcacgtaatcaatgatgtccaaatagcagccgctggaaagtacgggcagtatgtcggtgaagtccatttaaccatcgatgaagagaaaaaaatccttaagcattcagccaaagccatccctaccgaaacaatgacagcttttacagaagatgaacaagaaataaatagttatctagaacgtgggcatgaattattaaaagaaaaagaagtagcagatttgccattttctctgagtctagatatcttcaatgagcattcgtttatccaagtagcctttgaggcggtgaaagaacgaggaaagacggaagcagcaatattaaacagtggtctgtttttaactgaaattccaaaagggcgggtcaatcaggatcagcttcacactgcgttgccgcatccgatgcacttgttaaatgtcacattgggtggaaatgatctgatccgcttagttttagaaatagaaaaaaatcgtaactttttacgtaactatcctatgaagggaatgggatttcgcggtaagatttttgggcagatggtctataatggaatcacatatgattctattaaccatcaagtcttttggaagaacaagccaatcgatctgaataaaaattatacttttactaccgtagatcatttgatgtttgttccattttttccaacgattgagattgctggaaaaaatgaatttttgttccctgaatttatccgaagtgtggtaggagattacttgaaagctcactacccaatcaaa

SEQ ID NO: 21847 - DNA, 1344 bp, Enterococcus faecium
atgcaaatatatgattacatcgtaattggtggcggctctggcggtattgcttcagcaaacagagcagggatgcatggcgcaaaagttttgctgattgaagcgaatgaattgggcggaacatgtgtcaacgtcggttgtgtacctaaaaaagttatgtggcaagcaagtacgattttggaaacaattgaacgagatgcctcaagttacggtatccaagcagatttaaaaaatgttgatttcgccggtctagtagaaagacgagaaaaatatattgattttctacacggtgcttatcaaagaggattagatagcaatcatgtcgaggctataaaaggttacgctacttttatcgatagtcaaacgatcgaagtaaacggtgaaacctatcgtgctcctaaaatcttgatcgctactggaggccgtgcaagtaaaatgaccattcctggtggagaatacgcaattgattcaaatggattttttgaattaacagagttacctaagagagcaatcgttttaggtgctggatacattgcggctgaactttcaggtgtatttcgtggtttaggtagtgaagtcatgtgggcatatcgaaaagaacgaccacttagaacgtttgataaaatgctttcggacaatttgatccaaatgtaccaagaagctggaataaaaacttacgcacatcatattgctaaagaaattactaaaaacaatgacgaatatacggtgctatttgaaaatggtgaaaccttaactggtgattgtgtactttttgccggtggacgtgtaccgaataccgaaaaattaggtctggaaaatacaaatgtggaattggacaaaaaagggtttatcaaagtagataaataccaaaatacaacggatgaacatatttttgctgttggtgatgtgatcggtaaattagatctgactcctgttgcaatcgcagctggtagacgtttatcagaacgtttatttaatggaaagaaagattcttatcttgactataaacttgttccgacagtcgtctttacgcatccaccaattgcaacaattggtttgacagaagaagaagcattggaaaaatatggcgaaaatgaattgaaagtttatcgttcacgctttaccccaatgtactttgcattaaatgattatcgccaaaaatgcgaaatgaaattgatctgtgtcggaaaagaagaaagaatcgtcggcttacatgctattggtgttggtgtcgatgagatgctgcaaggttttgccgtggctatcaagatgggtgcaactaaagaagactttgacaatacagtagccatccatccaacaggagcggaagaattcgtaacgatgcga

SEQ ID NO: 21848 - DNA, 909 bp, Enterococcus faecium
atgaaaaaaataattggagcttttgtatttgcaatcattatcattattatctgttttcaaatagatgtttttggtcaaaaaaagatagttggacaaacggtcagcagtacgaacagtacggttacaaagacaaaggaatcatttgatgatacagaacaagagacattaatcaaaatcggaaaaaatgaccgtacactatatacagatgactcgctaactaccccacttgcaactataaacggcggagagctggcggagtttctttctgaaacaaaaaatgcttatcagatcaagacaaatgatggctatactggatatttagccctcgaagatggaaccaaagtcacaaagaatatacaaacaaaaccggaagagctatctgatgcagtgattgtattagatcctgggcatggcggaaatgatactggggcattaagcaatgatgaacaaacagaagaaaaagatataacattaagtacagccataaaagtaaaaaaggcgctagaggatgctggagcaacggtttatttgacccatactacagatgaattagtacagcttggagatatatgcgactacagtgaagaaaaaaaggcagatgtctttatcagtttacacgcagactctacggaatatgcgaatgaagcaactggaatcacgacatattattactatggacaagaggaaacattagcacagacaattgctgactccttcactgatctgcctctggattcaagaggaatctccactgggaactatcaagttcttcgagaaaatcttcaaccttctattttaatcgagatgggttatatgaataatgatagtgatttaaaggaattagtaacagacagttatcagcagcagattgctgcaagtttgacacaagcattgaccacttattttcag

SEQ ID NO: 21849 - DNA, 675 bp, Enterococcus faecium
atgaaagtattgatcgtattaacaaatgtagaaaagtacgaaaagatcgagcgtcctacaggtttgtggttaagtgaactgactcatttttatgatgtattagtaaaaaatgggatcgatgcagattttgtcagtcctaaaggcggatatgtacctttagaaccgcaaagtgttttgaatatggatgaaatcgattgggcctattatgaagatgaagatttcagaaatcgggccttgggaaataccttacgtcctgatgatgtggatgcaaatgattatgcagcggtttattatgctggtggccacggaacaatgtgggattttccagaagcaatagatcttgggaaagtcgcttcacaaatctatcgaaatgaagggctggtctcagctgtttgtcacggtgttgtaggattgttgccagttacagatgagtctggaaaatctattttagctggacgtacagtgactgggttcagtaatgaagaagaggaagcaaatggtacaacgaatgaagtaccattcttagcagaagatgctttgaaagaaaaaggagcaaactatcagtctggagcagctttttcagaagtggttcaaattgatgggcggcttcttacagggcaaaatcctcaatctgctcatcaattaggcgaagcagttgttgaagcattaaagaat

SEQ ID NO: 21850 - DNA, 762 bp, Enterococcus faecium
atgcagcggtattttttaaaagaatcatatgaatcaaaagactattttgttttagaaggggaaaactatcaccacattgtacgggttatgaggatggaacccgaggatgaagtttttttggcattcaatgatcaaatagccattgttgcagaaatcacggagattactgaagaggctgtttatctgaaagaaattaaaaaagaagaaaatcaaaaggaactgccaagttcgattaccatagcgagtggctatcctaaaggggaaaagctggattggatcgttcagaaatccactgaattaggagcgcaagcttttcttggtttcccggcatcagcctctgtcgttaaatgggatgcaaaaaaacgtatgaaacgacaacaacggcttgaaaagattgctcaagaggcagcggaacaatcccatcggcagatcgtgccatcagtagagttattggaaacgaaacaagatttatttgagcggctagatgattatgacgtggtcttggttgcttatgaggaatcagcaaagcaaggcgaaaaatcaaatgcagccaaaattcttagtgaaacaaaaccagatagtcgaatcttagctgtctttggaccagaaggtggattatcccgcgatgaagtcgattattttgtagaacacaaagggatactttgtggattaggaccaagaatccttcgtacagaaacagcacctctttatttattaagtgctgctagctatcaatgggaattaatgaatccttctttcagc

SEQ ID NO: 21851 - DNA, 693 bp, Enterococcus faecium
atggaaatcatgcttgatacagcaaatacaaaaagtatttattcttgtcaacagtttttgaatttaacaggcgtaacaacaaatcctacaattctgaaaaaagaaggagcgtcaaacttcttctcgcatatgaaagaaatcaaaaaaataatcggacagattcctatccatattcagacaataggaagaacggaagaagaaatgatagaggatgctcgagttatcatagaagaactgggaaaagatacgtttatcaaggtgccggtgaatcaagcaggccttcaagcgatcaaaaagttgaaaaaagaaggttatttgattaccggtacagctatttacacagaattacaagggtatttagctattaataatggagcagattatattgcaccttattataacaggatgcaaaatcaaggcattgatgctatgaaagtgattgattcgttgcggactgagatcgaacgtacgcaaagaccaacaaaaatattagcagctagtttcaaaaattgtgaacaagtcactacagccattcgatctggagctcatgcgataacgttaggtaaagagctactagatcaagtattagagatgccctcgattgataaagcagtgaggggcttccaagaagattgggtgcaaactttccaagcagaaacgattggtgaactaaaaaaggtcgctgattacttc

SEQ ID NO: 21852 - DNA, 696 bp, Enterococcus faecium
gtggctaattatgaactcaatatcgcccacctttatggaaatttgatgaacacatatggtgataacggaaaccttttgatgttgaaatatatagcagaaaaaatgggggtttcttgccatacggagatcgttagtatacatgaaccttttgatgctgataaatatgacttggttttctttggcggtggtcaagactttgagcaattaatcatttcaaaagacatccagaaaaagaaagattctttgatcaactatatcgaaaatgatggcgtcatgttagccatttgtggtggctaccaattgctaggtcactactacatgggagctaatggagaaaagatccaaggaatcagtgcactggatcactacacgttaagtcaggaaaataaccggtttatcggtgatatcgttatccataacgaagaattcaatgaaacttattatggatttgaaaaccacaatggtcggactttcttaggtgaaggtgaacgacctttggggaaagtggtacaaggtcaaggaaataatggtgaagaccaatctgaaggtgtcatttaccgaaatgtcttcggttcttatttccatggacctatccttgcaagaaatgagaacctggcagctcgtttgatccgcctagctttagaacaacgttacggtaaagaattggatctgccctatcttgaaggacaaacagcc

SEQ ID NO: 21853 - DNA, 1293 bp, Enterococcus faecium
atgaatgattctatcaaaaaaatgctgcgattaatagagaaagatttgatgattacagaggtctcttacgagacctttcagaagaaaaagacgttgatcgtcgatgctgttttctcacctgctccccatacctgtagaaattgtggttctactgtggtagatggaaacgggaaagtaattgtagtgaaaaatgggaagaaggaaacgattgtccgctttgaacaatacaatcacatgcctttggttacgcgcttaaaaaagcagcgctatacctgtaaaaactgtcgaacccattggacggctcaaagttattttgttcaacccagacattcaatcgcgaatcatgtcagatataaaattgcttctttactgactgaaaaagtatctttatcttttattgcgaaaaattgtcaggtatctttgaccaccgttattcgtacgttgaaagagtttaaaagctacttaccaaagcaatctaagaggattctccccagagtattgatggttgatgaatttcgttcgcacgcttccatagaagataaaatgagctttatttgcgcagatggcgaaacaggacaattaattgatgtcttgcctacgcgtaaattgcctcgattaacaagctatttcttaggctgcgctaatcctgaagaagtaaaatttttagtcacagacatgaacgccgcctacttccagcttaccaaacgtattctgccaaatgcgaaagtagtgattgatcggtttcatattatcaaacacatgaatcaagcctttaatgagttgcgtatccgtgaaatgaatgaacttcgtaaagtaggacagaaaagtcaggcagaaaaactgaaaaagaactggcgctttttgataaaaaatcgtgcaaacatcaaccattatgaatacaaaacatggaaaagttttcgagcaccaaaatacccatttcttacggaagcgatgatgattgatcgattgcttggcttttctacgtccctgaaggaggcgtatccctattttcatgaattagttgaagcctttcgagacaaagaccctgacttatttttctccttattggcagaacttcccgaaacgttagatgacggctttcgggaaaagctccaaaaccttctgacctatgaagaaggcatcaccaacgcgatgatctatccttacaccaatggaaaaatagaagcgaagaatacccatataaagacaatgaaacgagtatcctacggatttaaatcatttgagaacatgagaattagaatctttttgatcaatcaattaatcaaagtaaga

SEQ ID NO: 21854 - DNA, 1500 bp, Enterococcus faecium
atgaaagatatgaaagcgctgcaaaatggatcggatattcgaggaatcgcattaccagttgaaggatatgaagtaaacttgacgacagacatggtaaaaaagatcggctggggactagcaaactggataaagaaaaagaagaaatcaaccgatccaaataaaaaatggacgattgggattggtcatgacagtaggataagcggaccagcactgaaagaggcgttgatccaaagtctgaaagaacaagggatacatgtcatcgatttcgaattagctactacgcctgctatgtttatgtccactcaatttgaacagttctcgtgcgatgctgcggttatgctgactgctagccatcttccctattattataatggaataaaattctttacctcagaaggaggagcagaaaaagaagatattgcttttatcctatcacagcagcaaaaaataaaaagcgaacaaactggaagcgtagaaaaagcagaccttttgacaccttatgcgcaagatttagtcacaaaaattaaaaaggggattggaacactagaaagcaaaccactaaatggttggaaaatcattgttgatgccggaaatggtgctggtggattctttgctgaaaaagtattgaatagcttaggtgcggattcaacaggttcccaatttttggaaccagatggccgatttcctaatcatatcccaaatcctgataataaagaagcgatggaaagtatcaagcaggctgttttagcaaatgaagcagatcttgggatcattttcgatacagatgtggatcgttctgcagttgtcagtgcttctggaacagtgatcaatcgaaataatttgatcgcagtattaagtacaatcgtattaaaagagcatccaggaacaagaatcgtgacgaattcccctacttcttctcatctacaaagattcattgaagaaaaaggaggcatccaagttcgttatatttccggctatcgaaatgtaatcaataaagcattagaacttaaccgtcttgggaaagatacacagctagccatcgaaacaagcggacacgctgcattcaaggaaaactattttctggatgatggtgcatatgtcatcgcaaagatcctgatgcttttgccagaattaaaaagaaaaggtatcacattagatgaacaaatcaaagagttgaaacagcccgtagaagtacaagaaatccgattaaaattgttcagcgatgaaccacgcgaacaaggaaacaagatattagaagaaatgaagcgactgttggaagaagaaaaagggatgaacttcgacccggaaaatgaagaaggtattcgatatgatctagaagagccatacggaaacggctggtttttgatccgtttaagcttacatgagccgttactagtattacagatagaaaatgatgaattcggaaagaacaagttggcgttagtaaaattagcaaaattattcggacatttttctgatcttgaatcattaacagcagaa

SEQ ID NO: 21855 - DNA, 834 bp, Enterococcus faecium
atgccagaattaccagaagtagaaaccgttcgtaaaggattggaacggttagtagtaggaaaaacgattcaaaaagttcaggtcttgtggcccaagatcatcgagcaaccagagacacccatctttgaggcttctcttgttggcgaaaccatccaatccattggacgtagagggaagtttttaatttttcatctcgatcattgtgaactgatctcacacttgcgaatggaaggaaaatatcaatttacgaaagaaaatacaccaatcgataaacatacgcatgtacttttcttttttgaggatggaagccaacttcgctacaacgatgtacgaaaatttggtcgtatgacaatcgtcgaaaaaggagcaagtgcaacttaccgaggaatcatgaaattgggacctgagcctttgccagatagcttcttattagcagatttcgcaaatggactgaaaaagtcccacaaagcaatcaagccattgctgctagaccaacgtctagtgactggtctaggtaatatttatgtagatgaagcattatgggaagcgaagatccatccagaacaaccggcgaacacactgcgccccaaagaggtagaacaattacgtctatcgatcattgatgttttggatcgtgcaatagaagccggaggtaccacgattcgcagttatttgaatgcattaggagaatcaggcggatttcaagtagcactgcatgtctatcagcaaactggcaaaccatgtatacgttgtggaacgccgatcgtgaaaacaaaagtggcacaaagggggacgcactattgtccgaattgtcaaaggctaaaaatcgcaaag

SEQ ID NO: 21856 - DNA, 684 bp, Enterococcus faecium
gtggataaaagcttttcagaaacatatctagattttaaacaaatcaacccggaaacgatgaatcaggctatccttgatacactatatatgacattaatctcaatggtcttagtgacgatcatcggattagttttgggattgatcctttactctattggacgcaaaaacaaaccgtatgctcgaatcatttatggaatcgtatcgatcatcagtaatattttccggtcaacgccatttatgatcctgatggttttgatcattccatttactaaagcaatcgtaggcactatgctaggtgcgcaagcagccattccagctcttgttttatccgcagcaccattttatgcccgtctagtagagattgcttttcgtgaagtcagccctggtgtactggaagcagcagatgcaatgggagcaagttactgggaaatcatctggaaggtcttgatacctgaaagtattcccgcattgatttctggattaacagttacaacgatctcgatgatcggatttactgcgatggccggcgcgatcggcgcaggtggacttggaggtcttgcttggcaggaaggctaccagcgtggtaatctaacagtgacattcgttgcgactttaattattttactaatcgtatttatcgttcaaggaatcggtgatttcttaactaagaaaacagacaaaaga

SEQ ID NO: 21857 - DNA, 1767 bp, Enterococcus faecium
atggcacaaagaacgatctattgcggattagtttccgaacaacaattagaacaaacagttacattaaaaggatgggtacaaaaaagacgagaccttgggggagtaatctttatcgacctacgtgatcgtgaaggaatcgttcaaatcgtctttaatcctgaaatcaacaaagaagcatgggaaatcgcggataaatgtcgcagtgaatacgtgatcgaagtgactggggaagttagaagacgcggagaaaatgcagtaaatcctaaaatggccactggtgaattcgaagtgattgcaagtgaaatcgtgattttgaatcaagcaaaaaccccgccatttcaaattgaagatgatcaagcaatcagtgacgaaatacgtttgaaatatcgttatttggatctgcgtcgtccaaaaatgactaaaaacatcaaattaagaaatgcgacaacaaaagcgattcgtcattatttagatgataatgactttctcgatatcgaaacaccttacctagggaaatctacaccagaaggcgcaagagactacctagttccttcacgtgtccatgctggacatttctatgcgttgccgcaatctcctcaattgtttaaacaattgctgatgaatgctggattcgaccgttattatcaaatcgttcgttgtttccgcgatgaagatttacgtggagaccgtcagcctgaatttacgcaagtagatattgaaacaacgttcttaacagcagaagaaatccaaacttacacagagggattgattgcgaaggtaatgaaagaagttcgcggtatcgaagtcacattgccatttcctcgtatgacctatgatgaagcaatggctcgctacggcagcgacaaaccggatacacgttttgatatggaattgatcgatctaagcgatacagtcaaagaagtagaattcaaagtcttccaaatggctcttgaaaacggcggtgtcgtgaaagcattgaatgctaaaggcgctgcagatcgctactcacgaaaagacatggatcagttaggtcaatatgtaggacaattcggagctaaggggcttgcatggctgaaagtagaagaagacggattgaaaggtccaattgctaaattcatgggagaagcaacagaagcaatcattaaagcaacagatgcaaaaccaggtgacttgctgatgtttggcgcagataaaagtgaaatcgtcgctgctgcattaggtgctatccggacacgtttaggaaaagaattaggactaattgatgaatcgaaattcaatttcttatgggtaactgattggccacaatttgaattttcagaagaagaaggtcgatatgtctctgctcaccatccattcacgatgccaaaagaagaagatatcccgttattggctgaagaccctgcaaaagtctatgcagaagcttatgatatcgtcttgaacggttatgaactaggcggaggttctatccgtattcatactcgtgagcttcaagaaaaagtactagaaactctaggctttacaaaagaacaaatggaagaacaatttggtttcttgttaacagctttagattacggattccctccacatggcggtattgcattaggattggaccgttttgcaatgttattagccggagaagataatattcgtgaagtcattgcctttcctaaaaacggaaaagcagcagatgtgatgagtgatgcaccaagtatggtttcgcctttacaattgttcgaattgaatattgatgtaacgaatatagaagaa

SEQ ID NO: 21858 - DNA, 1269 bp, Enterococcus faecium
atgttagatgtaaaaatgatgcgacaaaatattgaagaagtacaagaaaaattgatgactcggggcgtaaaaaaagaaacattagctgaattcatggaactagatgaaaatcgtcgtaagctactagtcaaaagtgaagaattaaaaaaatatcgaaatgatgtttctgctgagatcgcccaattgaagcgtgcaaaagaagatgcttctgctaaaatcgctgaaatgaaagaagtcggtggcaacatcaaagcattggatactgaaattgctgaagtggatgaaaaattgaaacaaattgcaactactttgccaaaccttccccatgattctgtgccagttggaacagatgaagaggacaatgtagaaatccgtcgttggagcgaaccacgtacatttgcttttgaaccaaaaccacactgggaaattgcagaaaatcttgatattttagattttgaacgtggcgcaaaagtagccggtagccgttttgtctattacaaaggattaggtgctcgattagaacgtgctgtctacaacttcatgcttgatcagcatatttacgaacacggctatactgaaatgatcactccttatatcgtcaacagtaaagcgatgtttggtacgggacaatttccaaaattcaaagaagatgttttccaattggagaatactgatctaacattaatcccaacagctgaagtaccattaactaactattataatgatgaaattttagatggtgcagatttacctatttatttcactgcactaagccctgcttttcgttctgaagccggaagtgctggtcgggatacacgaggactgattcgtcttcaccaattcaataaagtagaaatggtcaaattttcggatgtagagcattcttacgaagaattggaaaaaatgacagctgatgcagaagatatcttgaaaaaattgcatttgccttatcgtgtgatggccttatcaactggagacatgggcttttctgcagctaaaacttatgacttagaagtatggatacctgcacaagatacttatcgtgaaatcagttcttgttctaactgtgaagatttccaagcacgccgcgcaatgatccgttatcgcgataatgatggaaaaatccactatactcatactctgaatggttcaggacttgcagttggccgtacagtagctgccattttggaaaactaccaaaatgaagatggttctgtcacagttccagaagcgctcgttccttatatggggaatctgaaagttattaaa

SEQ ID NO: 21859 - DNA, 774 bp, Enterococcus faecium
atgatatttgattctcatacccatttaaatgctgaacagttcaatgaagatattccagaaacgattcagcgagcacaagaaatgggggtaacgaaaatggcggtcgtgggcttcgatacgccaacgattgaaaagtctttgcaattaagccatgactatccaaatatatacagtattatcggctggcatccgacagaggctggcagttatacgaaagaaatcgaaaataaattacaagaacaattgactttaccaaaggttgtagcattaggggaaattggcttggattatcattggatggaagacccgaaagaagtccaagataaagtatttcgcagacagattgctatcgcaaaagaaatgaacctaccaatcagtattcatactagagaagcacttgaagacacgtatcaaatcctaaaagaagaagatgttcgagatatcggtggaatcatgcatagtttcagtggtgattatgaatgggcaaaacgatttcttgacttagggatgcatatttcatttagcggtgtcgtcactttcaaaaaagcattagacgtccaagaggctgcagcaaatgtaccaatcgaacgattacttgtggaaacagatgccccttatctggcaccagttccttttagaggaaagcgaaatgaaccaggctatactcgttatacagtagaaaagattgctgaacttcggaatcttccgacagaagaagtggctgcccaaacatggacaaatgcgcaccgattatttggtctaagcgaacatgga

SEQ ID NO: 21860 - DNA, 999 bp, Enterococcus faecium
atgatgtcaaattcgtcagtaattgatgcaatgtgttataataattcagttaaatcaaaaatgaaatggagaaaagacatggacgggttattacctttatggaaagaacgcggaatgacaagtcatgattgcgtattcaaattaagaaaaatcttacatacgaaaaaaatcggacatgggggtacgcttgacccagacgtagacggtgtgttgcccatttgtattggaaaagccacaaaagttatcgaatatttgacagattctgggaaaatctatgtaggcgagataactctaggtttcagtacaacgacggaagatcgatccggagaacgggtagaaacaaaaccagtagatatgtctttatctgaaaaaaaaatagatgaagtgatggcttcatttattggtgagatcacccagataccaccaatgtactcagcggtaaaagtcaacggtaagcggttatatgaatatgcccgcaataatgaaacagtggagcgtcctgttagaaaggctcagatttaccgttttatccggacaagtgaattgacaagagacgaagtgacaggaaccatttcttggcgcttcgaagtagaatgcgggaaaggaacctatgtccgcacattagctgtagatacaggcaagaaacttggttaccctgcgcacatgtctgatctgacccgaacagcaagtgccggtatgtcccagaaggatgctctgacattagaagaagtagctcaagctgtgaaaaatgggacaatcgatgattgtttgctgccaatagaaaaaggagtggaacggttcaaacgagtagatattactgatgaagtatggcagaaagtaaaaaacggtatgagacttgattatactgtatttgcgctcccagaaatgccgtcagaagaaattgctttgttttataaaggaaaagttgtcagtatttatcagccaaacccgaaagaaaaaaacaaattaaaacctagtaaagtattgagaaatgaggaa

SEQ ID NO: 21861 - DNA, 1814 bp, Enterococcus faecium
aaaggatcattatttgagcgaataggggatgtgttgaaaaaaacaaataaggtaagaaatgttcaaaaagtcgttaaggcactattcaaacgagaggaggagatctccacaggaatagaagatggatttgggattccccatgcaaaaagcaaatatgtgacaaaaccagcactgtgtttttttcatacagccaaattaacggactatagcgggatagatgaaatgccaattgaatatatttttgccatcgtagttcctgaaaaatcagcagatatgcatctagagattctcagcacactctccagacgattgatgaatgcagattttagaaagggaataaaagaagccactacgccagcagatatcatcagacagattagtcaagaatgaaaatagtagagtctttgtccgagtatcgatagtgaagaaaaaggaggaaaataatcatgaaaatcgttggtgtaactgcttgcccgactggaattgctcatacttatatgtcggcagaaaaattagaagtaacagcaagaaatctaaaccatcaagcaaaattcgaaacacaaggtgtaaaaacagaaaatcagttatctgaacaagaaatcaaagaggcagatgcaatcattcttgcagtagataaagaaatcgaattggaccgatttgccgggaaaaaagtaaagcgtgtctctacaagccgagcaatcaaagaaccgcaagtagtaatagacgaagcattgagagatattggcgtattcgttgtgtctaatgaaaaagaaccagctgcaaatgagaaaaagccgacaatctataatcatttcatgaatggtgtgaattacatgcttccatttgtgatcgcaggcggaatcatcatcgcactgagttttgcctttgggattacagcggctgatcccaactcagcagactataatgtgttagcagctgcattttcaaggatcggaggagatacagcgtttgccatgatggttcctgcgttaggcgcggggattgctacatcgattgctggaaaagcaggttttgccccaggaattgttgccggattactggcctctacaggtggttcaggttttcttggcggaatgattggtggcgtgctagcagggtatatctgtgattttctggcaaataaaattagcgtaaaaaaagaattttctgctatttatcagctgattgtcgtcccctttttatcgatcttaattattgggcttttgatggtatttgtgattgaacaaccgatcacatgggtgttggatgctttgacaaattggctgaatagcttgggaaatacatccgggctattgttcggattacttatcgggatcatgatggcagctgatatgggtgggccgatcaataaatcgacttcgactttctcgatcggtttgatgtcagctggagtaaatgcaccgattgctgcttgtatggctgcaggaatgacacctcccctaggtattgctttagccactttattattcaaacataaatttaccaaagaagaacggacttcaggtcaatcatgctggattttaggcgcttcgtatattacagaaggtgctataccgtttgcggtatctgacccgatccgcgtgatacctagtttgatgacaggttcagcagtcgctgcagggatttccatggcagtaggagttacttcaatggcacctcatggagggatttgggtgatgctaattccaaatgttatgaacaatttacctatgtatgtcttggcaattgcatcaggtacagtcactacagcctttatgcttggactattgaaaaaaacagtgaaagagaaaaaa

SEQ ID NO: 21862 - DNA, 975 bp, Enterococcus faecium
atgaaagtatttgattacgaagatattcaattaattcctaataaatgtatcgtaaatagccgttctgaatgtgatacaacggtcacattaggtaaacatacattcaaaatgccagtagtgcctgccaacatgcagacgattattgatgaaacaatcgcagaattcttagcggaaaatggttatttctatatcatgcatcggtttgatgaagcagctcgaattccgtttatcaaaaaaatgaaaaagcgtggattgattacctcgatcagtgttggcgtcaagaaagaggaatattcctttatagagaagttggcagaagaatcgctaaatcctgattatatcactatcgacatcgcgcatggacatgctaactcagttattgatatgattcagcatattaaaaaatatttgcctgaaacttttgtgattgccggtaatgttggtacaccggaagccgtccgtgaattggaaaatgcgggcgcagatgcaacaaaagtcgggattggtccaggaaaagtatgtattacaaaaatcaagacaggctttgggactggaggctggcaactggcagctcttagatggtgtgcgaaagcagctcgcaagccgatcatcgctgacggtgggatcagaacacatggcgatattgcaaaatctgtccgttttggtgcgacaatggtcatgattggttcattgtttgccggtcacgaggaatctcctggcgaaacaaaagtcgaaaatggaatcgtgtataaagaatactttggttctgcttcagaattccaaaaaggcgaaaaacgaaatgttgaaggaaagaaaatctggatccaacacaaaggatctttgaaagatacactagtggaaatgcaacaagaccttcaatcatctatttcttatgctggaggaagagatctggaagccattcgaaaagttgactatgtcatcgtgaaaaattcgatttttaatggagacacaatc

SEQ ID NO: 21863 - DNA, 909 bp, Enterococcus faecium
tggttattgggatccggacttgtcagtatcctgctctttttatctggctgtgtgcggatggattcaaacggaaaccctgacacttcaggaatcgtttatcgagtactcgtccatcctatgggccaagcgattacatatctagttgagaatttcaattggtcttacggctgggcagttattgcaatgactgtgatcgtccgtatcatcatcttgccactaggtatcagtcaatcaaaaaaaacaatgatccaatctgaaaaaatgcaagcgttaaaaccacaagttgaagcagcacaacaaaaactaaaagctgcaacaacacgtgaagaacaaatggcagcacaagcagaaatgcaacaagtatatcgcgaaaacggattgagtatgaccggcggaatcggctgtctgcctctattgatccaaatgccgatcttctctgccttgtattttacggctcgctacacagaaggtatccgtgaatcatctttttacggcatcgatctaggctcaccaagtatggtgcttgttgccattgcaggggtcgcttatctgcttcaaggatatatttcaacaatcggtattcctgaagaacagaaaaagacgatgcgtacgatgctgatcgtctctcctgctatgatcgttttcatgtcgatcagtgcgccagccggtgttacactttactgggtagtgggtggtgtgttcagttgtctgcaaacattcatcacaaacgttatgatgaaaccacgtttgaaagcacaagtggcagaagagttgaaacaaaatccgccaaaacaagtcgtcactccaagaaaagacgtgacagaatcggcaaagccagctgacaataaacaaccaaaaaacagtacaaacaacaaaggccgcaacgcaggaaagcagcaaaagcggaaa

SEQ ID NO: 21864 - DNA, 287 bp, Enterococcus faecium
aaaacagcacataaggaggcagattttgttgtcatttttgctcctacaaactatggtagtgaatgtgttattgaactagtgatgtctgttacttcagaggcattggggataattaaattcactatacctgtagggtatacaaaaaatggaagaaaaaaatattatcaatagattttatttagttcagaatttttacgtgaaagtaaattattgatgataatctttatccaattagaattattatcgtaggatatgatgatgaaagccgtgaaattgttcaagtattt

SEQ ID NO: 21865 - DNA, 1020 bp, Haemophilus influenzae
atggcaattaaaattggtatcaatggttttggtcgtatcggccgtatcgtattccgtgcagcacaacaccgtgatgacattgaagttgtaggtattaacgacttaatcgacgttgaatacatggcttatatgttgaaatatgattcaactcacggtcgtttcgacggcactgttgaagtgaaagatggtaacttagtggttaatggtaaaactatccgtgtaactgcagaacgtgatccagcaaacttaaactggggtgcaatcggtgttgatatcgctgttgaagcgactggtttattcttaactgatgaaactgctcgtaaacatatcactgcaggcgcaaaaaaagttgtattaactggcccatctaaagatgcaacccctatgttcgttcgtggtgtaaacttcaacgcatacgcaggtcaagatatcgtttctaacgcatcttgtacaacaaactgtttagctcctttagcacgtgttgttcatgaaactttcggtatcaaagatggtttaatgaccactgttcacgcaacgactgcaactcaaaaaactgtggatggtccatcagctaaagactggcgcggcggccgcggtgcatcacaaaacatcattccatcttcaacaggtgcagcgaaagcagtaggtaaagtattacctgcattaaacggtaaattaactggtatggctttccgtgttccaacgccaaacgtatctgttgttgatttaacagttaatcttgaaaaaccagcttcttatgatgcaatcaaacaagcaatcaaagatgcagcggaaggtaaaacgttcaatggcgaattaaaaggcgtattaggttacactgaagatgctgttgtttctactgacttcaacggttgtgctttaacttctgtatttgatgcagacgctggtatcgcattaactgattctttcgttaaattggtatcttggtacgataacgaaacgggttactcaaacaaagtattagacttagtagctcatatctacaactacaaaggctaa

SEQ ID NO: 21866 - DNA, 789 bp, Haemophilus influenzae
atgatgtataaagcagtatttagtgattttaatggcaccttattaacctctcaacatacaatttcccctcgaactgttgtggtaattaagcgtttaacggcgaatggcattccttttgtgccaatttcggcgcgttctcctttaggtattttgccttattggaaacagcttgaaacgaataatgtacttgttgcatttagtggtgcgcttattttgaaccaaaatctcgaaccaatttatagcgtacaaattgagccaaaagatattttagagattaatactgttttggcggaacatcctttgcttggcgtgaattattatacaaataatgattgccatgcgcgcgatgtagaaaataaatgggtgatttatgaacgcagcgtgaccaaaattgagattcatccttttgatgaagtagcgacacgttcgccacataaaattcaaattattggggaagcagaagaaatcattgagattgaagttcttttaaaggaaaaatttccacatttaagtatttgtcgttcccacgctaattttttagaggtaatgcacaagagtgcaaccaaaggaagtgcggtgcgttttttggaagattattttggcgtacaaactaatgaagtgattgcatttggcgataattttaatgatctggatatgctagaacatgtggggcttggtgttgcaatgggaaatgcgccaaatgaaattaaacaagctgcaaatgtggttacggcaaccaataatgaagatggacttgcattgattttagaagaaaaatttcctgaataa

SEQ ID NO: 21867 - DNA, 909 bp, Haemophilus influenzae
atgagtatcaaaatcttatctgaatcagaaattaaacaagtagcaaattcatatcaagccccagcggttttatttgccaatcctaaaaatctttaccaacgcagagcgaaacgtttaagagacttagcacaaaatcatcctctatctgattatttattatttgctgcagacatagttgaaagccaactttccacgttagaaaaaaatcctttaccgccacaacagcttgaacagttaaatactatcgagccactaaatgccaaaacctttaagagaaacagtatctggcgtgaatacttaacagaaattcttgatgaaataaagcccaaagctaacgagcaaattgctgcaacaattgaatttcttgaaaaagcctcttccgctgaattagaagaaatggcaaataaactcttagcacaagaatttaacttagtcagcagtgataaagccgtctttatttgggctgcactttccctttattggttacaagcagctcaacaaattcctcataatagccaagttgaaaacgctgaaaatttacatcactgccctgtttgtggttctttacctgtggcaagtatggtacaaattggtacatcacaaggtttacgctacttacattgtaatttatgtgaaagtgaatggaatttggtacgcgcacaatgcaccaattgtaatagtcatgacaaactcgaaatgtggtcactaaatgaagaacttgcgcttgttcgtgccgaaacctgtggtagttgtgaaagttacttgaaaatgatgttccaagaaaaagatccttacgtagaacctgtagccgatgatttggcttctattttcttagatattgaaatggaagaaaaaggtttcgcccgaagtggattaaatccatttatttttcctgcagaagaagcataa

SEQ ID NO: 21868 - DNA, 993 bp, Haemophilus influenzae
gtgatttctctagaaagccaagttttagaacgccatatttcattttttgatggtaaatcggtattatttgctggcggtatttctgatagttttcctcaaacattagcctcaaaatgctcatcaatccaaatttggagttgctattttgactatgcaagaacacaaagtgcggtcaatttttccgttgaatttcaaggtcaagcggatttaatcgtttattattggactaaaaacaaacaagaagtcaatttccaactgattcaactattagctcaagcatctattggtcaagaaatattaattattggtgaaaaccgttgtggcgtgcgttcagtagaaaaaacattatcaccctatggagaaatagcaaaaattgactctgctcgtcgttgcggtttatatcatttttcactccaaaataaaccgcactttgaacttaaaaatttctggagaacctaccaacattcaacacttgaaaacttaactatatatagtttacctggggtatttagtgcggcggaattagacacaggcacagaactgttactttcaactattgataataaaataaaaggaaaagtgcttgatcttggctgtggggcgggggtaattggctctatgataaaaaaacgcacgcctaacgcacaaattacaatgacagatattcacgcaatggcattagaatcagcgcgtaaaacactttctgaaaatcaattacaaggcgaggtttacgccagtgatgtcttttctgatatagaaggaaaatttgatttgatcatttctaatcctccattccacgatggcattgataccgcctatcgagcagtgacagaactcatcactcaagcgaaatggcatctcaatcaaggtggagaattacgcattgtcgccaattcatttctgccttatcccgaattacttagacaacatttcaatgattatcaagttcttgctcaaacaggaaaatttaaagtgtattcagtgaaaaattag

SEQ ID NO: 21869 - DNA, 909 bp, Haemophilus influenzae
atgaccgaacaattcgacaaaacctattgcggctttattgctatcgtaggtcgcccaaatgtgggtaaatcaacgctcttaaataaaattttaggacaaaaaatttcaattacatcgcgtaaagcacaaactacccgtcaccgcattgttgggattaaaactgaaggtgcgtatcaagaaatctacgtggatacaccggggcttcatattgaagaaaaacgggcgattaaccgcttaatgaaccgcgccgcaagtagtgctatcggcgatgttgatttaattatttttgtcgtagatggtacacactggaatgcagatgatgagatggtgctaaacaaactacgtaatgcaaaagcacccgttgtgcttgctatcaacaaagtagataacatcaagaataaagatgatttgttgccgtttattacagatcttagcagtaaatttaactttgctcacattgtgccaatttctgcacagcgtggtaataatgttcatgaattagagaaaattgtacgccaatctttacgtgaaggtgtgcatcattttccagaagattatgtcacagatcgttcgcaacgttttatggcctcggaaataatccgtgaaaaattaatgcgttttaccggtgaagaattgccttattctgttactgttgaaatcgaacaattcaaagtaaatgaacgtggcacttatgaaataaatggcttaattctcgttgaacgtgaaggtcagaaaaaaatggtcattggtgcgggcggtcaaaaaattaaaactattggtatggaagctagagccgatatggaacgtttatttgataacaaagtccatcttgaactttgggtaaaagtgaaatctggttgggctgatgatgaacgtgcgctgcgtagtttaggatatatggatgaataa

SEQ ID NO: 21870 - DNA, 1050 bp, Haemophilus influenzae
atgtcaaatttattttttgtgattttattggctgtcggctttggtgtgtggaaagttttagattattttcagttaccaaatacttttagtattttgttactaattttgaccgcactttctggcgtattatggtgttatcatcgttttgtggtgctgccaaaacgtcatcgtcaagtggcacgtgcagaacaacgttctggtaaaaccttaagtgaggaagaaaaagccaaaattgaaccgatttctgaggcttcagaatttttgtcttcactttttcctgtgcttgcagtggtatttttggttcgttcttttttgtttgaaccgtttcaaattccctctggctcaatggagtccactttacgcgttggcgattttttagttgtgaataaatatgcttatggtgtgaaagatccgattttccaaaacaccattattgcaggcgaaaaaccacaacgtggcgatgtgattgtgtttaaagcaccacaacaagcgttaattcgtactggtcttggggcaacacgagcggcttttgcagaaaatttagcgttaagttcaaaagataatatgtctggtgtggattatattaagcgtattgttggaaagggcggagatcgcgtcatttttgatgtggaacaaaaaacgctaaaagtggtatatggtaaagaggggaaaccctgtgaaattgattgcgaaactaaggcgtttgaatatacacaaaatccaacaaatcctgcttttccaaatgaattagaattgactgaaaaaggcgatgtaacacataacgtgttaattagtgagtatcgtcgttattcagaccttgaatttttcccacaagagggaatgcaaactgcagaatggcttgtgccagaggggcagtattttgtgatgggggatcatcgcgatcacagcgatgacagtcgtttctggggctttgtacctgaaaaaaatattgtgggtaaagccacttatatttggatgagcttagaaaaagaagcgaatgaatggccaacaggtttccgttttgagcgtttctttacagcaataaaataa

SEQ ID NO: 21871 - DNA, 1503 bp, Haemophilus influenzae
atgacaacaagagaacaacgtattgaaaaatatcacgctgatcgctcagtctatcaagcggtgcctaaatctgaatccctttctcgtacagcgaaagatcgcaaactttgtacctctctagaagaagcgattaaacgctctggcttaaaagatggtatgactgtttcatttcatcatgcttttcggggcggagattttgtggtgaatatggtgatgaataaaattgccgaaatgggtttcaaaaatctgacccttgcatcttcatctttaattgatagccacttcccgattgtcgaacatatcaaaaatggcgtggtcaccaaaatctattcttctggtttacgcggtgaacttgcagagcaaatctctcgcggtttattgaatgaacctgtaaatattcattctcatggtggacgtgttcacttagtaaaatctggcgaattaaaaattgacgttgcttttttaggcgtgccttgctgtgacacattcggtaatgccaatggatttactggaaaaagtaaatgcggctctctaggctatgcgcgtgtcgatgctgaatatgctgacaaagttgtgttgctcacagaggaatttgttgaatacccgcaccacccaatcagcatagctcaagatcaagtagatttaatcgtgcaagttgaagcagtcggtgacccgaaaaaaattggtggtggtgcaacccgaatgactaccaatccacgcgaattactcattgcgcgtaaatgtgcagaagtaatttttgccagtggttattttaaagatggcttctcattacaaactggttctgggggggcagcattagctgttacacgctttctagaagaaaaaatgcgtcgtgaaaatatcactgcagatttcgcacttggcggaattactgcaagtatggtggcattacatgaggctggtcttattaaaaaattattagatgtacaaagctttgattctgttgcagctgaatcacttgcccgtaacccaaatcatattgaagtctccgctaaccaatatgcgaattacagttccaaaggcgcatctgttgaacgtttagatatggtgattctttctgctttagaaatcgacactaaatttaacgtgaatgtattgactggctctgacggtgtgattcgcggtgcatctggtggtcattgtgataccgcagcttctgcacaagtagcaatcattgtggcaccattagttcgtggtcgtattccaaccgtggtggaaaacgtgattacctgtgtaacacctggtgaaaacgtcgatattctcgttaccgatcatggtgtagcagtaaatcctaaacgtccagatttgattgaagctttaagcaaaacagacattccattgtttactattgaacaactttgtgaacgtgcttacagcattactggtaaaccaaaagaaattgagtttactaataaacctgtggctgttgttcgttatcgtgatggttcggtgattgatacggtgtatcaagttaaagactag

SEQ ID NO: 21872 - DNA, 876 bp, Haemophilus influenzae
atgaaattaagaagaagtatgttatttgtgccgggctcaaatgccgccatgttaagtaatagctttatttataaaccagattccattatgtttgacttagaagatgcggttgctctcaaagaaaaagattctgctcgtttattagtcgctcatgcacttcaacatccgctttataaagaaattgagaccgtagttcgtgttaatccgctagattctgaatttggtttattggatttgaattcggtagtgcgtgcgggtgtggatgtggtacgtatgccaaaaactgaaagcgcgcaagatgtgttggatatggatcacgccattactgagattgagaaagcttgcggtcgagaagcaggttcgactaaaatgctagccgcaatcgaatcgccattaggtatcactcaagccaaccaaatcgctttcgcttctaaacgtttaattggtatcgcattgggtgcagaggattacgtacgtaacttaaaaaccgagcgttcaccagaggggattgaactgctttttgctcgttgttctattttacaagcggcacgtgcggctggcattcaggcttttgataccgtatattctaacgcgaacaatgaagaaggcttcttaaaagaggctgcgttaattaaacagcttggttttgacggtaaatccttaatcaacccacgccaaattgaattgttacacaacttatttgcaccgacacaaaaagacgtggagcaggcaaaacgcattattgaagcggcagtagaagctgaacgacaaggggctggtgttgtttcgttaaacggtaaaatgattgacgcaccgattattgatcgcgcaaaacttgtattagaacgtgcgaaatcaggtattcgtgaagagtaa

SEQ ID NO: 21873 - DNA, 963 bp, Haemophilus influenzae
atgtctacgcctttcaaaatggaacgcggtgtaaaatatcgcgatgcggcaaaaacctcaattattcccgtaaaaaatatcgatcctaatcaagatttattaaaaaaaccagaatggatgaaaattaaacttccagcaagttcagctaaaattgaaagcattaaaaatggaatgcgccgtcacggattacattctgtttgtgaggaagcatcttgtccaaatttacacgaatgttttaatcatggcacagccacttttatgattttaggtgcaatttgtacgcgccgttgcccattctgtgatgtggctcacggtaaaccattaccgccagatcctgaagagccacaaaaattggcagaaacgattcaagatatgaaacttaaatatgtggtaatcacatcggtggatcgtgatgacttgcctgatcgtggtgctggtcatttttctgaatgtgtaaaagctgtgcgcgagcttaatcctaacattaagattgaaattttagtgcctgattttcgtggtcgcattacacaggctttagagaaattaaaagataatccgccagatgtctttaaccataatttagaaaacgtaccgcgcttatataaagaaattcgtccaggtgcggattacgaatggtcacttaaattattgcgtgaattcaaagaaatattcccaaatatcccaaccaaatctggtttaatggttgggttaggcgaaaccaacgaggaaattttgcaagtgatgcaagatttacgtgataacggtgtgactatgctcacgttgggtcaatatcttcaacctagccgccatcatttgcctgttgcccgttatgtgccgccaactgaatttgatgaattccgtgataaagccaatgaaatgggctttgaacatgcggcttgtgggccatttgttcgttcttcttatcacgctgatttacaagccagtggcggattagtgaaataa

SEQ ID NO: 21874 - DNA, 468 bp, Haemophilus influenzae
gtgaaaatcacgttaattgccgtcggaacaaaaatgccttcttgggttacaacgggttttgaggaatatcaacgccgtttcccaaaagatatgccttttgaactaattgaaatcccagcaggcaagcgtggaaaaaatgctgatattaaacgcattttagaacaagaaggtaaagcgatgttagcggcctgtggaaaaggcaaagtcgtgacgttagatattcctggtaaaccttggacgacgccgcagctagctgagcaactagaagcgtggaaaaatgatggtcgcgatgtttgtttattgattggtgggcctgaggggctttcgccagaatgcaaagctgctgcagagcaaagttggtcgctttctcccttgacattacctcacccgcttgttcgtgtcgtggtggctgaaagtttgtatcgtgcgtggtcgctaaccactaatcatccttatcatcgagaataa

SEQ ID NO: 21875 - DNA, 1779 bp, Haemophilus influenzae
atggattacagccaagaagctattacttctcttatttggattttacaaacgctagccatcacctcagtcgtctttagttttggcatttttcttttggtgcgttttacccaatggggaaaacaattttggatgtttgcaggcggttatctttcacctaaacgtagcattaaacctatcttattctttctgcttattgttgcaatgacattacttagcgtacgtatcagccttgtaaattctgagtggtataaaaatatgtatacctcattgcaagaatttaatgaacatgtattttggcaacaaatgggcttattctgcgtcatcgcagcaagttctgtttcagcagcattagtaagctattatttagagcaacgtttcgtcatcaactggattgaatggcttaacgagcagcttgttaataaatggatggcacatcgcgcctattacaaaacacagtatttatcagaaaatcttgataaccccgatcaacgtattcaacaagatgtgcaatcttatgtaaaaaccacgctttctttaagcactggcgtcattgatgcggtcacctcgatgatctcttacacgattttgttatggggattagccggtccaatgatagtgcttggtgtagaaattccgcatatgatggtatttttagtgtttggttatgtcattttcacaaccctcatcgcattctggctcggtcgcccattaatctcattgaattttattaatgaacgcctaaacgcaaactatcgttattctttaattcgcattaaagaatatgctgaaagcattgctttttatgcaggcgaaaaagtcgaaaaaaatcagctttatcagcagttcaacgccgtcattcacaatatgtgggtcattatatttagaacactaaaattttcaggatttaacctagtcgtaagccaaatttctgttgtttttccattgttaattcaagttggacgttactttgaaaagcaaataaaactaggcgatctaatgcaaaccttgcaagtatttggtcagttacacgcaaatctttcattcttccgcagtacttatgataattttgcaagctataaagcaacgctagatcgtttaactgggttctgttatgccattgaaaaagcaaataataaatcacaaacacagatccacaatcatccaacagatgtgattttcaaaaatttaagtattcaaaatccattaggtcatacactaattaaacatctaaacattaccttaccgcaaggaacaagtttgcttattcaaggaaaatctggagcaggaaaaaccacgcttttacgcaccattgcggggctttggagctatgccgagggggaaataaattgccctacgcacaatcagcttttcttgtcacaaaagccgtatgtgccacaaggaaatttaatgtcagcattagcttatccaaataacgctgacaatatttcacatacacaagctgtagaaatattaaataaagtacaactaggacatttggctgaacaattagaaaaagaacaagactggacgcgtattctttctcttggcgaacaacagcgtttggcgtttgcacgattaattctacacaaaccagcggtggcatttttagatgaagccacagctagtatggatgaaggtttagaattttcgatgtatcaattgttacaacaagaactaccacaaacgacaatcatcagtgtgggacaccgttcaacccttaaaaccttacatcaacaacagttaattctgcaagacaaagggcaatggcaagtgctataa

SEQ ID NO: 21876 - DNA, 1137 bp, Haemophilus influenzae
gtgcaattttttgtatgtttgacaaagtcattttctactttttgtcaaacaaaactaactttcattttaaacggtataattatgttatttaaaaaaattcgtgggttgttttcaaacgatctttctattgatttaggcacagctaatactttaatttatgtcaaaagacagggtattgtacttgatgaaccctctgttgttgcgattcgtcaagatcgcgtaggcacattaaaaagcattgcagctgtgggtaaagaagctaaattaatgttaggtcgtactcccaaaagtattgtagcaattcgtccgatgaaagatggcgttattgcagacttttttgtgacagaaaaaatgttgcaatactttatcaaacaagttcatagcggtaattttatgcgtccaagcccacgtgtattagtatgtgtgccagctggtgcaacacaagtagaacgccgcgcaattaaagaatcagcaatcggtgctggtgcacgtgaagtatatttaattgaagaaccaatggcagctgcaattggggctaaattacccgtttctactgcagttggttctatggtaattgatatcggtggcggtacgacagaagtggctgtaatttccttaaatggtatcgtatattcttcttccgtgcgtatcggtggtgaccgtttcgacgaggcgattatttcttatgttcgccgcacttttggctcggttatcggagaacctaccgccgaacgcatcaaacaagaaattggttctgcttatattcaagaaggtgacgaaattaaagaaatggaagtacacggacataatttagccgaaggtgcgccacgttcatttactttaacatcacgtgatgtcctagaagccattcaacaaccattaaacggtattgtagcagcggttcgaacggcacttgaagaatgccaaccagaacacgcagcagacattttcgaacgtggtatggtattaactggtggcggtgctttattacgtaatattgatattttactttctaaagaatctggtgtccctgttatcatcgcagaagatccattaacctgtgttgctcgtggtggtggcgaagcattagaaatgatcgatatgcacggcggcgatatttttagtgatgaaatttaa

SEQ ID NO: 21877 - DNA, 1029 bp, Haemophilus influenzae
atgaaggagcgaatcaaagcaatatgtttagaaaaaccaaacaatgtagttgttaaagaagtgccttatcccgagaaaagtgataatgatgtacttattcaggtagaatcaatggggatttgtggttctgatattggtgcatatagaggaactaatccattagtaacttatccaagaatacttgggcatgaaattgtagggagagtaattgaaagtggaattggtatgtcagatggggtaagggttggagaccgagtaattgttgatccttatgtttgttgtggtcaatgctatccttgttcaattggtagaaccaattgttgtgaatcattaaaggtaattggtgttcatattgatggaggtatgcaagaggtaattagacatcccgctcatcttttaactaaagtcccagataacctaccgattcatcaattacctttagctgaacctttaacaatagctttacacgctttacatagaacaactttaaaatcaggggaacacatagtaattattggagctggtgcaattggattaatggctgcattagcagcggttcaatatggagcaatcccaattttagttgatatattagaacaacgtcttgagtatgcaaaatccttgggaattgaacatattgtaaatccgcataaggaggatgacattaaaagaattaaggaaattacaagtggtcgtatggctgaagttgttatggaggcatctggtgctaatatttctatcaaaaatactctgcattatgcctcctttgcaggaagaattgctttaacaggatggccaaaaacagaaactccattaccaacaaatttaattacctttaaagaattgaatatttatggttctagaacaagcaagggggaatttgaggaggcattggatatgcttgctactaataaaattaatgcatctcatatcattactaagtgtatcaaatttgaagaaattcctagttttatttctgatttatctgatcatccagaaaattatttaaaaattaatgcagttttctaa

SEQ ID NO: 21878 - DNA, 801 bp, Haemophilus influenzae
gtgagccatatcacaaaaataaaaaattggaataccaatttaaggaaaaatatggaaaatatagtaaatagaacatatacccgaataggtcaattgctaaaacaagatatttctcaaggaatttatagcattggagacaaactccctacagaacgagaaatttctgaaaaatttggtgtaagtagaactattgttagagaagcaatggttatgttagaagtagaaaagttagtagaggtaaaaaaagggtcaggcgtttatgtagtaagaacccccgaatcaatacatatggaacattcagatttaccagatgtaggtccatttgaacttttacaagctagacaactattagaaagtagtattgctgaattcgcagcgttacaagcgactaaaaaagatattttaaatttaaaacaaatactgaatcgagagaaagaattacttactcagaatcaagatgactatagtgcagacaaagattttcatttggcacttgcagaaattacacaaaatgatgtgttagtcaaattacaagaacaattgtggcaatatcgctttaatagtgcgatgtgggcacaattacattctcgtattttacaaaatgattatcatcatttatggatagaagatcatcaaacaattttatctgctattcaaaagaaaaatgctaatgaagctagaaaagctatgtggcaacacttagaaaatgtaaaagtaaaattatttgaattatctgatgtagaagatccacattttgatggatacctattcaatacaaatccagttgttgtaggtatctaa

SEQ ID NO: 21879 - DNA, 1764 bp, Haemophilus influenzae
atgcaagagcaaaaattacaagaaaatgatttttcaaccttacaaacgtttaagcgtttgtggccaatgattaaaccttttaaagcggggcttattgtttctggcgtcgcgttagtttttaatgcattagctgactcaggcttgatttatttgttaaaaccgttgttggacgatggttttggtaaggcaaaccattcatttttgaaaatgatggcttttgtcgtcgttgggatgattattttacgcggcattaccaactttatttctaattattgcttggcgtgggtatcaggcaaagttgtcatgacaatgcgtcgccgcttgtttaaacatttaatgtttatgccagtgagtttctttgatcaaaattcaacagggcgtttactttctcggattacttatgattcccaaatgattgcaagttcttcttcaggatctttgattacaattgtgcgagaaggagcatatattatttcgctattcgcagtgatgttttataccagttgggaattaacaattgtgctttttattataggtccaatcattgctgttttaattcgtttggtatcaaaaatttttcgtagattaagtaagaacttacaagattcaatgggtgaacttacgtctgctacagaacagatgttaaaaggtcataaagttgtgctttctttcggagggcaacatgtggaagaagtgcattttaatcatgttagtaatgatatgcgtcgaaaaagcatgaaaatggtgacagcaaattccatttctgatcctgtggtgcaagttattgcatctctcgcattagctacggtgctctatttagctaccactccattgattgcagaagataatttgagtgcaggctcatttacagtggtattttcttcaatgttagctatgatgcgtccgttaaaatcattaactgcggtgaatgcacaatttcaaagtggaatggcagcatgtcaaacgctatttgccattttagatttagagccagaaaaagatgacggggcttataaagcagaacctgcgaaaggcgagttagaatttaaaaatgtgagttttgcatatcaaggaaaagatgaacttgcattaaataatatttcttttagcgttccagctggaaaaaccgtagctctagtgggacgttctggatcgggcaaatcaaccattgctaatttagtgacacgtttttacgatattgagcaaggcgaaattttactggatggcgtaaatatccaagattatcgtttatctaatttacgtgaaaactgcgctgtggtttctcaacaagtccatttatttaacgatactattgcgaataatattgcttatgcagcacaagataagtattctcgcgaagaaattatcgctgcagcaaaagcggcttatgctttagagtttatcgaaaaattaccgcaagtttttgatacggtaattggcgaaaatggcactagcctatcaggtgggcaacgtcagcgtttagcgattgctcgtgctttattgcgtaattcgccagtattaattttagatgaagctacatctgcactagatacggaatcagaacgagcaatccaatctgcattagaggaattaaagaaagatcgcacggttgttgtgattgcccatagattatctactattgaaaacgcggatgaaattcttgtgattgatcacggagaaattcgtgagcgtggcaaccataaaacattgcttgaacaaaatggtgcctataaacagttgcatagtatgcagtttactggctaa

SEQ ID NO: 21880 - DNA, 438 bp, Haemophilus influenzae
atgtcaagagcatcattgagcttgctagatttagcaggcgttaagccttatcaaatgaaaaaagatgaagaatatatgaatgaagagcaaattcttcatttcagaaaaattcttaatgcttggcacgagcaaatcgtggaagaagcttctcgcaccgttgcacatatgcaggatgaagtaaccaatttccccgatcctgcagaccgagcaactcaagaagaggaatttagtctagaattacgtaatcgagatcgcgaacgtaaactaatgaaaaaaatcgaagcaaccttgaagaaacttgataccgatgattttggttactgcgattgttgtggtgaagaaatcggcattcgccgtttagaagcgcgcccaacagcagatctttgcattgattgcaaaactttagctgaaatccgcgaaaaacaagtcgctggttaa

SEQ ID NO: 21881 - DNA, 1359 bp, Haemophilus influenzae
atgccaaaagcgcgagcaaaaaaatcagaacaaacacgtcgctatgataaaaatgtgattaaagcggctcaatttgatatttctccgcgtgattttagccgtaatgctctcaatgtagtggaaaaactgcaacgtcaaggttttgaggcttatatcgtcggtggatgtatccgcgatttattgctcggtaaaaaaccaaaagatttcgatgttgcaacaaacgcccgccctgagcaaatccaaaacattttccaacgccaatgccgtttagtgggtcgccgtttccgcttagcacatattatgtttggtcgagatattattgaagtcgccactttccgtgctaatcacagtgatgctcgcaatgaaaatcaagcgaaacagagcaatgaaggcatgttactgcgcgataatgtttacggtacgatcgaacaagatgcagcacgccgtgattttacggtcaatgcactgtattacaatccgcaagataatacgttacgagattatttcgagggcattaaagatctcaaagcaggcaagctacgcttaattggcgatcctgttacacgttatcaagaagatcctgtgcgcatgctacgctcaattcgttttatggcaaaacttgatatgttccttgaaaaaccgagcgaacaaccaattcgtgaacttgcgcctttattaaaaaatattccgccagctcgcttatttgacgaaagcttaaaattattgcaggcgggacaaggggtaaaaacctatcggttattacgccaatatggtttatttgaacaacttttccctgcattaagcgcatattttacagagaaagaagatagctttgcggaacgtatgatcgtcactgcacttacttctacggatgaacgtgttgcggataaacttcgtattaatcctgcattcttatttgcagcatttttctggtatccattgcgcgaaaaagtggaaattttaaaaaatgaaggtggtttaaataatcatgatgcttatgctttagcaggcaatgaagttttagacttattctgccgagctttagctgcaccacgtcgtcatactgcggtcattcgtgacatttggttcttacaactgcaattattaaaacgtactggatcagcaccaatgcgtaccatggaacatccaaaattccgtgcaggctttgatttattggctatgcgagcagaaattgaaggtggcgaaaccattgaattagccaaatggtggcacgaatatcaattcagcaatggtgaacagcgtgaacagttgatacaagagcaacaacgcttacatcctaaaccaaagaaaaaatactaccgtccacgccgtcgtaaaacaacgtgctcagcagaataa

SEQ ID NO: 21882 - DNA, 483 bp, Haemophilus influenzae
atgattacggcatatattgctctaggtagcaatttaaacacaccagtagaacaattacatgctgcgcttaaagcgataagtcagttatcaaacactcatttggtaacaacgagctctttttataaaagcaaaccgctcggcccacaagatcaacccgattatgtgaatgccgttgcaaaaattgaaaccgaacttagtccgctcaagctattagatgaattacagcgtattgaaaacgagcaaggtcgagtgcgtttacgtcgctggggcgaacgcacgttagatttagatattttgctctacggcaatgaaattattcaaaacgaacgcttaacaattccccattatgatatgcataaccgtgagtttgtcattgtgccgttgtttgaaatcgcatcggatttagttttaccaaatagtcaaatcataacagagctggtcaagcaatttgctgaccacaaaatgataaaattaaatccctag

SEQ ID NO: 21883 - DNA, 1299 bp, Haemophilus influenzae
atgaaaactaaaattttatttttcctttttttctcaacgtttagtttctctatttttgcagcacctattacgattgcgattgacccaggtcatgggggaaaagatcctggtgcaatcagccgaaacttaggcatttatgaaaaaaatgttaccctttcaattgcaaaagaattaaaagccttattagataaagatccacattttcgcggtgtattaacgcgtaaaagtgattattatatttccgtgccagaacgttcagaaatcgcacgtaaatttaaagcgaattatcttatttccattcatgccgattcatctaaatcacctgatcgtcgcggggcttctgtttgggtattgtcaaaccgtcgagccaatgatgaaatgggtcaatggttagaagacgatgaaaaacgctcggaattacttggtggagcgggaaaggtgctttcacacaataatgacaaatatcttgaccagactgtacttgatctgcaattcggacatagccaacgtacaggctatgtgttaggcgaacatattttgcaccattttgctaaagtaacaacattaagtcgcagtacgccacaacatgcaagtctgggtgttctacgttcgccagatattccttctgtgttggtagaaactggatttctttccaattcagaagaagaaaaaaaacttaattcccaaacttatcgtcgccgcattgcttatatgatttatgaaggcttagttgcattccatagcggtaaaaccaacactttagttaaagacaatttagtgcaaaacatcaaacaaaacgatataaaaaaatcagggaaaaataaccgcacttcagaacaaaatataaatgaagataatattaaagacagtggcattcgccatattgtaaaaaaaggagaaagtttaggtagcttatcaaataaatatcacgtaaaagtctctgatattattaaattaaatcaattaaagagaaaaacactttggctaaatgaaagtattaaaatccctgataatgtcgagataaaaaataaatcattaacaattaaagaaaatgattttcataaaaaacaaaatagcttagtaaataataccaataaagatttaaaaaaagagaaaaatacacaaactaataatcaaaaaaatataattccgctctatcataaagtaacaaaaaaccaaacactttatgctatttcgagggaatataacattccagtaaatatactattgagcctaaatccacatttaaaaaatggcaaagttattacaggacaaaaaataaaattaagagaaaaataa

SEQ ID NO: 21884 - DNA, 1890 bp, Haemophilus influenzae
atgcctattaaaattctttccccacaacttgctaaccaaattgctgctggagaagtggtagaacgccctgcatcagtggtaaaagaattagtggaaaatagccttgatgcaggtgcaaataaaatccaaattgatatcgaaaatggtggggcaaatttaatccgcattcgtgacaatggctgtggtattccaaaagaagaattaagcctcgctttggcacgacatgccacgagtaaaatagccgatcttgatgatctcgaagcgattttaagtttaggttttcgtggcgaggcattagctagtatcagttccgtatcacgcctaacccttacttctcgtaccgaagaacaaactgaagcgtggcaagtttatgcgcaaggtcgtgatatggaaaccacaatcaaacccgcatcacatcctgtcggcacaacagttgaagtcgccaatctttttttcaacacaccagcccgccgaaaatttttgcgcacagataaaacagaattttcccatattgatgaagtcattcgtcgtattgctttaacgaaattcaacacagcatttacattaacgcataatggaaaaattatccgtcaataccgtcctgccgaagcaatcaatcaacaactaaaacgtgtcgccgctatttgtggggatgattttgtcaaaaatgccttacgaattgagtggaaacacgatgatttacatttatcaggttgggtggcgacaccaaattttagccgaactcaaaatgatttaagttattgctatattaatggccgaatggttcgagataaggtaatcagccatgctattcgacaagcctatgcacaatatttaccaaccgatgcttatcctgcgtttgtgttgtttattgatttaaacccgcacgatgtagatgtcaatgttcatccaaccaaacatgaagtacgctttcatcaacaacgcctcattcatgattttatttacgaaggcataagtcatgcgctaaacaatcaagaacagattaattggcatacagaccaaagtgcggtagaaaatcacgaagaaaatacggtgcgtgagccccaaccgaattacagcattcgtcctaatcgtgcaactgcggggcaaaatagctttgcgccacaatatcatgaaaaaccacagcaaaatcaaccgcacttttctaacacaccaatgtttccaaatcatgtaagtactggttatcgagattaccgttctgatgcaccgagtaaaactgagcaacgtttatatgctgaattgttacgcacgttaccgcctacagcgcaaaaggatatatcggatacagcacaacaaaatatttcagatacagctaaaatcatctcaactgaaataattgagtgttcatcacatctacgagccctttcacttattgaaaatcgtgcgttgttattacaacagaaccaagatttctttttgctttcattggaaaaattacaacgcttgcaatggcaactagcgttaaaacaaatacagattgaacaacaggctttattgattccaatcgtgttccgattaaccgaatcacaatttcaagcatggcaacaatattcagatgacttcaaaaaaattggctttgaatttatcgaaaatcaagcacaattacgcttaaccttaaataaagtgccaagtgcattacgcacacaaaatctacaaaaatgcgtgatggcaatgctgactagagatgaaaattcatcatcatttttaaccgcactttgcgcacaattagaatgcaaaacctttaacgctttagcggatgcactcaatttattgagcgagacggaacgtttactcacgcaaacaaatcgcacagcattcacccaattactcaaacctgttaattggcagcctttattagacgaaatttaa

SEQ ID NO: 21885 - DNA, 786 bp, Haemophilus influenzae
atgcacaaaaacttatttcattggttaatggaacgtggttatcaagtgttggtggaaaaagaagtcgccataacacttgagttaccttttgaacatcttgctacgttagaagaaataggccaccgagcccaattagccattgtgattggtggagacggcaatatgctagggcgcgctcgcgtattagcaaaatatgatattccattgattggtattaatcgtggtaatttgggatttttaacggatattgacccgaaaaatgcctattcccagcttgaagcttgtttagaacgtggcgaattttttgtggaagaacgttttttattggaagcaaaaatcgaacgagcaagtgaaatcgtatcaaccagcaatgcggtaaatgaagcggttattcatcccgccaaaattgcacatatgattgattttcacgtatatatcaatgataagtttgcattttctcaacgttctgatggattaattgtttctactccaacaggttctacggcttattctctttccgctggtggacctattttgacaccaaaccttaatgccattgcattagtgccaatgtttccacatacattaacttctcgccctcttgttgttgatggggatagtaaaatatcgattcgttttgctgaacataatacctctcaattagaagtgggctgtgatagtcaaattaccttaccttttaccccagatgatgtggtgcatattcaaaaaagcgagcataaactccgattgcttcatctgaaaattataattattacaatgtgttaa

SEQ ID NO: 21886 - DNA, 1380 bp, Haemophilus influenzae
atgctaaaaattttcaataccttaacgagagaaaaagaaatctttaaacctatccacgaaaataaagtgggaatgtatgtttgcggcgtcactgtttatgatttgtgccatatcggccatggacgcacttttgtgtgttttgatgtgattgcccgttatttacgttctttgggttacgatttaacttatgtgcgtaatataacggacgtagatgacaaaattattaaacgtgcgttagaaaacaaagaaacctgcgatcagttagtggatcgcatggtgcaggaaatgtataaagattttgatgcacttaatgtcttacgccctgattttgaacctcgtgcgacgcatcatattccagaaattattgaaattgtggaaaaattaattaaacgcggacatgcttatgttgcggataatggggacgtgatgtttgatgtagaaagcttcaaagaatacggcaaattatcccgtcaagatcttgagcaattacaagctggcgcacgtattgaaatcaatgaaatcaagaaaaatccaatggatttcgtgctttggaaaatgtcgaaagaaaacgaaccaagttgggcttccccttggggggcaggtcgtccgggttggcatattgaatgttctgcaatgaactgcaaacagcttggcgaatattttgatattcacggtggtggctctgatttaatgttccctcaccacgaaaatgaaattgcacaatcttgctgtgcgcatggcggccaatatgtgaattattggatccattctggcatgattatggtggataaagaaaaaatgtcgaaatccctcggcaatttcttcacaattcgtgatgtattaaaccactacaatgcagaagcggtgcgttatttcttattaacggcacattatcgtagccagctcaattatagcgaagaaaacttgaatttagcacaaggtgcgttggaacgtttatacacggctttacgcggaacagatcaaagtgcggttgcttttggcggagaaaattttgttgcaactttccgtgaagcaatggatgatgattttaatacgccaaatgcactttctgttttattcgaaatggcacgtgaaattaataagttaaaaacagaagatgttgagaaagctaatggacttgctgcacgtttgcgtgaattgggggcgattttaggattacttcaacaagaaccagagaaattcttacaagcaggttctaacgatgatgaagtggcaaaaattgaggcactcatcaaacaacgcaacgaagcccgcactgctaaagattggtctgccgcagattcagcacgtaatgaattgacagctatgggcatcgtattagaagatgggccgaatgggacaacttggcgtaagcaataa

SEQ ID NO: 21887 - DNA, 1146 bp, Haemophilus influenzae
gtgcggtcaattttttcattatttttagaggatgttatgacacaacaatatgctatcgatactttattagctcaagcaggcaatcgcagtgatgagcgtacgggcgcggtttctgcaccaatttttctttctacggcttatggtcattgtggtatcggtgaaagtacgggatttgattacacacgtaccaaaaatccaactcgcacagtattagaagaaacgatagctaaattagagaatggagatcgtggttttgcgttttcttctggtatggctgcaattcaagttttgatgacgctttttaccgccccagatgaatggattgtttctagcgatgtgtatggtggtacttatcgattattagatttttcttataaaaataacaatagtgtaaaacctgtttatgttaatacagcatctgcttcagcaattgaggctgccattaacccaaatacgaaagcgatttttattgaaaccccatcgaatcctttaatggaagaatgtgatgtggttgaaattgcaaaacttgcgaaaaaacataacttaatgttgatcgtggataatacgtttttaacgcctgtgctttctcgtccattagatttaggtgcggatgtggtaattcacagcggaactaaatatattgctgggcataatgatgcacttgttggtttaattgttgcgaaagggcaagaactttgtgatcgcattgcttatattcaaaatggtgcaggggcggtgctttctccttttgattcttggctgactattcgtggtatgaagaccctttctttgcgtatgaaacgccatcaagaaaatgcacaagctattgcggaatttttaaaagctcaaccacaagtggaatcggtgctttatccgaataaaggtgggatgttgtctttccgtttgcaagatgaagcttgggttaatacatttttaaaatccatcaaattgattacttttgcagaaagtctaggcggcacagaaagttttattacttatcctgccactcaaactcatatggatattccagaatccgagcgtgtagctcgtgggattactaataccttgttgcgtttttcagtcggtattgaagatgtagaagatattaaagcggacttattacaagcttttgcaaacttaaaataa

SEQ ID NO: 21888 - DNA, 1278 bp, Haemophilus influenzae
atgaatttatacaatatcaaacacccagaagaacaagtcactttttctcaggctgttcgtcaaggtcttgggcgggatcaaggtctattctttccagaagttattcctcaacttaataacattaatgaattacttgaattgcctcttgttgagcgtagtcaaaaaattctaggtgcattaattgatggcgagttaccacaagcaacgttagatgcgatggtgaaaaatgcattcacttttcctgcaccgttagaaaaagtggaagaaaatatttatgcacttgaattatttcacggtccaacgctagcatttaaagattttggtgggcgttttatggcacaggcacttgctgcggtacgtggcgatggcaaaattactattttaacggctacgtctggcgatactggagccgctgtagcacatgcgttttatggattagaaaatattaatgtagttatcctttatccaaaaggcaaaatcagcccattgcaagaaaagctgttctgtactttaggtgggaatattcgtactgttgcgattaacgctgatttcgatgcgtgtcaggctttggttaagcaagcctttgatgatgttgaattgcgccaagctatcgggcttaactctgcaaattctattaatatcagccgtttattagctcaagtttgttattactttgaagctgtcgcacaattgccaaaagaaaaacgtgataatgtcgtggtttctgtgccaagtggtaattttggtaacttaactgcgggattaattgcaaaaaccttaggcttgccaataaaacgctttgtcgcctcaacaaacgcaaatgatactgtgccacgttatttgaaatcgggtaattgggatcctaaaacgacagttgcaaccctttctaatgcaatggatgtaagtcgcccaaataattggccaagagtggaggaattgtttaaacgaaatggttgggatttaactgatttaggttcggggatgctaagtgatagcgaaacagaagataccttaaaagcgatgcagtcgaaaggttatttatgtgaacctcacggtgcgatagcttatcaggtgttgaaagatcaacttaaagcgagtgaaacaggaatcttcctgtgtacggcgcatcctgcgaaatttaaagaatccgtagaacgtattcttggtattcagcttccattacctgaaacactggataaacataatcagctaccattgctttcagatgaaatggataatgattttgcacaactacgggcttacttattgaagtcataa

SEQ ID NO: 21889 - DNA, 945 bp, Haemophilus influenzae
atgttaagaatttacgcccctgcatctagcgcgaatattagcgtaggtttcgatactttaggtgctgcgatctctcctattgatggttctttgttaggcgatgtggttcaaatagaatctatttcaactggttttgagttagaaagtgcgggctattttgttcgtaaattaccgaaagaaccgcaaaaaaatattgtttaccaagcttatgtgctatttagcgagcaattaaaattacgcggagcaaatgttaaacctttacgtttaacgctcgaaaaaaatatgcctattggctctggtttaggctctagtgcttgttctattgttgctgcattagtggcattaaatcagtttcataatgaacctttttcgaaaatggaattgcttgaaatgatgggagaattggaaggtcgtatttctggttcaatccattatgataacgtcgcaccttgctatcttggcggtgtgcaatttatggtgcaatcgctcggcaatatttgtcaaaaattgccattttttgataattggtattgggtgttagcctatccgggaattgaagtttctactgctgaagctcgagcaattttaccgaaaagctatactcgacaaaacgtgattgcccatggtcgtcatttaggtggctttgtgcatgcttgccatacccatcaggaaaatcttgccgcgattatgatgaaagatgtcattgccgagccttatcgtgaatctctgttacctaattttgctgaagtaaaacaagctactcgagacttaggcgcacttgccacaggtatttcaggctcagggccaactattttctctattgcccctgatttacaaactgcaattaaactttcaagttatttagaaagccattatttacaaaataatgaaggttttgtgcatgtatgtaaagttgataacgaaggcacaagagaaattaaataa

SEQ ID NO: 21890 - DNA, 2448 bp, Haemophilus influenzae
atgcgcgtacttaaatttggcggcacttcgcttgcaaatccggaacgtttttcccaagcggcgaaattgatcgagcaagctcatttagaagagcaggctgcaggtgttttatctgcaccagccaaaataaccaaccatctcgtcgccctttctgaaaaagcagcattaaatcaatcaaccgatacgcatttcaacgaagcaatcgaaattttctataacatcatcaacggcttacatacggaaaataatcaattcgacttaaatggtaccaaagcacttattgatgctgaatttgttcaaattaaaggattattagaagaaatccgtcaggcaggaaaagtagaagatgcagttaaagcgaccattgattgccgtggggaaaaactttctattgcaatgatgaaagcttggtttgaagcgcgtggctatagcgtacatattgtggatcctgtcaaacaattattggcaaaaggcggttatcttgaatcttctgttgaaattgaagaatcaacaaaacgtgttgatgcagcaaatatcgcaaaagataaagtggtgctgatggcaggttttactgcgggtaatgaaaaaggcgagttggtattgctcggtcgtaatggctcagactattctgccgcctgtttagccgcttgtttaggcgcaagtgtatgcgaaatttggaccgatgtggacggcgtttatacttgcgatccgcgtttagtgcctgatgcacgtttattaccaacgctttcttatcgtgaagcgatggaactctcttatttcggtgcgaaagtgattcatcctcgtacgattgggccattgttgccacaaaatattccttgtgtcattaaaaatacaggaaatccttctgcaccaggttcgattattgatggcaatgtgaaatcagaaagtttgcaagttaaaggtatcactaacttagacaatttggcgatgtttaatgtgtcaggccctggtatgcaaggtatggtaggcatggcatctcgcgtattttcagccatgtcaggcgcaggcatttcagttattttaattactcagtcttcgtctgaatatagtattagtttctgtgtgcctgtgaaatctgcagaagtagcgaaaaccgtactagaaacggagtttgctaatgaattaaatgaacatcaattagaaccaattgaagtgattaaagacttatccattatttctgttgtgggcgatggaatgaagcaagcgaaaggcattgctgctcgtttcttctcggcattagcgcaggcaaacattagcattgtggcgattgcacaaggatctagcgaacgttcaatttctgcggttgtgccgcaaaataaagccattgaagcggtgaaggctacccatcaggcgcttttcaataataaaaaagtcgtggatatgtttttagtgggcgttggtggagtaggcggagaattaattgagcaggtaaagcgtcaaaaggagtatctagcaaagaagaatgttgaaattcgagtttgtgctattgcgaattccaaccgtatgttgcttgatgaaaatggattaaatttagaggattggaaaaacgatttagaaaatgcgactcagccatcagattttgatgtattgctttctttcattaaattacatcatgtggtgaatccagtatttgtagattgtacttcagccgaatctgtagcagggctttatgctcgtgcgttaaaagaaggtttccatgtggttacgccaaacaaaaaagcgaatacacgagaattagtttattacaatgagttacgccaaaatgcccaagcaagccagcataaatttttatatgaaaccaatgtaggtgcgggcttgccagttattgaaaatctccaaaacttacttgcagcaggtgatgagcttgaatattttgaagggattttatctggctcgctttcctttatttttggtaagttggaagaaggactttctctttcagaagtaaccgcacttgcgcgtgaaaaaggctttactgagccagatcctcgagatgatctttctggacaagatgtagcacgcaaattattaattcttgctcgtgaagcgggaattgaacttgaactttcagatgttgaagttgaaggtgtattgccaaaaggcttctccgatggaaaatctgcagatgagtttatggcaatgttgcctcagcttgatgaagaatttaaaactcgcgttgccacagctaaagcagaaggcaaagtattgcgttatgttggaaaaattagtgaaggaaaatgcaaagtatccatcgttgcggtagatctgaataatccactttataaagtgaaagatggtgaaaatgccttggcattttacactcgctattatcagccgattccacttttattacgtggttatggcgcaggtaatgcagttactgcggcaggtatctttgcagatattttaagaacattacaacattaa

SEQ ID NO: 21891 - DNA, 714 bp, Haemophilus influenzae
atgaatatccagcataatctcaacctaattcagcaaaaaattgaaacggcttgtaaagaagaaaatcgcaatcaaaataccgtaaaattacttgccgtatctaagaccaaacctatttctgctattctttcggcttatcaagcgggacaaacggcttttggggaaaattacgtgcaagagggggtagaaaagatccaatattttgaatcgcaaggaattaaccttgaatggcattttatcggcccattacaatcgaataaaacccgtctcgttgcagaacattttgattggatgcaaacgcttgatcgagcaaaaattgcagatcgtttaaatgaacaacgaccgaccaacaaggctccattgaatgtattgattcagattaatatcagcgatgaagaaagtaaatcaggtattcaacctgaggaaatgctaacactagcaaaacacatcgaaaatttaccgcacttatgcctacgtggcttaatggcaatacccgcaccaaccgacaacatcgcagaacaagaaaatgcatttagaaagatgttggagctgtttgaacaacttaaacaagtcttacccaatcaacaaattgatacactttctatgggaatgacggatgatatgccgagcgcaataaaatgcggttctacaatggtacgcattggcactgcgatttttggtgcgagaaattattcaacatcacaaaataaataa

SEQ ID NO: 21892 - DNA, 1107 bp, Haemophilus influenzae
atgcaacttgacaaatacactgccaaaaaaattgttaaacgtgcaatgaagatcattcatcactctgtaaatgtaatggatcacgacggtgtgatcattgcgtcgggaaattcaacgcgtttgaatcaacggcacacaggagcggtgttggcgttgcgggaaaatcgtgtggtagagattgatcaagcgttggcacaaaaatggaattttgaagcacaaccagggattaatttaccgattcattatttaggcaaaaatattggagtggtggggatttctggtgagccaactcaggtgaaacaatatgccgaactagtgaaaatgacggcagaacttattgtggaacaacaggctttactcgaacaagaaagctggcatcgtcgttacaaagaagaatttattttacaattattacattgcaatttgaattggaaagagatggaacagcaggcgaaatttttttcttttgatttaaataaatctcgtgtggttgtattgattaagttacttaatccagccctggataatttacagaatctgatcaattatttggaacagtctgaatttgcacaggatgtggcaattttgtcccttgatcaggttgtggtcttaaagacttggcaaaactccaccgtactttctgctcaaatgaaaacgcttttacctgcagattattcaaaacaagattataaaattgctgtaggcgcttgtctaaatctaccgctttttgagcagcttcccttgtcttttcaaagtgcgcaaagcacgctttcttatggattaaaacatcatccacgcaaaggtatttatgtgtttgatgagcatcgattgcctgtgttacttgctggattatcccattcttggcaagggaacgaattgataaaacccctttctccccttttctcagaagaaaatgcgatactttataaaacccttcaacaatattttttatcaaattgtgatctttatctcactgcggaaaaattatttgttcacccgaatactttgcgttatcgattgaacaaaatagagcaaataactggcttatttttcaataagatagatgataaattaacgctctatctcggaacgttgttagaacattga

SEQ ID NO: 21893 - DNA, 1896 bp, Haemophilus influenzae
atgaaggaaaaaattatgtcacaaaatcaagaaactcgcggattccaatctgaagtcaaacaactactccaattaatgattcattctttgtactctaacaaagaaattttcttacgtgaattgatttctaatgcttctgatgcggcagataaattacgctttaaagcactttccaaccctgctttatatgaaggcgatggcgacttgcgtgtgcgtgttagctttgatgcggataaaggcactatcacaattagcgataacggcattggcatgacccgtgagcaagtcatcgatcatttgggtacgattgcaaaatcaggaacaaaagaatttttaaccgcacttggtcaagatcaagcaaaaaatagccagcttattgggcagtttggtgtgggtttttattctgcttttattgtggcagataaagtgactgtaaaaaccagagcagctggtgaagaggcggataaagccgtactttgggaatctgcgggtgaaggcgaatattctgtggcggatattgagaaaaaatcccgtggtacagatgtgattttgcatttacgtgaagatgaaaaagaatttttaaatgaatggcgtttgcgtgaaattattggtaaatattctgaccatattggcttgccagtggaaatgctgacgaaagaatacgatgatgaaggcaaagagtgcggcgaaaaatgggaaaaaatcaataaatctgatgccctttggacgcgttctaaaaatgatgtgtctgatgaggaatacaaagcgttttacaaacacttaagccatgattttgttgatcctgtgacttgggcgcataacaaagttgagggaaatcaagcatatactagtttgctttatgtaccagctaaagcaccttgggatttatttaatcgagaacataaacatggcttaaaactttatgttcaacgtgtatttattatggatgatgctgagcaatttataccgaattatctacgttttatgcgtggtttaatcgatagcaatgacttgccattaaatgtatctcgtgaaattttacaggataacaaaattacggctgcactacgcaaagcattaactaagcgttcattacaaatgctagaaaaattagcaaaagatgatgcagaaaaatatcttcaattctggaaagagtttggtttagtcttaaaagaaggccctgcagaagattttgctaacaaagaaactgtcgcgaagttattgcgttttgcttcgacacataatgatggtagcgagcaaactgtctctttagaagattacatcttgcgtatgaaagaggggcaaaaagctatctattacattacagcggatagttatgttgcagcgaaaaatagcccgcacttggaattattcaataaaaaaggcattgaggttttgttgctttccgatcgcattgatgaatggatgttaagctatttaactgaattcgatggtaaacaattacaaagtattacaaaagcagatttggatttaggcgatttagcggataaagaatctgaaacacaaaaacaacaagatgaagcctttggtagttttattgagcgtgtgaaaaacttgcttggcgaacgtgtgaaaacggtgcgtttaactcacaatttaacggatacaccagcggtggtttctacggataacgatcaaatgacgacccaaatggcgaaattgtttgcagccgcagggcaacctgtaccagaagtaaaatacacatttgaactgaatccagaacaccatttagtgaaaaaagtggctgatattgcagatgaaactgaatttgctgattgggtggaattattacttgaacaagctatgttagcagagcgcggatctttggaaaatccagctgcgtttattaaacgtatcaataagttgttaggttaa

SEQ ID NO: 21894 - DNA, 1389 bp, Haemophilus influenzae
atgtttgagaatttatcggatcgcctttccaaaaccttacgtaatatcacaggaaaaggccgtttaacggaagataatattaaagaaaccttacgcgaagtgcgtatggcattacttgaagccgatgttgccttgcctgtggtgcgtgaatttatcgcaaaagtaaaagaaagcgcgcttggggaagaagtcaataaaagtttaacgccagggcaagaattcttaaaaatcgttcagcgtgagcttgaaaaagccatgggcgaagcgaatgagagtttaaatctcgcaacccaaccaccagcagttatcttaatggcgggtttacaaggggcgggtaaaaccaccagtgtgggtaaattggcaaaattcttgcgtgaacgccataaaaagaaagtgttagtggtgtctgctgacgtatatcgccctgctgcgattaagcaacttgaaaccttggctcaatccgttggcgtggatttttttccatcggatgttaaacaaaaccccgttgatattgctaaatcggcgcttgctgatgcaaaactgaaattctacgatgtgttgattgtggatacggcaggtcgcctacacgttgatacagaaatgatggacgaaatcaagcaagtccatgctgcattaaatccaatcgaaactcttttcactgttgatgcgatgactggtcaagatgcggcaaatacagcaaaagcctttaatgaagcattgcctcttacaggggttattttgacgaaagtggacggtgatgcgcgcggtggtgcggcgttatcgattcgtcaaatcacaggtaaaccaatcaaattcttgggtgtgggcgagaaaacagaggcgcttgagccattccatcctgatcgtgtcgcttcccgtattttgggcatgggcgatgtgctttcccttatcgaagatcttgaacgttctgttgatcgtgaaaaagcggaaaaaatggcgcagaaattcaagaaaggcgatgattttactttagatgatttccgcgaacagctgatcgaaatgaaaaaaatgggcggcatgatgtctatgcttgagaaattaccaggtgcaaaaaatttgtctgagcacgttaaaaatcaagtagatgacaaaatgtttgtcaaaatggaagcgatcattaactccatgaccctaaaagaacgtgccaacccagatattatcaaaggatctcgccgtcgtcgtattgcattaggctctggcactcaagtgcaagatgtcaataaattacttaaacaattcgatgaaatgcaacgtatgatgaagaaaatgcgtaaaggcggcatggctaaaatgatgcgtggaatgcaaggcttaatgggcggaggcttaggcggtcttggcggtttaggcggaatgtttaaacgataa

SEQ ID NO: 21895 - DNA, 1290 bp, Haemophilus influenzae
atgatcgatccaaatttactccgtaataatttagcagaagtcgcagaaaaattaaaagtaaaacgcaactttatgcttgatacggaaaaactcaccgcgttagaagatcagcgcaaaaacttacaagtcactaccgaaaacttacaagcggaacgtaatgctcgttccaaagccattggtgctgctaaagcgcgtggtgaagatatcgcaccattattggcagaaatggatgatatgggcaatcaattgactgaagcaaaagcacaattagatgcggtacttgcagaaatcaatcaaattgcattaagtattccaaatctacccgcagacgaagtgccattaggcaaagatgacacagaaaataaagaaatcttacgttggggtacaccgcgtacatttgattttgaagtgaaagatcatatcactttgggtgaagaagcaaatggcttagattttgctgctggggctaaattagctggtgcacgttttgccgtaatgaaaggtcaaatcgctaaaatgcaccgtgcattggcacaattcatgttagatcttcatacggaacaacacggctatttagaaacctatgtgccttatttagtaaatcacgccacactttatggaacagggcaattaccaaaattcggggaagatttattccatactttagccttagaaggcgaacaaccttacgcattaattccaactgcagaagtgcccgtcactaatttagtgcgtgacgtgattattgatgaagcagaattaccaataaaaatgaccgcacatacgccatgtttccgttctgaagcaggttcttacggtcgtgatactcgtggtttaattcgtatgcaccaatttgataaagtagaaatggtacaaatcgttgatccagataaatcaatggaagcacttgaagaattaacaggtcatgcggaaaaagtattgcaattattaaatttaccataccgtaaagttttactttgcacaggcgatatgggctttggttcttgcaaaacttacgatttagaagtttgggtgcctgcacaaaatacttatcgagaaatttcttcttgctcaaatatgtgggatttccaagctcgccgtatgcaagcacgttgtaaagcaaaaggcgataagaaaactcgcttagtgcacacattaaatggttcaggcttagcggttggtcgtactttagtggctgtacttgaaaactatcaaaatgccgatggttcaattaccgtgccagaagagctacgtccatatatgggcggattagacgttatcggaaaataa

SEQ ID NO: 21896 - DNA, 558 bp, Haemophilus influenzae
atgaaattcaatatcccaattttcctaacgatctttcgagtcattttgattccttttttcgtgattgcattttatttacccattgaatcatctcctttcatcacaacgctcattttttttattgcaggtgtcactgactggctagatggctatctagctcgtaaatggaaacagaccacgcgctttggtgcatttcttgatcctgttgctgataaagtaatggtagtggctgcactagttttaattgtcgaacatcaacatacattttggataaccattcctgccattattatgatttctcgtgaaattatcatctccgcattacgtgaatggatggcagagcttggggaacgtagcaaaatcgcagtctcttggtggggaaaatggaaaaccacagcgcaaatgttagcactaggcggattattatggcgttataacaactatatggaaatagcagcaattatcttactttatatcgccgctattttaactatatggtcaatgatccaatatttacaagtagcaaaaggaagcttgctagataatattcaattataa

SEQ ID NO: 21897 - DNA, 1899 bp, Haemophilus influenzae
atgggctgggcttctttcaatttaacttgggcttggttcctgcctgtaattgtgtatggtgctttgccgttattgagattgccacagcaaacccaagcaaaaacagagctatttttgaccgcactttctgtactgtttatgtttatcagtgcgacggtgtacaaaattagtatgggctattctgtgattgtgttacttgtgggatataccgcattggcgacactttcattggcaaaactaaaagtgatgcaaggtgataaatttatcatcgcttctttgctttgcattatcttgctcattttcttctttatcgtttatccaacattggcgattttcgtttcaatgttttatgacggcgatacctttgcgccacaacaagtgatgcgaattttaacgcagagctatattgtccgcgtaattaccaattcgcttttcttatcgggctttgtgggcatcgtttctactgtatttggtttagcctttgcgctctataccacgcgtatcgctcgtagaacggcatttatcggaaaaattttctctattttgccaattgtgacgcccccatttgttgtaggacttggggttactttaatgctcggacgttctggttatgtaaccgaatttttaagtacgaattttggtttttctagtcataattggctttatggttttaatgggattgcgattgctcaaattctcgcatttgctcctatttcttttatgattttagatggcgcattaaaatccgtacacccgtctattgaagaagcgtcttatacgttgcgtgctaatcgttatcaaacgttctatcagattatttttccgttactgcgtccagcattagcaaattctttcttaattgtattcattcaatcattggcggactttagtaatcctttagtgttaggtggaagtttcgatgtgattgccacacaaatttatttctatattgcgggttcacaacttgattatgcttcagccagtactttgggttcgatgttgttaattttctcgttggcgatttttatcattcaatacatttggattggtaaccgctcttatgtcactgtttcggggaaatcttatcgtggcgatgtgcaagagctgccaaatggcttgaaatataccatcatcggtatgcttggcttctgggtaatctttaatatggcactttacggtagtattttctacggaagtttcactgtaaactggggcgtaaattacactttaaccttgaaaaactatgccatgttattcgggcaaggattgagcgatggagcgtggccgtcactaatcaataccttaatctatgcgggtattgctgcgccattaactgcattctttggattattgattgcgtatattgtggtgcgtaaagatttccaaggtaaaaaatcccttgagttcttaactatgctttgttttgccgtgccaggtactgtggctggggtgtcttacattttagccttcaacaatgcaccgctttatattacgggtacgggcattatcgtgattatttcaatggtaatgcgtgatttacccattggtatgcgagcagcgattgctgggttaggacagcttgataaatcccttgatgaagcatcgctttctttaaaagggagttcgtggaaaacattgtgctttatcgtattgccattattaaaacctgcgttgctttctgctttagtgactagtttcgttcgtgcaatgacgacggtaagtgcgattatattcttagtgacagcagacactcgcgtctaccgcatatattttaaatcgtgtggaagacggagaatacggcattgcgattgcatacggttctattttaattgttgtgatgatggcaattattttgtttttcgactggattgtaggcgatacgcgtatttcccgttctaa

SEQ ID NO: 21898 - DNA, 1176 bp, Haemophilus influenzae
atgaaaaagttcgcacttatcgtagggatcgtcgctttggcgatcttttcttttttatatattcaactttaccgcgtgcaaagtgctattaatgaacaactggcacaacaaaacattgccgttcagtcaatcaatttatcattattttctcccgcactttcccttgaaaatataaaaactacgcaattttcagctcaaaaaattgaagctaaatttagttttttgcctcttttgtatggaaacgcagcacttcattcactgaatattcaacagctcaaattaactcaaaacacacaaaatcctgccaatgtatcgatagagatttcgcctttttcattaaaacagcttttatcaaaaaaagtaatattaaatggcgaaaaccatattcgcattgaatttaataaacctatttatggaaaaacaaaaactttccatttttctttccataaagcgaatttagacttctcaacatcagaatcaaccccacttcaatttgtagatgcaagcctaaataatcagcctatcggttatattgaaactcacacagcccaccaacaaatagtgacttatataaaaccacaatgcgataacgattgtttagccgtattgaaatatcaacaaatagacaatcaaagtgcggtaaatttttcgggtaaatatttccctgttcaacgcttattcgcactattaaatttgccagaaatgttaagtggacacgccgattttgatcttgatttcagcttttcatcttcctcgcttattcaaggaaaattaaattttttagcgcaaaatggcgaaattcttggtgtgaatttattggatatggtagcgcaatatttcccgattaattacaacaatgatttgttacaaaacaaagaattaaacactcgctttgaacaattttacttacaattatttctccaacaaaatcaactcattgctgaaaaaatcgaattaaaaacgcccgcacttttggggcaaggaaaaggcatcattgatttaaatcgaatggaatgcaatgtggatattaatttaaattctacggatcaacgctatcaaaatttgacacttccaatcaatttttttggtaactgcaattctccacaatacaaaattaattttacgaagaaattccgccatcaattaattgatgcgattaaagaaaagttacgttaa

SEQ ID NO: 21899 - DNA, 1191 bp, Haemophilus influenzae
atgtcgttatatttaaaagctgaaaaaatccaatcatggcgcgtgcttattatggcttgcgcaggatttatttttaatactacagaatttgtacccgttgcaatgttaagcgatattgcacaaagttttgatatgcaaaccgccgatactggtttaatgatgacagtttatgcttggacggtgctaattatgtctttgcctgcgatgcttgccacgggcaatatggaacgtaaaagtctgcttattaagcttttcattatatttattgttgggcatattttatcggtcattgcatggaatttctggatattacttctcgctcgaatgtgtattgcattagcacattcggtgttttggtcaattactgcctcacttgtgatgcgcatctcacctaaacacaagaaaactcaagcattaggaatgctcgctattggcaccgcacttgccacaatcttaggcttaccgattggacgaattgtcggacagctcgtcggttggcgggtcacttttggcattattgcggtactggcattatccatcatgtttttaattattcgattattgccaaatttacccagtaaaaatgctggctctattgcaagtttacccttgcttgctaaacgtccattattactttggctttacgtaacaacggcaatcgtcatttcagcacactttactgcttatacttatatcgaaccatttatgattgatgtagggcatttagatccaaattttgccacggctgtattattagtttttggtttctcaggcattgcagcaagcctattatttaacagattataccgatttgctcccacaaaatttattgttgtttcgatgagtttattgatgttctccctcttgctactcctcttttcgaccaaaacaataatagcaatgttcagccttgtgtttatttgggggattggcatttcttgtatcggactatctctacaaatgcgcgtactaaaacttgcgccagatgcaaccgatgttgccacagctatttactcgggcattttcaatgcaggaattggcgcaggcgcattatttggaaaccttgcgacaacctatttaggattaaatgaaattggttatacaggcgcagcattaggtttaatcggtttcatcatttttattacaacgcacttaaaatatcgccatacatttcttctgcaaaacaaataa

SEQ ID NO: 21900 - DNA, 1515 bp, Haemophilus influenzae
atggcaactccagtcgtcgcccttgttggtcgcccaaatgtgggaaaatccacattatttaatcgccttactcgtacgagagatgcgttagtcgctgattttcccggtttaactcgtgatagaaaatatggtcacgcacatattgctggctatgattttattgttattgatactggcggtattgatggaacggaagagggtgtagaagaaaaaatggcggagcaatctttgcttgctattgatgaagcggatattgttcttttccttgtggatgctagagcgggtttaacggcagctgatattggtattgctaattatttacgccaacgtcaaaacaaaattactgtggtggtggcaaataaaactgatggtattgatgcggattcccattgtgctgaattttatcagttaggtttaggggaaattgagcaaatcgcagcctcacaaggccgtggtgttactcaattaatggaacaagtacttgcgccttttgcggaaaaaatggaaaacgccgatgaaaatgaccgcacttctgaggaagaacaagacgaatgggaacaagaattcgattttgattcagaagaagatacggcattaattgatgatgcgttagacgaagaacttgaagaagaacaagataaaaatattaagattgccattgttggtcgtccaaatgtgggtaaatctactttaaccaatcgtattttaggcgaagatcgtgtcgtggtttttgatatgccaggtacgacacgtgacagtatttatattccaatggagcgtgatgggcagcaatataccttgattgatacggctggtgtgcgtaagcgtggtaaagtgcatttggcagtggaaaaattctctgtgattaaaaccttacaagcgattcaagatgctaatgttgtattgctgactattgatgcgagagagaacatttctgatcaggatttatctttgctcggctttattttaaatgcagggcgttctttggtgatcgtcgtgaataaatgggatggtttagatcaagatgtgaaagatcgtgtgaaatctgaacttgatcgtcgtttagattttattgattttgctcgggtgcattttatttcagccttgcacggaagtggtgtaggtaatctttttgattcgattaaagaagcctatgcttgtgccactcaaaaaatgacgacttcgcttttaactcgtattttgcaaatggcaacggatgagcaccaaccgccgatgattggcggtcgtcgcattaaattaaaatatgctcacccaggtggttataatccgccgattatagtggttcacggtaaccaaatggataaactaccagattcttataaacgttatttatctaattattatcgtaagagcttaaaaattattggttcaccgattcgtctgcttttccaagaaggctcaaacccatttgcaggacgcaaaaataaactcactccgaaccaattgcgtaaacgtaaacgtttgatgaaatttattaagaaagcgaaacgttaa

SEQ ID NO: 21901 - DNA, 1146 bp, Haemophilus influenzae
atgaaatacgcattaattaattgtgtaatttacacaaaatatgatgttttacgtgattttgctgtaattattaacggtgaaattattgaagcagtgatcccccaagctgaattagaaacaggtatcaaaaccattgatttacaaggtaataatttaacggctggttttattgatctgcaattaaatggctgtggtggcgtgatgtttaacgaccaaactagcgttgaaaccttggaaattatgcaggaaactaacttaaaatcaggttgtacaagtttccttcccacttttattaccgcgcctgatgaaaatataaaaagtgcggtaaaaattatgcgtgaatatttaaacaagcataaaaaccaagcacttggtttacatattgaaggaccttatctcagcattgagaaaaaaggcgtacaccgtcccgaatatattcgtgaaattacgcctgaaatgaaagattttctctgcgaaaatggtgatgtgattacaaaaatgaccattgccgcagaaaacccaaccattaactatacgcctgattttgtgaaagcgggcattattgtctctgtaggccattctaatgccacttatgaagtggctaaagccgcattccacaaaggcgcaacttttgcgactcacttgcataatgcgatgtcgccaattagttctggacgtgaaatgggcgtagtgggtgcagtattagattctgatgtttacactggcattatcgtcgatggtgtgcatatcaattacggcaatgttcgcattgataaaaaaatcaaaggcgacaaactttgtattgtgactgactctattgcagctgcaggcgcaccgccagaactagaaagttttacctttgtgggaaaaacaatttatatcaaagaagggcgttgctatgatgcgaatgacacaattgcaggggcatcaatcacaatgatggaatccattaaaaatgcggtagaatatgtcgaaattcctcttgcggaagccattagaatgagtaacctttatcctgcacgagcaattggtatagatgatcgtttaggttcggtagaaaaaggtaagatagcaaacttagccgtgtttacgccaaattaccaagtaatcggcacagtagtaaacggaaagtggaaagagaattaa

SEQ ID NO: 21902 - DNA, 813 bp, Haemophilus influenzae
atgcgttttattccattacaaacagaacaacaagtcagttgttgggctgcacaacatatcatcaatcgtatcaacgattttaaacctaccgccgagcgtccttttgtattggggttacctactggtggcacaccactaaaaacttatcaagaactgattcgactttatcaagcaggcaaagtgagtttcaaacacgtagtgactttcaatatggatgaatatgtggctttaccagaggaacaccctgaaagttaccacagctttatgtataacaattttttcaatcatatcgatattttacctgaaaatatcaatattcttaacggcaataccgatgaccataatgcagaatgccgtcgttatgaagaaaaaattaaatcctacggcaaaattcatctgtttatggggggggttggcgtagatggacatatcgcatttaatgaacctgcttcttcattaagttctcgcacccgtattaaaacgctaacgcaagatacattgattgcaaattcacgcttctttaataatgatgttactcaagtgccgaaatatgctttaaccattggtgttggcacattattagatgcagaagaagtgatgattttagcaacaggacatcaaaaagcactggcagtgcaagctgcagttgaaggcagtattaaccatttatggacagtcagtgcattacaaatgcaccgtcatttcttgcttgtttgtgatgaagctgctcaacaagagttaaaagtgaaaaccgtgaaatattttactgaattagaaggcgcagttgctggtacggattatcaggataaatag

SEQ ID NO: 21903 - DNA, 990 bp, Haemophilus influenzae
atgatgaaattgacaaaacttttccttgccaccgccatttctttaggcgtatcttctgctgttcttgccgctgattatgacttgaaattcggtatgaatgctggaacttcatcaaatgaatataaagcggcagaaatgtttgccaaagaagtcaaagaaaaatcacagggtaaaattgaaatttcactttatccaagttcacaattaggtgatgaccgtgcaatgttaaaacaattaaaagacggttctctcgactttacctttgcagaatctgctcgcttccagctgttttaccctgaagcggcagtatttgccttaccttatgttattagcaactacaatgttgcacaaaaagccttattcgatacagaattcggtaaagatttaattaaaaaaatggataaagatcttggcgtgactttactttcccaagcttataacggaactcgccaaacgacttcaaatcgtgcaatcaacagtattgcagatatgaaaggcttaaaacttcgtgtgccaaatgcagcaacaaacttagcctatgctaaatatgttggtgcatcaccaacaccaatggcattttctgaagtttatcttgcgttacaaaccaatgccgtcgatggtcaagaaaacccgttagcagcggtgcaagcacaaaaattctatgaagtgcaaaagttcttagcaatgactaatcatattttgaatgaccaactttatttagtaagcaacgagacttataaagaactccctgaagatcttcaaaaagtcgtaaaagatgctgccgaaaatgcagcaaaatatcacactaaattattcgtagatggagagaaagatttagtcacattctttgaaaaacaaggcgtgaaaattacacatcctgatcttgttccatttaaagaatcaatgaagccgtattatgctgagtttgtaaaacaaactggtcaaaaaggtgaatcagctttaaaacaaattgaagcaatcaatccataa

SEQ ID NO: 21904 - DNA, 1233 bp, Haemophilus influenzae
atggagaatgaaatgtcacagaacggttcagatcgcgatccttggagtaaaccagggcaaagcaacgaccaacagccgggaaattcatccaataataatggatggaataacaatcaaaatcgtggaaatcaagagcaatctccaccagatattgaggagatttttaataatctgcttaaaaaattaggtggtggaaataaaaagagcggtcaaaataatggcagttctcaaggcaatacgccatttcattttggtaaagttattccacttgctgtagcgattggtgcgattatttggggcgtaaacggtttttacaccattaaagaggctgaacgcggtgtggtgcttcgttttggcgagttacattctattgttcaacctggtttgaactggaaaccaacatttgtagataaagtattgccagtaaatgtggagcaagtaaaagagttgcgtacacaaggtgcaatgctgactcaagatgaaaatatggtaaaagtggaaatgaccgtgcaatatcgtgtgcaagatcctgcaaaatatctttttagcgtaacaaatgcagatgatagtttgaatcaagcgacagatagtgcattacgttatgttattgggcatatgtctatgaatgatattttaaccacaggtcgctctgtcgtgcgtgaaaatacttggaaagctttgaatgaaattatcaaatcctatgatatgggacttgaggttattgatgtgaacttccaatctgcgcgcccacctgaagaagtaaaagatgcgtttgatgatgcaattaaagcgcaggaagatgaacaacgttttattcgtgaagcggaagcctatgcgcgtgagaaagaaccgattgcacgtggtgatgcgcaacgtattcttgaagaagcaacagcttataaagatcgtatcgtgttagatgcaaaaggtgaagtggaacgtttgcaacgcttgttgccagaatttaaggctgcgccagatttactgcgtgagcgtttatatattcagacgatggaaaaagtgatggcaaataccccaaaagtaatgcttgatggcaataatggtaataatttaactgtgttaccgctagagcaaattatgggcaaaaaatcggtaacaagtgcgccaagtgcggtcaattcttcgcctgcttttactgcaccagaacgtcaaaattcttatcagcctcagccgactaccgttgcgccgattcgtcaagggagatttaactaa

SEQ ID NO: 21905 - DNA, 231 bp, Haemophilus influenzae
atgagtattgaagaacgcgtgaaaaaaatcatcgttgaacaattaggtgttaaagaagaagatgttaaacctgaagcttcttttgttgaagatttaggtgcagattcattagacacagttgaattagtaatggctttagaagaagaatttgatattgaaattcctgatgaagaagctgaaaaaattaccactgttcaatctgcgattgattacgtgcaaaacaatcaataa

SEQ ID NO: 21906 - DNA, 729 bp, Haemophilus influenzae
atgcaaggtaaaattgctttagtgacaggatctacccgtggtatcggtcgtgcgattgcagaagaacttagttcaaaaggtgcatttgtaattggtacagcaacctctgaaaagggtgcagaggcgatctcggcttatttaggggataaaggtaaaggtttagttttaaacgtaacggataaagaatctatcgaaaccttacttgaacaaattaaaaatgattttggcgatattgatattctcgtgaataacgcaggtattactcgcgataatttattgatgcgtatgaaagatgaggaatggtttgatattatgcaaactaacttaacttcggtgtatcatctttctaaagccatgttacgttcaatgatgaaaaaacgttttggtcgtatcatcaatattggttcagtggttggttcaacgggtaatccaggacaaactaactattgtgcggcaaaagcgggtgtggttggtttttctaaatctttagcgaaagaagtagctgcacgtggtattactgtaaatgtggttgctcctggttttattgcaacagatatgacagaagtgcttacggatgaacaaaaagcggggatcttatctaatgttccagctggacgtttaggcgaagcaaaagacatagctaaagccgttgctttcttagcttctgatgatgcaggttatatcacgggaacaacgttacacgtgaatggtggcttatacttaagctaa

SEQ ID NO: 21907 - DNA, 939 bp, Haemophilus influenzae
atgaaaaaattcgcaatggtcttcccaggtcaaggctcccaaactgtcggtatgcttgctgatcttgcaactgaatatccaatcgttattgaaacatttaaacaagcatctgatgcgcttggttatgatttatggtatcttgttcaacaaggtccagctgaagaacttaataaaacttggcaaactcagcccgcacttttagctgcttcagtcgctatttatcgcgtatggaaagaaaaatttcctcaattaaaaccagaagtgatggcaggtcatagcttaggtgagtattctgcgttagtttgtgctggcgtgttggatttccaagatgcgattaaattagtggaattgcgcggaaaattaatgcaacaagctgtgcctgaaggcactggcgcaatgtatgcaatcattggtttagataatgaagcaattattaatgcttgcaaacaagcagaggaaggcgaagtcgtatctgcggtgaactttaactcaccgggtcaagtagttattgcgggtgcgaaagctgcagttgagcgtgcggctgcattatgtaaagaagcaggggcgaaacgtgcattgccgttagctgtgagcgtaccttctcactgtgcattaatgaaacctgcagccgagcaattagcggtaacacttgagaatattcaaattaatacaccaacaatatcggtattaaataacgttgatgtgaaagctgaaactgaaggcaccgaaattcgtaccgcacttgtgcgtcagttatatagtccagttcgttggactgaaacagttgaaaaaatggcgcaagatggcgttctagtgcttgctgaagtggggccaggtaaagtattaaatggtttaaccaaacgcattgtgggtgatttacaagcaatatctgtaaatgatgttgcatcattcaatgcggtagaagaatttttagtgtaa

SEQ ID NO: 21908 - DNA, 951 bp, Haemophilus influenzae
atgaatagtagaattttatccaccggtagctatctgccgagccatattcgcacaaatgcggatttagaaaaaatggttgatacatcagatgaatggattgtcactcgttctggtatccgtgaacgtcgtatcgcagcggaagatgaaactgttgcaacaatgggatttgaagcggcaaaaaatgcgatcgaagctgctcaaattaatcctcaagatattgaactgattattgttgcaactacaagtcactcacatgcttatccaagtgcggcttgccaagtgcaaggtttattaaatattgatgatgcgatttcttttgatttggcggcagcttgcacaggctttgtctatgctttgagcgtagctgatcaatttattcgtgcaggcaaagtgaaaaaagccttagtgataggctcagatctcaattctcgtaaattagatgaaacagatcgcagcactgttgtgctatttggtgatggtgcgggtgctgtaattttagaagcgagtgaacaagaaggaattatctccacccatttacacgcttcagcagataaaaataatgcccttgttttagctcagccagaacgtggtatagaaaaatctggctatatcgagatgcaaggtaacgaaacgttcaaattggcagttcgtgaactttcaaatgtggtggaagaaacacttttagccaataatttagataaaaaagatttagactggcttgtgccacaccaagcaaatttacgtattattacagcaacagctaaaaaattagaaatggatatgtcgcaagtggtggtaacgttagataaatacgctaataacagtgcagcaactgttcctgttgctttagatgaggctattcgagatggccgtattcaacgtgggcagttactattattagaagcctttggcggtggttggacttggggttcagcgttagtgagattttag

SEQ ID NO: 21909 - DNA, 1371 bp, Haemophilus influenzae
atgactaaacattatgattatattgctattggcggtggcagtggcggtattgcgtctctaaatcgagcagcaagctatggaaaaaaatgtgcaatcattgaagcaaaacatcttggcggaacttgtgtaaatgtcggttgtgtacctaaaaaagtgatgttttatggtgcgcatattgcagaagcaatcaacaattatgcgccagattatggttttgatgttgaagtgaaaaaatttgatttttcaaaactgattgaaagtcgccaagcctatattagtcgtatccatacatcttataataatgtattagcgaaaaataatattgatgtaattaatggtttcggaaaatttgtcgatgcccataccattgaagtaacacttgctgatggtacaaaagaacaagtaaccgcagatcatattttaatcgcaactggtggtcgtccatatcgtccaaatattaaaggacaagaatacggcattgattcagatggtttctttgcattaaccgaattaccaaaacgtgctgctgttattggtgcaggctatattgctgttgaactttctggcgtattaaatagcttaggcgtggaaacacatttattagtgcgtcgccatgcgccaatgcgtaatcaggatccattaatcgtagaaacattagtggaagtgcttgcgcaagatggaattcaattacataccaattctaccccatctgaaattgtaaaaaatgcagatggttcacttactgtaagatgtgatggtcaatctgatgttaccgtagattgcgttatttgggctgcgggtcgtgttccaacgacagataaaattggcttagaaaatgctggcgtagaaacgaacgaacatggctatgtcaaagtagataaatatcaaaatactaatgtgaaaggcatttatgcggtaggcgatattatcgaaaacggcattgaattaacaccagttgcagttgcagcaggtcgtcgcctttctgagcgtttatttaataataaaccgactgaatatttagattacagtttagttccaaccgttgtatttagccatccgcctatcggcactgtaggtttaactgaaccgcaagcgattgagcagtacggcgcagaaaatgttaaggtatataaatcttctttcacagcgatgtacactgcggtaactcaacatcgccaaccgtgcaaaatgaaattagtttgtgtgggtaaagatgaaaaagttgtgggtttacatggtattggttttggtgtagatgaaatgattcaaggatttgctgtagcaatcaaaatgggtgcaacaaaagctgattttgacaatacggtggcaattcatccaacaggttcagaggaatttgtaacaatgcgttaa

SEQ ID NO: 21910 - DNA, 1257 bp, Haemophilus influenzae
atgaccgcactttatgtgcaaaataaaattaacggcaaaattattttgccgttttctcattcaatgaccaatgtgcttcgccttaaccgaagttacgggagaactatgttaatttcaaatacttataatcaacactttcctcaattgacgcaagagcagcttgcgagaaatgcgacaaaaaaagtcatttgtggtatgtctggtggcgtggattcttctgtgtcagcgtttattcttcaacagcaaggctatcaggtggaaggcctgtttatgaaaaactgggaagaagatgatgatacggattattgtactgccgcagctgatcttgcagatgctcaggctgtatgtgataagttggggatcaaactacataaaattaattttgcggcagaatattgggataatgtctttgagcattttttaaccgaatataaagcagggcgcacgccgaacccagatattttgtgtaataaagaaattaaatttaaagcatttttagaatatgcagctgaagatctcggtgcagattatattgcaacagggcattatgtacgtagagcgggagataatgaaaatgcaaaactattacgtggtttagatcccaataaagatcaaagttattttctttatactttaagccataaacaagtggggcaaagtttattccccgttggtgaaatcgagaagcccattgttcgtgctattgctgaagatcttggcttaattacggcgaagaaaaaagattctacagggatttgttttattggtgagcgtaaatttaaggatttcttagcacgctatttaccagctcaaccaggtaatattcgcactgtagatgatgaaattattggtcgccatgatggattaatgtatcacacattgggacaacgcaaaggattaggcattggtggtctaaaaaatgcgggagatgaagcttggtatgtagtagataaagatgtagaaaataatgaacttattgtcgcacaaggtcacgatcatcctcgtttattttcaaaaggattgattgccagccaattacattgggttgatcgcgaaccaattcgagagtcattacgttgcacggtgaaaacgcgttatcgccaacaagatattccttgtgtgattgaaccaattgatgatgaaaccattcgagttatttttgatgaacctcaatcagcagtaaccccagggcaatctgccgtattttaccttggcgaagtttgtttgggtggcggtattatcgcagaaagaatataa

SEQ ID NO: 21911 - DNA, 1137 bp, Haemophilus influenzae
atggaaattaaacaaatcaattcaaccatcaaatctcgtgcggcggtagcattcgccccaaatcaacccttacaaattgtagaaatcgacgtagaaatgccacgcaaaggtgaagtgttaatccgcaacactcacacgggcgtttgccatactgatgcgtttacgttatcaggaagcgatcctgaaggggtattccctgtggtgctaggacacgaaggtgcgggtgtggttgttgcggttggcgaaggtgtgttaagcgtaaaaccgggcgatcacgtcattcctctttatacagctgaatgtggcgaatgtgagttttgccgctcgggtaaaaccaacttatgcgtctcagtgcgtgacacgcaaggtaaaggcttaatgcctgattgcacgacacgtttttcttatcaaggtcagccgatctatcactatatgggctgttcaaccttcagtgaatactcagttgttgcggaagtttcactggcgaaaatcaaccctgaagcgaaccacgaacaagtgtgtttgctcggctgcggtgtcactacaggtattggtgcggtgcataatacagcaaaagtacaagaaggcgactctgttgccgtgtttggcttgggtgcgattggtttagcggtagtgcaaggtgcgcgtcaagccaaagcaggtcgcattatcgctattgataccaatcctgcaaaatttgagttggcaaaacagtttggtgcaacggattgtttaaaccctaatgattacgataagccgatcaaagatgtgttgttagatattaataaatggggcattgaccatacctttgaatgtatcggtaatgtaaacgtaatgcgtcaagcattagaaagtgctcaccgtggctggggacaatccattatcatcggcgtagcgggtgcaggacaagaaatttcaacgcgtccgttccaattggtaacaggccgtgtttggaaaggttcggcatttggtggcgtgaaaggtcgctctgaacttccgcaaatggtggaagattcaatgaaaggcgacatccagttagaaccgtttgtgactcacacaatgccacttgataaaattaatgaagcctttgaattaatgcacgaaggtaaatcaatccgtactgttattcactactaa

SEQ ID NO: 21912 - DNA, 1350 bp, Haemophilus influenzae
atgtcaaaagttgcttccttagacgcatttttaacaaaagttgctcaacgcgatggttatcaacctgaatttttacaagcggttcgcgaggtattcacatcaatttggccttttttagaagccaatcctaaatatcgttcagaagcattattagaacgtttagttgagcctgaacgtgcatttcaattccgtgtggcgtggactgacgataaagggcaagtgcaagtaaacagagcatttcgtgtacaatttaatagtgccataggcccatttaaagggggaatgcgtttccatccatcagtaaatttatctatcttaaaattcttaggttttgagcaaatctttaaaaatgctttaacaacattgcctatgggcggggcaaaaggcggttcagattttgatcctaaaggcaaatctgatgctgaagttatgcgtttttgccaagcattaatggctgaactttatcgtcacgtaggagctgatacagatgttcccgcaggcgatataggcgtcggtgggcgcgaagttggctatttagctggctatatgaaaaaattatcaaaccaatcagcctgtgttttcactggtcgcggtctttctttcggtggtagtttaattcgtccggaagcaacgggatatggattaatttattttgctcaagcaatgcttgctgaaaaaggcgatagttttgcaggtaaagtagtttcagtttctggttctggtaatgtagcacaatatgctattgaaaaagcattatctcttggtgcaaaagtagtaacttgttctgattcatcaggttatgtttatgatccaaatggatttactactgaaaaattagccgcacttttcgatattaaaaatacaaaacgtgggcgtgtgaaagattatgcagaacagtttggtttgcaatattttgaaggtaaacgcccttgggaagtgcaagttgatattgcgcttccttgtgcaactcaaaatgaattagaactttctgatgcacaacgtttaattaaaaatggtgtgaaattagtggctgaaggtgcgaatatgccaacaacaattgaagcaacagaagcattactagctgcagatgtattatttggcccgggtaaagctgccaacgctggtggtgttgctacttctggtttagaaatggcacaaagttcacaacgtttatattggacagcggaagaagtggacgctcaattacatcgcattatgttagatattcacgcaaactgtaaaaaatacggcacaattgaaggtcaagaaaacattaactatgttgttggggcaaatgtagcaggctttgttaaggtggctgatgcaatgttagcccaaggcgtttattaa

SEQ ID NO: 21913 - DNA, 864 bp, Haemophilus influenzae
atgatcttcatttttatctctctgtttgctaaaatttttttcaattataacgacttctttacaaattctcacgtaaaaattatggcaaaatcattactcaattatcaatttcatcaagtaaaacaaacgattaatacacctgttttaatttttattcacggtttattcggcgatatggataatctcggcgttatcgcgagagcttttagtgaacattacagtattttacgtattgatttacgcaatcacggccatagttttcattcggaaaaaatgaattatcaactgatggctgaagatgttatcgcagtaatccgccacttaaatttatccaaagtgatattaattggtcattctatggggggaaaaaccgccatgaaaatcaccgcactttgcccagaattagtcgaaaaattaatcgtaattgatatgtcgcctatgccttatgagggatttggtcataaagatgtttttaatggcctatttgcggtaaaaaatgcaaagcctgaaaatcgtcagcaagccaaaccgattttaaaacaagaaattaatgatgaagacgttgtacaatttatgttgaaatcttttgatgttaattcagctgattgttttcgttttaatcttaccgcgctttttaacaattatgccaatattatggattgggaaaaagtacgtgtatttacgccaactctttttattaagggtggaaattcctcttatataaaaatagaaaatagcgaaaaaattctagaacaatttcctaatgcaactgcctttacgattaatggcagtggacactgggttcacgccgaaaaacctgattttgttattcgtgcaattaaacgatttctaaataagaattaa

SEQ ID NO: 21914 - DNA, 3336 bp, Haemophilus influenzae
atgattaggaaacttatgaaaatacctccattttttaccgcactttttgcctcggcaatgtttacccttagcgtttcgcaaggggtattggcggcaaattcaacaaatgtattaccaacggagcaatcgcttaaagccgatttggctaacgctcaaaaaatgagtgagggggaggcaaaaaataggttgttagcagaattacaaacatcaattgatttattgcagcaaattcaagcccaacaaaaaatcaatgatgcattgcaaacaacattaagccattcagagagtgaaattagaaagaataatgcagaaattcaagcattaaaaaaacaacaagaaacggcaacaagtactgatgataatgcgcaatcacaggactatttacaaaatagtctcactaagttaaatgatcaattacaagatacgcaaaacgcattaagcacagcaaatgcacaattggcagggcaaagttctatttctgaacgagcacaagcggcattaacagaaaatgttgtacgcacacagcaaatcaatcaacaattagccaataatgatattggtagcacattgcgaaaacaatatcagattgatttacaactgattgatttaaagaatagttataatcaaaacttattaaaaaataatgatcagctttctttactctatcaaagccgatataacctattgaatttacgtttgcaagtacagcagcaaaatattattgcgattcaagaagtcattaatcaaaaaaatcttcagcaatcacaaaatcaagtagaacaagctcagcaacagcaaaaaactgtgcaaaatgattacattcaaaaagaacttgatcgcaatgcacagcttggtcagtatttattacaacaaacagaaaaagcgaattcattaactcaagatgagttaagaatgcggaatattttagatagcctcactcaaactcaacgtactattgatgaacaaattagtgcattacaaggcacgttagttctttcacgtattatccagcaacaaaaacaaaaattaccgactaacttaaatattcaaggtttatcaaaacaaattgccgatttgcgtgtacatatttttgacattactcaaaaacgcaatgaactttatgatctagataactatattaataaagttgaaagtgaagatggaaaacaatttactgaggcagaaagaacgcaagttaaaacgctattaactgagcgtcggaaaatgacatctgatctgattaaatctttaaataatcaattaaatctcgcgatttctttggaattaacacagctgcaaattacacaaatcagtgatcaaattcaatctaaattagagcagcaaagtttttgggtgaaaagtaataatcctattaatttagattgggtaaaaatgctgccaagagctttaattgaacagtttaatggtatgttgaaaaaattaggttttccaactaattatgacaatttaccttatttgctgatgtatttcttagggttatttattgtaggcggtgcaatttttaaatttaaaaatcgtattaaacaacaattaaacaaaattaatcgtgaaatacatcgtttagatacagatagtcagtggagtactccacttgccctgttattaacagcgtttttaacgctttctagtacactttggtttttagcagtttgccaaatgatcggcttctttttcttcaaaaatccagaagaattttggcattggtcatttagtatggcgggttattggtggttctttacattttggatttcattgttccgtccaaatggtatttttgttaatcattttgaatcttcaaaagagaatgcacaacgttttcgtggtgttatccagcgcattattgttgtggttgtattgcttttaaatacttctgtgtttagcaatgtcactgatgcaggtttagctaatgatgtgttaggtcaaattaatactattgcggctctaattttctgtgcggcgattattgcccctcgttttaatcgagtacttcgctcttatgaacctgaaacaaataaacatcattggttaataagaattgtacaaattggttttagattaattcctgtgggattaatcgtacttattgttttaggctattactacaccgctttaaatttaattgagcattttattcattcttatattgcttggtgtgtatggtggttagtacgcaatacgatttaccgtggtattacggtttcttctcgtcgtttagcacatcgccgtttagcagaaaaacgtcgtcaaaaagcacttgaaaataattatgaaaatatatcctctgatgatgtggttgcagtgggagagccagaggaaagtttggcgttaaatgatgtgcgtagccaattattacgttttgtagatctctttatttggacagcattattagggatcttctactatgtatggtcagatttagtcaccgtagtgagctatttacgtgaaattacactttggcaacaaaccacgacaaccgatgctggcactgtaatggaaagcattactttatttaatcttcttgttgctttggttatcgtaggaattacttatgtgttggttcgtaatatttcaggcattttggaagtattaattttttctcgcgtgaatctttcacaaggtacgccttatacgattacgacactacttacttatatttttatcgccattggtggtgcgtgggcatttgcaaccttagggatgtcttggtcaaaattacaatggttattcgccgcactttctgttggtcttggttttggtatgcaagagatttttgcaaactttgtgtcaggtatcattttgttatttgaacgcccaatccgagttggcgatgtggttaccattaatgaagtgagcggtactgtagcgaaaattcgtatccgtgcaattacattgattgattttgatcgcaaagaagtgattgtgccaaataaatcttttgtgactggtcaagtgaccaactgggcattatctaacactatgacacgtttagtgattagcgttggtgttgcttatggttctgatttaacactcgtgcgccaattattacttcaagcagctgatgaacaaccgactattttacgcgatcctaaaccatctgcttattttttaacttttggtgcaagtacactggatcacgagttacgtgtttatgtagaacaagttggggatcgcaccagtactacagatgcccttaatcgccgtattaatgaattatttgcagaacataatattgatattgcctttaatcaattagatgtatttatcaaaaataatgatacaggcgaagaaattccttttgttgatgtaaaaaaataa

SEQ ID NO: 21915 - DNA, 1074 bp, Haemophilus influenzae
atggctggtaatacaattggacaacttttccgtgtgacaacctttggagagtcacatggtattgcattaggctgtatcgttgatggcgtgccaccaaatctcgaattatccgagaaagatattcagccagatttagatcgtcgtaaaccaggaacatctcgatatacgacgcctcgtcgtgaagatgacgaagttcaaattttatctggtgtgtttgaaggaaaaaccacaggcacaagtattgggatgatcattaaaaatggagatcagcgttcgcaagattatggtgacattaaagatcgtttccgcccaggtcatgcggattttacctatcagcaaaagtatggaatccgtgattatcgtggcggtgggcgttcgtcagcacgtgaaacagcgatgcgggttgctgcaggggctattgcgaaaaaatatttacgcgaacattttggcattgaggtgcgaggttttttaagccaaatcggtaatataaaaattgctccgcagaaagtgggacaaattgattgggaaaaggtaaacagtaatccattcttttgtcctgatgaaagtgcggtagaaaaattcgatgaattgatccgtgaacttaaaaaagaaggagattctattggcgcaaaacttactgttattgcagaaaatgtacctgtaggattgggcgagccagtatttgaccgtttagatgccgatcttgctcacgcattaatgggaattaatgcagtaaaaggtgtagaaattggcgatggctttgctgtggttgaacaacgaggttcggaacatcgtgatgaaatgacacctaatggctttgaaagtaatcatgcaggcggtattttaggcggaattagttcaggacaaccaattatcgccactattgcactaaaaccaacttcaagcattacgattcctggtcgttcaatcaatcttaatggtgaagccgtagaagttgtaacaaaaggtcgtcacgatccttgtgtggggattcgtgctgtgccaattgcggaagctatggtggcgattgtcttattagatcatctcttacgttttaaggcacagtgtaaataa

SEQ ID NO: 21916 - DNA, 351 bp, Haemophilus influenzae
atgtctaacattatcaaacaacttgaacaagaacaattaaaacaaaacgtacctagcttccgcccaggtgatactttagaagttaaagtatgggtggttgaaggtagcaaacgtcgtttgcaagcattcgaaggcgtggttattgcaattcgtaaccgtggcttgcactcagcatttactttacgtaaagtatctaacggcgtaggcgttgagcgtgtattccaaactcactctccagctgtagattctatcgcagttaaacgtaaaggtgcggtacgtaaagctaaactttactacttacgtgaacgttcaggtaaatcagctcgtattaaagagcgtttaggcgcataa

SEQ ID NO: 21917 - DNA, 741 bp, Haemophilus influenzae
atgtggataggggtaatttcattattccccgaaatgtttaaagcaattacggaatttggggttacaggtagagccgtaaaacataatcttctgaaagttgaatgttggaatccaagagattttacattcgacaagcataaaaccgtggacgatcgcccttatggtggtggcccaggaatgctaatgatggtgcaacctttacgggatgcgattcatactgcaaaagctgcggcaggagaaggcgcaaaggtgatttacctttcgccacaaggacgtaaactcgatcaaggcggcgtaaccgagcttgctcaaaatcagaaattgattttagtatgtggacgttacgaagggattgatgaacggttgattcaaactgaaattgatgaagaatggtcaatcggcgattacgttctgaccggtggggaattgccggcaatgacattaattgatgctgttgcacgttttattcccggtgtattaggcaaacaagcctcggcagaagaagattcttttgcagatggtttattagattgcccgcattacactagaccagaagtgttagaaggattaactgtaccacccgtgctgatgtcgggacatcacgaagaaattcggaaatggcgattaaaacaatcgctacagagaacgtggctccgacgccctgagctcttagaaggcctagctctgactgacgaacaacgtaagctgttaaaagaggcgcaagccgagcataacagttag

SEQ ID NO: 21918 - DNA, 537 bp, Haemophilus influenzae
gtgaaaaatatggaacaacaacatattgaagttgtgggcaaattaggctcaacctacggtattcgtgggtggttgcgtatttattcatcaacagaacaagctgaaagcatttttgattatcaaccttggtttttaaaaatcaaaggcgaatggcaatcaattgaattagaaaactggcgttatcataatcacgaaatcatcgttaaattaaaaggcgttgatgaccgtgaagctgcacaaattttagcgaatgttgaaattggtgtagatttatctgttttcccagaactagaagagggcgattattactggcacgatttaatcggttgtacagtcgtaaacttagaaggttatacaatgggaacagtaacagaaatgatggaaacgggttctaatgatgtattagtggttaaagccaataccaaagatgcttttggaaaacaagagcggttaattccgtttttgtatgaacaagtagttaaaagagtcgatctcaccacgaaaactattgaagtggattgggacgctggtttctaa

SEQ ID NO: 21919 - DNA, 249 bp, Haemophilus influenzae
atggtaaccattcgtttatctcgtggcggagctaaaaaacgcccattttatcaaatcgtagtcgctgacagtcgttcacctcgtgacggtcgcttcattgaacgtgtaggtttcttcaatccaattgcacaaggtaatgcagaacgtcttcgcattaatcttgagcgtgtaaatcactgggttgctcaaggtgcttcactttctgatcgtgttgcgagcttggtaaaagaagcacaaaaagcagcataa

SEQ ID NO: 21920 - DNA, 1812 bp, Haemophilus influenzae
atgcttttatccaaaaaatcagcctcctttgcactcagtgcatttgcgatgcttttcactagtgtagctcttgccaaagaggcaccacaagctcacaaagctgtggaattaagtattttgcatatcaatgatcaccattcttatttagaaccgcacgaaacacggattaatttaaatggtcagcaaaccaaagtggatattggtggtttttctgctgtcaatgcaaaacttaacaaattgcgtaaaaaatacaaaaatccattagtactgcatgcaggcgatgccattactggtacactttacttcacgctgtttggtggttctgcagatgcagctgtgatgaatgcaggtaatttccattattttactttaggtaatcatgaatttgacgcgggtaatgaagggttattaaaactgcttgaaccattaaaaatcccagtgctttcagctaatgtgattcctgataaaaattcaattttgtataacaaatggaaaccttacgatattttcactgtggatggagaaaaaattgccattatcggtttagatactgtgaataaaacagtgaattcctcttctccgggtaaggatgtgaagttctacgatgaaattgctactgcacaaattatggcaaatgcgctaaaacagcaaggaattaataaaattatcctactttcacacgcaggtagtgaaaaaaatatcgaaattgctcaaaaagtaaatgatattgatgtgatcgttactggcgattcacattatttatacggaaatgatgaattacgtagtttaaaacttccagtaatctatgaatatccacttgaatttaaaaatccaaatggagaccctgtatttgtaatggaaggctgggcttattctgccgtggtgggggatttgggtgttaaattcagtcctgaaggtatagcgtctattactcgtaaaattcctcatgtgttaatgagttctcataaacttcaagtgaaaaatgcggaaggtaaatggacggaattaactggcgatgaacgtaaaaaagcacttgatactttaaaatcaatgaagagtatttcacttgatgatcatgatgcaaaaacagacatgcttatttcaaaatataaaagtgaaaaagatcgtttagcacaagaaattgttggtgtcatcacaggttctgcaatgccgggtggttcagcaaaccgtatcccaaataaagcaggctcaaatccagaaggttctattgcaacgcgttttattgcagaaacaatgtataacgaactcaaaacagtggatttaactattcaaaatgctggcggtgtacgcgcagatattttaccgggtaatgtaacctttaacgatgcttatactttcttacctttcgggaatacgttatatacctataaaatggaaggttcattagtgaaacaagtgcttgaagatgcaatgcaatttgctttggttgatggctctacaggcgcattcccttatggtgcaggtattcgttatgaagcgaatgaaacaccaaatgcggaaggtaagcgtttagtgagtgttgaagtcttgaataaacaaacccaacaatgggaaccgattgatgataacaaacgttatcttgtcggaacaaatgcttatgttgcaggcggtaaagacggttataaaacctttggtaaattatttaacgatccaaaatatgaaggcgttgatacctacttacctgatgcagaaagtttcataaaatttatgaaaaaacatccgcactttgaggcttacacttcatcaaatgtgaaatttaatgcttcaactgatgcattacctaaaaaataa

SEQ ID NO: 21921 - DNA, 726 bp, Haemophilus influenzae
atgttcaaaaggctgtcattatatacgttattactttgtcttgtaccattttttatttggggtatttcctatcagtggcatggtaatagccaattaactcaagctgattattggctttatttgctcactgaaacgggtagcgtaccttatgcgttgatcacctgtgtgttgtttacgcttttgtttgcgtttttatttaaaaatccaaaacaatggatattaggcgtaattgtgatggggatttcagttattgcaactcaagccgcaaaaacaggggcaaaagcattatttgaagaacctcgtccattcaccgtttatctagctgagcaaactcattcaacgcctgaaaacttttataaaaatgaccgcactttgcgtgctgaaatagctaagaatttttattcgatggatgccattacaccagcttggttagttcatcattatgaaaatgaaacggggtattcgttcccttctggacatacgatttttgcagcaacttggctaatgcttgctgttggctttacccaattattgggtaaccgttcttttaaagcaaaattgctggtggtgggtattgcagtgtggggcttattgatgttgattagccgtgtgcgattaggcatgcattacccaatagatttgttggtggcgacattactggcatggttgattaatagcattatttttgcctttttaaagaaaaaggcgatcttcgtcatgaaatag

SEQ ID NO: 21922 - DNA, 675 bp, Haemophilus influenzae
atgactacgaataaggatcactttatggcaaaaattcagctagttgcgcaagccaatttacccactgaatacggtattttcaaaatggtgggatttgaattcccagatacaaaaaaagaacatgtagccttagtgatgggcgatatttctaatgctgatgaacctgtattagcacgtatccattctgaatgtttaactggcgatgcgcttcacagcttaaaatgcgattgtgggttccaactggcgacagcattaaaacaaattcaagaagaaggtcgcggagtcttaatttatcatcgtgaagaaggtcgcggaattggtttgattaataaaatccgtgcttattctttacaagataaaggaatggataccattgaagctaatcttgctttaggtttcaaagcggatgaacgcaactttgaagtctgtgccgatatgtttgagctacttggtgtaaaaaaagttcgcttaatgaccaacaacccagaaaaagtagaaaccatgaaaaaagcaggtatcaacgtggttgaacgagtaccgcttaatgtaggcgaaaaccgctacaacacaaaatatcttgatacaaaagcgaaaaaaatggggcattacattgtgcataacaatgacgaacaacatttaatgacctgtccacattgccaggaagagattatttaa

SEQ ID NO: 21923 - DNA, 1572 bp, Haemophilus influenzae
atgacaaatatccactatcacaaaatcctaatcctcgactttggttcacaatacactcaactgattgcgcgtcgtgtgcgtgaaatcggtgtgtactgcgaactttgggcttgggatgtaaccgaacaacaaatccgtgaatttgctccaacgggtatcattctttctggcagtcctgaaagcacaactgaagaaaatagccctcgtgcaccggaatatgtatttaatgctggtgtaccagtattaggcatttgctatggaatgcaaacgatggcgatgcaacttggcggcttaaccgaaacgtctgatcacagagagttcggctatgcttccgtttctcttgaaaattccaccgcactttttgcaaatcttaacgataatttaaccgcttctgagccaaaattagacgtttggatgagccacggcgataaggtaacgcgcttaccagaaaacttcaaagtaactggcacaacgctaacctgcccaattgctgcgatgtctgatgaaagccgtcgtttctacggtgtgcagttccaccctgaagtaacgcatactaaaaaaggcttggaattattaaccaacttcgtagtaaacatctgtggttgcgaaaccaaatggacagcagaaaacattatcgaagatgccgttgctcgcattaaagagcaagtgggcgatgatgaagtgattttaggcttatctggtggtgtggactcttctgtggttgcattacttttacaccgtgctatcggcaaaaacttacactgcgtatttgtggataacggtttactccgcttacacgaaggcgaccaagtcatggaaatgtttggcgataaattcggtttaaacatcactcgtgttgatgctgaaagtcgtttcttaggtgaacttgcaggcgtatctgatcctgaagcgaaacgtaaaattatcggtaaagtgttcgtggatgtattcgatgatgaatcgaaaaaactcactaatgtgaaatggttggcacaaggtacgatttaccctgacgtaatcgaatctgcagcaagcaaaactggtaaagcacatgtgattaaatcacaccacaacgtaggtggcttaccagactatatgaaacttggtttagttgaacctttacgtgaattatttaaagatgaagtacgtaaaatcggtttagcattaggcttaccagctgaaatgatcaaccgccacccattccctggcccaggcttaggtgtgcgtgtattaggcgaagtgaaaaaagaatactgcgatttattacgccgtgcggatgcgatctttatcgaagaattacgcaacagcggttggtatgaaaaaaccagccaagccttcagcgtattcttaccagtgaaatctgtaggtgtgatgggcgatggccgtaaatacgattgggttatttccctacgcgcggtagaaacaatcgattttatgaccgcacattgggcacatttgccttatgatttattaggcaaagtgtctaaccgtatcatcaacgaagtgaatggaatttcccgcgtcgtatacgacatcagcggaaaaccacccgcaacaatcgagtgggaataa

SEQ ID NO: 21924 - DNA, 1311 bp, Haemophilus influenzae
atgttttcacgcaaagatattatcgttttaggaatgatgatcttcgccttatttttaggtgcgggtaatatcatttttccgcctatggaaggattttcctcaggacaacattggacgagtgcttccttaggctttgttttaactggcgttttaatgccatttattacgcttgtggtggtagcgattttaggtcgtggcgaagaacttactaaagatttaccaaaatgggctggcacaggtttcctcgttatactttatttaaccattggctctacctttgcaatgccccgcatcactaatgttgcttatgaaatggcgtggttgcctttaggcttaacagaaaataatgcgaatgttcgttttgtattctcactcatttttaacttaatcgcgatgggctttatgattagcccaaatacgatcatttcaagcgtgggtaaatttatgacaccagctttattagtgttacttattgctgtagcaattaccgtatttatttcgcctttatctgaaattcaagcgccaagtaatgcttatgaaaatagccattctttattaatcggtttaactagcggctatcaaacgatggatgtacttgcagccatcgctttcggtggaattgtcgcccgagcattatcagcgaaaaatgtgacaaaaaccaaagatattgtgaaatacaccatttcagcaggatttgtttcagtcatcttacttgcgggtttatatttttcgcttttctatctaggcgcaactagtgctgcagttgcagaaggggcaacgaatggtggacaaattttctctcgttatgtaaatgtcttattcggttcagctgggacttggattatggcaggtattattgtgttagcgagcttaacaacacttgttggtgtaactagcgcatctgctgattatttttcaaaattctctgtgcgtttttcttatccattctgggccgcactttttaccgcaatgacaatcactgtttcacaatatggtttaacggatctacttcgcataacgatcccagccttgttattaatttacccagtagccattgtgcttgttttattgcaattcttacgaaaaaaacttccatcaataaaatttacatacaatagtacattgctcgttacagtttgttttagtttatgtgacagcttaaataacgttaaaatgttaccagaaagcatcaattcattattgaaacacttccctctttcatctgaaggaatggcttggttggttccgactttagtaatgttagttgcaagcatttttattggaaaagcattgcataaaacccattcttaa

SEQ ID NO: 21925 - DNA, 2130 bp, Haemophilus influenzae
gtgaatccaattgttaaacaatttaaatacggtcagcataccgttactctagaaactggtgcgattgcacgtcaagcaacggctgcggttatggcaagcatggacgataccacggtattcgtgactgttgttgctaaaaaagatgtgaaagaaggtcaagacttcttcccattaaccgtaaactaccaagagcgtacttatgcggcgggtaaaatcccgggtggtttcttcaaacgtgaaggtcgtccatctgaaggcgaaactttaattgcacgtttaattgaccgtccaattcgtccattattcccagaaggtttcttcaatgaaatccaagttgtggcaactgtggtttctgtaaacccacaaatcagcccagacttagtggcaatgatcggtgcttctgcagcattaaccttatctggtgtgcctttcaacggccctatcggtgcagcgcgtgttggttttatcgacaaccaattcgtattaaacccaactatggcagaacaaaaacaaagccgtttggacttagtggttgcaggcactgacaaagccgtattaatggttgaatctgaagctgatattttaactgaagaacaaatgttagcagcggtcgtattcggtcatcaacaacaacaagttgtagttgaagcaatcaaagaatttgcaaaagaagcgggcaaaccacgttgggattgggttgcaccacaaccaaacacagatttaatcaacaaagtaaaagcgattgctgaagcacgtttaggcgatgcataccgcattactgaaaaacaattacgttacgaacagatcgatgcgattaaagcggatgtaattgcgcaaatcacagctgaagatgaagaaaycagcgaaggtaaaatcgtggatattttcaccgcacttgaaagccaaatcgttcgtggtcgtatcattgcaggcgaaccacgtattgacggtcgtaccgttgatactgttcgtgcattagatatttgcactggtgtattaccacgtactcacggttctgcgatttttactcgtggcgaaacgcaagcattagctgttgcaaccttaggtaccgaacgtgatgcacaaatcattgatgaattaacgggtgaacgtcaagatcacttcttattccattataatttccctccatattctgtaggcgaaacaggtatgatcggctcgccaaaacgtcgtgagatcggtcacggtcgtttagcaaaacgtggtgtagcggctgttatgccaagccttgcagaattcccgtatgttgtgcgtgtagtatctgaaatcactgaatctaacggttcttcttctatggcgtctgtatgtggtgcgtctttagcattaatggatgcgggcgttccaatcaaagctgctgttgcaggtatcgcaatgggcttagtgaaagaagaagaaaaatttgtggtgctttcagatattttaggcgatgaagaccatttaggcgatatggactttaaagtggctggtacacgtgaaggtgtaaccgcccttcaaatggacatcaaaattgaaggtatcacccctgaaattatgcaaattgcattaaaccaagcgaaaagtgcacgtatgcacattcttggtgtaatggaacaagcaattcctgctccacgtgctgatatttctgactacgcaccgcgcatctatacaatgaaaatcgatcctaagaaaatcaaagatgtgattggtaaaggtggtgcaacaatccgttcactaactgaagaaactggtacatcaattgacattgatgacgatggtacagtgaaaattgccgcagtagacagcaatgcagcgaaaaacgtaatgggacgtattgaagaaatcgttgcagaagttgaagctggcgtaatttacaaaggtaaagtcactcgtcttgctgattttggtgcattcgtcgcaatcgttggaaataaagaaggtttagttcatatttctcaaattgctgaagagcgtgtagaaaaagttagcgattaccttcaagtgggtcaagaagtaaacgtaaaagttgttgaaatcgatcgtcaaggtcgtattcgtttaacaatgaaagacttggctccaaaacaagaaactgaaattaaccaagaagattctgtcgaagaacaggaataa

SEQ ID NO: 21926 - DNA, 1842 bp, Haemophilus influenzae
atgactgacaaaattactttcaatgacttaggcttacctgagttcatcttaaaagctgtttctgacttaggttttgaaacaccttctccaattcaacaatcttgtatcccgcatttgctcaatggcaatgatgtgctaggtatggcacaaacaggtagtggtaaaaccgctgcctttgcactgcctttactcgcgcaaattgatccaagtgaaaaacatccacaaatgttagtaatggcacctacacgcgaacttgctattcaagttgccgatgcgtgcgaactatttgttaaatatgcacagggcactcgcattgttaccttatatggtggccaacgttatgacatccaacttcgtgcattaaaacaaggcgcacaagtggttgtgggtacaccaggccgtattcttgaccatattcgtcgcggaacattaaatctttctgaacttcgttttatcgtattagatgaagccgatgaaatgctacgcatgggtttcattgatgatgtagaaaccgtcatggcagaattaccagaaaatcatcaaactgcgttattctctgcaacaatgcctgaaccgatccgtcgtattacgaaacgttttatgaatgatccacaagaagtgaagatcaaagtgaataacgaaaatgccccagatatcgaccaaagttgttggtatgtacacggcgtgcgtaaaaacgaagcccttcttcgtttcttagaagtggaagattttgatgcagcgattatctttgctcgcactaaaactggtactttagacattacagaactacttgaaaaaaatggtttccgttctgccgcacttaatggtgatatgacacaacaattacgcgaacaaaccctcgatcgcttacgtaacggcagtttagatattgttgtggcaaccgatgtggctgcacgcggtattgatattgaacgtatcagccttgtggtgaactacgacattccgcttgatgcagaatcttatgtacaccgaattgggcgtactggtcgtgcaggtcgttctggccgtgctttattatttgttgaacctcgcgagcgtcgtttacttcgtaatattgaacacctaatgaaaaaaggtatcaatgaagtagaattgccaaatcatcttgtgttacaagaatgccgccgcaaaaaatttgtcgccaaaattacgaaacaactcgagcatcacgatttagaacaatatcgtagtttattagaagacttattcacagccgatcaggatcaagaaaatattgctgcagcaatgttgatgctgcttcaaggcaaacaaaaactcattcttccacctgatccaccaatggaaaaacgtcgtcgtgaacgtaatgatcgcggtgatcgccgtgaaaatccacgttcagctgaacgtcgtggcgaacgtaaaggctatggaaatccacaaccaatggatttatatcgtatcgaagtcggtcgtgcagatggtgtagaagttcgccatatcgttggtgcgattgctaacgaaggcgatattaacagccgttatattggtcatattaaactttatgatgattacactaccgttgaattgccacaaggtatgccgaaagaattattgcaacaattcgctaaaacacgcgtattgaataaacaaatgcaaatgtctttcttaggtgcagtaaaatccgataattcccgtggcagcgatgattttaacggtaaacgtaaaggtcgtggtggcgatttccgtggagagcgcggacgtgaacgcggcaatgataatcgtggaaatcgtaaatttaatgaaaaaagtaaccgcacttttagcgacaaaccacgccgtgatcgtagatcatcattctaa

SEQ ID NO: 21927 - DNA, 1389 bp, Haemophilus influenzae
atggtgttcccatggcaatttttacgtcatactgaagaaaatcattatactgcaattcaagctaggggatcactttatgtaggaacaataaataaccagatttcttattttattaataaagatagcgaacgaggctttgaatatgaattagccaaagcatttgctgatactttaggcgtagaactcgaaatgaaaattttcgataatcaagagcagttatttgatgaacttgataaacacaatattgatttagctgccgcccaccttttataccatcctaaaaatgcggaacgtttccaaataggtcctgcatatcattctgcttcatggcaattagcttatcgaaaaaatgaaaatcgtcctaaaaatttaggtaacgtaaagaaagatatttatatctcaaataatttagcattagaagaaacgctaaaagaattacaaaaacaatatccacaattaatttggaaaagaaatcaagcacttactcaagaagaactattactacaactggctgaaggcaaaattccttacgttattgcaaattctattgatattgctgcaattcaacaaatcaaaccagagttagccattgcctttgatattactgatgaagcaaacgttcactggtatttacccaataacccctaccgcgatctacaaacggctttactcaattttatgaataatgccgaagaaacgggacttttagataatttaaaagaaaaatatttaggacatatttcacaatttgattacgtggatacgcgctcttatatgaacgcaattgaaaataccctgccacaattctcaccgctctttgaaaaatacaaaggtgaattagattggcgactactcgcagcagtggcttatcaagaatctcattggaatcctgacgcaacatcgccaactggagtacgtggcataatgatgctcaccaaaaataccgcacaacatatgaaaatcagtgatagaacagatcctgaacaaagtattaaagctggttcagagtatttacactggttgattagtcagcttcctgaaagcattgaaaaggaagaaagaatttggtttgccttagttgcctataacataggactcggtcacttaattgatgcacgccgtttaactcaaaatcttggaggaaatccagataattggttcgatgtgaaaaaaaatctgcctttattagcagaaaaacgctattattcccaactgaaatacggctatgcgcgaggctatgaagcccatcaatatgtagaaaatattcgccgctatatgaatagcatagtgaattatcatcgagtccaagaaaatcaaacaacgaatgataatgccaacaacgaaagtgcggttaaaaatttagaagaaataaaagaaaataaggattaa

SEQ ID NO: 21928 - DNA, 1149 bp, Haemophilus influenzae
atgaagtatgaattagataaaacaagcggcaatgctcgtcgtggtcgcttggtatttgaacgtccacagggcacgttcagtgtagaaacccctgcatttatgccagtgggtacttatggcacggtaaaaggcatgacgccagaagaagtgcgtgcgacaggtgcagaaattttactgggtaacacgttccatttatggcttcgaccaggacaagaagtcatgcgtaaacacggtgatttgcacgactttatgcaatggcatcgtccgattttgactgacagtggcggtttccaagtattcagtttaggtaaattacgtaaaattaccgaagaaggcgtaaaattccaaaacccaattaatggtgagcgtattttcctttcgcctgaaaaatccatggaaattcaatatgatttaggttctgatatcgtgatgatttttgatgaatgtactccttacccagcgactttcgattatgcgaaaaaatctatggaaatgtcacttcgttgggcaaaacgcagccgcgatcgctttgatgaattaggcaataaaaatgcgttattcggtattatccaaggcggtgtatttgaagaattacgtaaagtatcattagaaggcttagtcaatattggttttgacggttatgcggtgggcggtttagcggtaggcgaaccaaaagaagatatgcaccgaattttagaatatatttgcccacaaatcccagctgacaaaccacgttatttaatgggcgtgggtaaaccagaagatttagtggaaggcgtgcgtcgtggcattgatatgtttgactgcgtaatgccaacccgtaacgcacgtaatggccatttatttgttacagacggcattgtcaaaatccgtaatgcaaaatatcgtgatgataccagcccgttagatcctgaatgtgattgctacacctgtaaaaactacaccaaagcttatttatatcatttagataaatgcggtgaaattttaggtgcgcgcttaaataccattcacaatttacgctattatcaacgtttaatggcggaaattcgtcaagcgattgaagatgatcgttttgatgattttgtggtggaattctatgctcgcatgggcaaacctgttccgccattacaattagcggataaatcataa

SEQ ID NO: 21929 - DNA, 1092 bp, Haemophilus influenzae
atgcgtgtttcagactttaactttgatttacccgatgaattaattgctcgttatcctaaaactgatcgtgtttcttgtcgtttattacagttaaatggcgaaaacggagaaatttttcaccgcactttttctgatgtattagatttaattgatgaaggcgatttgttgatttttaataatacacgcgttattcctgcaagaatgtttgggcgtaaagccagcggtgggaaaattgaagttttagttgaacggatgttagatgaacatcgtttcttagcgcatattcgttcatcgaaatcccctaaagaaggggctgaattatttttaggggaagataaattaggcgaaaataatggcattaaagcggtaatgaaagcgcgtcatggtgcattgtttgaagtggaattaagtgataaatcaaccgctcttttagatgtgttgcaaaccattgggcatatgccattgccgccttatattgaccgcccagatgaagaagccgatcaagaatgttatcaaacggtttatagtaaagtaccaggtgcggtagcagcaccaacagcaggcttacattttgatgaaaatttacttgaaaaactcaaagcaaagggtgtgaattttgaatttgttacattacatgtaggcgcaggaacattccagcctgttcgtgtggaaaatattgaagatcacgtaatgcatgcggagtatgtggaagtttctcaagaagtctgtaatgcgattatcgcaacaaaaaaagcgggcaaacgtgtaattgcagtgggaactacttctgttcgttctattgaaagtgcggcactttctgcggaagaatttggcaatccagatttaattgagccttatttttctgatacctctatttttatttatccagggaaaaaattccgagtggtggattgcttaattactaatttccacttacctgaaagcactttgattatgttagtttcagcttttgctggttataaaaataccatgaatgcatataagcatgcagtaaaagaaaaatatcgtttctttagttatggcgatgcgatgtttattaataaaaattctaatgtgagaggattggaataa

SEQ ID NO: 21930 - DNA, 2832 bp, Haemophilus influenzae
atggaaaatatcgatattcgcggggctagaacccataacctgaaaaatattaatttaactattccacgcaataaacttgtggtgattactgggctttcaggttcgggaaaatcctctttagcctttgatacactttatgcggaagggcaacgccgctatgttgaatctctttcggcgtatgcacgccagtttttatctttaatggaaaagcctgatgtggattctattgagggactttcccctgcaatttcgattgaacaaaaatctacctcacacaatccacgttctacggtgggaacaattacggaaatttatgattatttacgtttattgtttgcacgagtaggggagccacgttgtcccgatcataatgttccattaacggcacaaacaattagtcaaatggtggataaagtattaagtttgccagaagacagcaagatgatgttacttgcgccagttgtcaaaaatcgaaaaggtgaacacgttaagattttagaaaatattgctgcgcaaggttatattcgtgcgcgtattgatggcgaaatttgcgatttatctgatccgccaaaattagccttacagaaaaaacatactattgaagtagtggttgatcgttttaaagtgcggtcagatttagcaacacgtttagcagagtcttttgaaaccgcattagagctttcaggtggcactgcaattgtggcagaaatggataatccgaaagcagaagaattagttttttcggcaaattttgcttgtccgcattgtggttattctgtgccagaattagagcctcgtttgttttcctttaacaatcctgcaggtgcttgcccaacttgtgatggcttgggtgtgcagcaatattttgatgaagatcgtgtggtgcaaaatccaactatttctcttgctggtggtgcggtaaaaggttgggatcgtcgtaatttctattattatcaaatgcttacatcattggcgaaacattatcattttgatgttgaagccccttatgaatctttgccaaagaaaattcaacacatcattatgcatggctcaggcaaagaggaaattgaattccaatatatgaatgatcgtggcgatgtggttattcgcaagcacccttttgaagggattttgaataatatggctcgccgatataaagaaacggaatcaatgtcggtgcgtgaagaattagcgaaaaatattagcaatcgaccttgtatagattgtggcggttctcgtttgcgacccgaagcgcgtaatgtgtatattggaagaaccaatttgccgataattgcggaaaaaagcattggcgaaaccctcgaattttttaccgcactttctctcactggtcaaaaagcacaaattgcggaaaaaattcttaaagaaatccgcgagcgtttgcagtttttagtcaatgttggtttgaattatctttctctttctcgttctgctgaaactctttcaggtggggaggcgcaacgtattcgccttgcgagtcaaattggtgcgggacttgttggcgtaatgtatgtattagatgaaccctctattggcttgcaccaacgtgataatgaacgcttacttaatacgttaattcatttgcgtaatcttggtaatacggtaattgtcgtggaacacgatgaagacgcgattcgtgcagctgaccatattattgatattgggcctggtgctggcgtgcatggcggacaagttattgcgcaaggaaatgccgatgaaattatgctcaatccaaattccatcacgggaaaatttttatcgggcgcagataaaatcgaaattcctaaaaaacgcaccgcacttgataagaaaaaatggctcaaacttaaaggcgcatcaggtaataacttaaaaaatgtgaatttagatattcccgttggtttgtttacttgcgtaactggcgtgtctggttcaggaaaatccacacttattaatgatactttatttccacttgcgcaaaatgcgttaaatagagcggaaaagacggattacgcaccttatcaatctatcgagggattagaacatttcgataaagttattgatattaaccaaagcccgattgggcgcacgccacgttcaaatccagccacttatacaggcttatttaccccaattcgtgaactttttgcaggtgtgccagaggcacgtgcgcgtggttataatccggggcgttttagctttaacgtacgaggtggacgctgtgaagcctgtcagggcgacggtgtactcaaagttgaaatgcattttttacccgatgtttatgttccttgcgaccaatgtaaaggtaaacgctataatcgcgaaaccttagaaattcgttacaaaggtaaaaccatccatcaagttttggacatgacggtggaagaagcacgcgagttttttgatgcgattccaatgattgcaagaaaattacaaaccttgatggatgtgggattatcctatattcgattaggtcaatcttctacaacactttcaggcggcgaagcacaacgcgttaagctagcgactgagctttctaaacgtgatacaggtaaaaccttatatattttagatgaaccgacgactggtttgcatttcgctgacattaagcaattacttgaagtattgcatcgattacgcgatcaaggaaatactatcgtcgtcattgaacacaatcttgatgtgattaaaaccgcagactggattgtcgatcttggcccagagggaggcagtggcggcggacaaattattgcgacgggtacaccagaacaagttgctaaagtaacaagttcccacaccgctcgcttccttaaaccgattttagaaaaaccttag

SEQ ID NO: 21931 - DNA, 507 bp, Haemophilus influenzae
atggctggaattaataaagtcattattgtaggtcatttaggtaatgatcctgaaattcgtactatgccaaacggcgatgccgttgcaaatatcagcgtagcaaccagtgaaagctggaacgatcgtaatactggcgaacgccgtgaagtaacagaatggcaccgcattgtattctatcgtcgtcaagcagagatttgcggcgaatatttacgcaaaggctctcaagtgtatgtggaggggcgtttaaaaacgcgtaaatggcaagatcaaaacggtcaagatcgttacaccacagaaattcaaggcgatgtaatgcaaatgcttggtggacgtaatcaaaacgcaggtggttatggtaatgatatgggcggtgcgccacaatcttcttaccaagctcgtcaaactaacaatggtaatagttatcaatcatctcgcccagctccacaacaagctgcaccacaggctgagccaccaatggatggatttgatgacgatattccgttctaa

SEQ ID NO: 21932 - DNA, 588 bp, Haemophilus influenzae
atgaaacaaaaaatcgtacttgctacaggcaataaaggaaaagtaaaagaaatggctgatgtcctatctgattttggctttgaagtgattgcacaaacagatttaggcattgaaagcccagaagagacaggcttaacttttgtagagaatgccttattaaaagcccgttatgcctcagagaaatcaggtttacctgctattgcagatgattctggcttagtagtttccgcacttaatggcgcaccaggtctgtattctgcccgttatgctggtgaagagggcaatgatgctaaaaaccgtgagaaattattggcagagcttgctcatattgcacaagaacaacgccaagccaaatttgtgagctgtatcgtgtttttacagcatccaacggatccatcgccaattatcgccgaaggtgagtgttgtggcgtgattggttttgaagaaaaaggcgaaaatggctttggttatgacagtttattctttagtccagaacaaggttgcacatttgctgaattagaaacagctgagaagaaaaaaatttctcatcgagcaaaggcattgagtgttttaaaaagtaaattataa

SEQ ID NO: 21933 - DNA, 2718 bp, Haemophilus influenzae
atgtataaattaaatgtaatttctcttatcattttgaccacttacactggtgcgacatatgcctctgcacgggatttgccacaaggtagcagtgtagttgttggggaggcaaatgtttctacaattggaaataaaatgacgattgatcaaaaaaccccaacaactcaaatagactggcatagttttgacatcggtcaaaataaagaagtggaatttaaacagcctgacgcaaattctgtggcatataaccgtgtaactggcggcaatgctagtcaaatccaagggaaattgacggcaaacggtaaagtttatttagcaaaccctaatggggttattattacccaaggggcagaaattaatgtagctggtttatttgcaacaaccaaagatttagagagaatcagtgaaaatggcaatggcaatggcaataaatttacccgtaaactaaaagacggtcaggtggtaaaagaaggtcaagttatcaataaagggaaaattaaggcgaaagatttcgtggtacttaatggcgataaagttatcaatgaaggggaaattgacgctacaaacaatggcaaagtatatttatcctcaggctataattttacatttaccttatcagatagcagcataagtgtggcattagaagataatgcagtacagagtattgttcaaaatgaagggattattaaagcaggggacattacgctaaatgcaaaagggcgtaatcaagcattagatagcttggttatgaataatggtgtgttagaagcaactaaggttagtaataaaaacggcaaggttgtgttatctgctgacgatgttcagttgaataataaaagtgatattaaaggggagagtgaggttgtatttactaacgaacctaaaaacaagataaaaatcacttctcaaactggctcaaaagttacctcgcctaaaatcaactttacaggcaaaagcgttaatatcaatggtgactttggacgtgacgatagtaaagcgcactataacgaagagcataaaagattagatacagaagttaatattgacgtgccagacaatgaaaatattcgtattgcggagaaagataatacgggcacgggtacgggtacggattcatttatacaaacaggggcgttaagttcattactagctaataatggaaaagtgaatcttaaaggaaaggacgttaatatttcaggacgtattcatatagattcctttagaggctcagattcgctattaaagctaactaaccaaggtcatattaagatcaatcatgcggatattcattcaacaggtcgtttattttttataaccagtttgcagaatgagaaagattctcaatcagatattaccattactgacagcaaaataaatcttggtaacggagctatgggattggggcgtagtctcgataaagaaaactgcgataaccaaagatggtgtagaacggaaacctcacaacgcaagaagtttgatgttcatatgcgtaatgtagtatttgatcaggttgatgatgtggttgtagcaggtggatttaaaaaagttaatttagataacatcgttgccacaggaaaaacgaatttttacattgatgggggggtatcccgtaataattcaagatatgaatacggtgtgttagatttagacaaacgtacgctgttatcggagttagatcaacgcagacgccgttggaaatattacaatgatttagatttagatatgaataaagcttattggcatcgttttgatatgtttgccactaaaaatacagggcgatcaactattaaagacacagaaattaatatttctaacagtaagattaatctgaaaaatggatttgtacatttactggcagaaaaaattaaattagataatagcaagattgatattacttttgataaagataattcacaagatatttcaactcaaattaaccgtttaggaatgaatggtaaagtgtcaatggtaaactcacatattaaaatcgtgggcgatgagaaaagcgatatatctgcaaaagcaccttatgctacgatgtttttaatcggggaattaataggggaaaaaagttctatttttgtgaaatctcatcagggttacacctttagaactgatggtgatacaaaaattgcaggtaaaaacagtaaagatgacttgaaaattaccgcaattaacactggaggaagaactgggaaagaagtgatcattaatggtgcgcctggctcaattgataatgatgcgaatattgccaatatggcatttactattggtgataacgcaaataccaaaacaaccattgaaaatgccgacatcactgccttagcaccaaacggtgggacagcttatttaagctccaaaggggtagaaattgaggtaaacccaaattcaaatttcacattctttgaacttcctcgtgagaaaaactttaatcaaacaaaaattaaaggcgattctaccaaactcagtgaacgtggttttgctagactttatgacaaaattaacggtgtgcgagccagcaacttgtctgctgagcaattgaatgtgacggacgcaagcgaaaaaatcattaatacaaagttagtgagtagcttagatgttgaaaaacttgtttctgttgcagtttgtgatgcaggtaaaggttgcgaagaacaacaattcggcgataaaggtaataatactaaagtgagtgttggagagttagaaactgaacaataa

SEQ ID NO: 21934 - DNA, 600 bp, Haemophilus influenzae
atgagccttttcgcccttttttatatgctttttgcctatcttttaggctcaatttccagtgcgattttaatttgtcgcattgcaggcttgccagatcctcgtcaaaatggttcacacaaccctggggcgacaaatgtgttgcgcattggaaatcgtaagtctgccttggcggtgcttatttttgatatgttaaaagggatgattcctgtatgggcagggtattatttaggtttaacccaatttgaattgggaatggtcgcacttggtgcttgtttagggcatattttcccaattttctttcaatttaaaggtggcaaaggtgttgcaactgcctttggggcaatcgcaccgatttcttgggctgttgcaggttcaatgtttggtacgtggatctttgtttttcttgttagtggctattcttcattaagtgcagttatttctgcattacttgtgcctttttatgtgtggtggtttaaacctgaatttacttttcctgttgcactggtatgttgcctattaatttatcgtcatcacgataacattcaacgcttatggcgtggtcaagaagataaagtttgggctaaatttaaaaagaaataa

SEQ ID NO: 21935 - DNA, 1704 bp, Haemophilus influenzae
gtgtatactaaaggttccgtttccactcgtattgcgaaatatttatttatcattcttatcgttgctggtgtgattagttctctcagtttggcaattatgagcagtaataaatatgatgccgaagccattaatatttcaggttctttgcgtatgcaaagttatcgcttactttatgaaatgcaagaacaaccagaaagcgtggaaacgaacttacgccgttatcatataagccttcattcatctgctttactagaagttcaaaatcaatttttcacaccgaatgtattaaaacattcctatcaaaacattttgcaacgttggacgaacatggaaaaatatgcgcgccaacaggatgtaaaaaactatagtaagcagcttactgactatgtggcagatgttgattattttgtgtttgaattacaacgttttagcgagcagaaatggattttaggcgtttcagtattaggttttgcgatgttgttaattttgctgatggtgtcttatgtgatttggtatacaaaccgagaagttgtgaaacctttgcatttaatgacaaaagccagtatgcaagtgcaaatgcgtcaattcaatcatattccacttgacacaaggaaacaaaatgaacttggcacactggctcgcgtatttacacaaatgtccacagaactgggacagctttattcgcgtttagaagaagcggtaaacgaaaaaacgcaaaagttgcgtcaaactaaccgcactttaagcactctttatcaaagtgctcaacttctgaatacaaacacaattaacgataaaattttaaatcaagttttaaattacatttttattagcgaccatttgaacttcgttaaagtggaagtgatgggggctgaacattgggatattacattgggtaagcaagatgctaataatgaactacaaatcgaaaccctttctgtggataacgaagaattaggtgtactctcttggcaagcaggattaccttgtccagatccccgaattatgcaaaatttagcgcaaatgcttgctcgtgcgctttatttccataaaaatttacgtcagaaagaacagcttttattaatggaagaacgctcaattattgcgcgagagttgcacgattctttggctcaagtcttatcatttttacaaattcaacttactttgctcaaacataatctgaagaaagaagacgaacaatcaaaagaaaagagtttggcaattattgccaattttgaacaagccctttctggtggttatgcacagttacgtgagcttttagccactttccgtttaaccatacaagaagcgaatttacagcttgcactaaaacaagtgattgattcattacgctcgcaaacaacaatgcaaatgaatgtgaattgtcaattaccatcgcaaagtttgaaccctcaacagctggttcacgttctgcaaattgtacgtgaagccaccaccaatgcgatcaagcattctcaaggcacggtaattgaaattagcgcaagaattaatgcggaaggcgagtatgaaattttagttgaagatgatggggttggcattccaaaccttgaagaacctgaagggcattacggcttgaatattatggcggaacgttgtcgtcagcttaatgcacaattgcatattcatcgccgtgaacaaggcggcacacaagtcaaaattaccttgccacatacattatattag

SEQ ID NO: 21936 - DNA, 1026 bp, Haemophilus influenzae
atgcaaaatttacaaccttttcacactttccacattcagtctaatgctcgtgaaattattgaagcacatagtatcgaacagctacaacaagtgtgggcgaattctaaatcagaaaatttacccactctttttttaggtcaaggaagtaatgttctatttctagatgattttaatggcatcgtgatccttaatcgtttaatggggattacgcacgaacaagatgcaaattttcactatcttcacgtcaatggcggggaaaattggcataaattggtggagtggtctattaataatggtatttatggcttagaaaatctggctctgattcccggttgtgcaggctctgcccccattcaaaatatcggtgcttatggcgttgaatttaaagatgtatgtgattatgtggaggtacttaatttaaatacgaacgaaacctttagactcgacacagaacaatgtgaatttggttatcgtgagagtatttttaaacatcgttatcagcaaggttatgtgattacagcggttggattaaagctaaaaaaagattggcagcctattctaaaatatggttcgcttgtagagttcgatccgaaaacggtcaccgctaaacaaatttttgatgaagtctgtcatatccgtcaaagcaaattacctgacccaaatgaagtgggtaatgcagggagtttctttaaaaatcccgttgtcagttcagaacattttgaagaaatcaaaaaacatcacgaaaatctaccgcactttccacaggcagatggctcagtgaaattagcggcaggctggctgattgatcaatgcaatcttaaaggttttcaaattggtggggctgcggttcataaaaaacaagcattagtattaattaacaaaaacggggcaacagggcaagacgtggtcaaactcgcccatcacgttcgccaaactgttgcagaaaaatttggtgtatatttacaacctgaagtacgatttatcagtgcaactggcgaagtaaatagtgagcaaattatcacgtaa

SEQ ID NO: 21937 - DNA, 1443 bp, Haemophilus influenzae
atgaaactagatgctccttttaatttagatccaaatgtaaaagtgcgtactcgttttgctcctagccctacaggttatttacatgtaggtggcgcacgtaccgcactttattcttggttatacgcaaaacataataacggcgaatttgtattacgaattgaagacactgatttagagcgttcaacacctgaagccactgctgccattattgaaggcatggaatggttaaatcttccgtgggagcatggcccttattaccaaactaaacgctttgatcgttataaccaagtgatcgatgaaatgattgaacaaggcctagcatatcgttgttattgtactaaagaacacttagaagaacttcgtcatactcaagaacaaaataaagaaaaaccacgttatgaccgtcactgcttacacgatcacaaccattcacctgatgaaccccacgttgtacgttttaaaaatccaactgaaggctcggtggtatttgatgatgccgtacgtggccgtattgaaatcagcaacagtgagcttgatgatcttattattcgccgcacagacggttctccaacttataacttctgtgtagttgtagatgactgggacatgggtatcacacatgttgtgcgtggggaagatcatatcaacaacacgcctcgtcaaattaacattttaaaagcgattggtgccccaattccaacctatgcacacgtttctatgattaatggcgatgatggtcaaaaactctctaaacgacatggcgcagtaagcgtaatgcaatatcgtgatgatggttacttaccagaagctttaattaactatcttgttcgtttaggctggggacatggcgaccaagaaatttttagtcgcgaagaaatgatcaactatttcgaattagatcatgttagcaaatcagctagcgcatttaataccgaaaaattacaatggttgaatcaacattatatccgtgaattaccgccagaatatgtggctaaacaccttgaatggcattacaaagatcaaggcattgatacaagcaatggccctgcattaactgaaatagtcaccatgcttgcggaacgttgcaaaaccttaaaagaaatggcaaggtcaagccgctacttctttgaagagtttgaaacctttgatgaagccgcagcgaaaaaacatttcaaaggcaatgctgctgaagcgcttgcaaaagtgaaagaaaaattaaccgcactttctagctgggatttacattctattcacgaagccattgagcaaacagctgctgaactagaagtgggcatgggtaaagttggcatgccattacgtgtcgcggtgacaggttctggtcaatcgccatcaatggatgttaccctagtcggtatcggcagagatcgcgtacttgcgcgtattcagcgtgctattgattttattcatgcacaaaacgcttaa

SEQ ID NO: 21938 - DNA, 486 bp, Haemophilus influenzae
atgtcagaaatttcaaccgcgctttctttagaaaattgtccatgtcaatctagccatcattacgcagattgttgtggcaaatttcatttgagacaagcatttcccgaaacggcagagcaacttatgcgttcacgttatacggcttatgtgttaaaaaatattccctatattgttgtaacaactgtgccaagccaacaaactttattaaagcctaggttattgcaagaatgggctgacaacactacgtggctaggattagaaattctaaaaacggaaagccttacaaaaactcaaagtgcggtggaatttaaggcgatttttcaaggcgaagaatgtgagcaagcccatcaagaacggtcaatttttgtgaaaattgaagatcgttggtattttgtggatccgaccgtatcattaccgacaatgaaacaaccttgtgtctgtggttcgggtaaaaaatttaaacattgttgtggaggatttctatga

SEQ ID NO: 21939 - DNA, 1368 bp, Haemophilus influenzae
atgattagcgtatttgatatgtttaaagtgggaattgggccatccagttcccacacggtcggtccgatgaaagcgggtaaacaatttatagacgacttaattaaacgaaatcaatttgaacaaactactgaaattcacgtagatgtgtacggttctctttcaatgacaggacgaggacacagtacagatattgccattattatggggttagcgggttatttaccacataatgtggatattgatatgatttcaggtttcattgagaaagttaaacaaactgcgcttttacccattaatgtcggtcaaaagatagtaaaatttgattttgaaaataatctcattttccaccgcacttttttaaaattgcacgaaaatggcatgacaattaccgctcttgatgaaaatcgcacagagctttatcgccaaacctattattcgattgggggtggttttattgtcgatgaagcccattttggcaaagaagaaaaaaacacagtccaagtgccttatccttacaaaaatgccgaagatattttgaaacattgtagtgataacggcttaatgctttccactgtgatgttggaaaatgaaatcgcattgaatggcaaagaggctgttagtgctcatctagagaatgtctggaaaacgatgcaggcttgtattgaacacggcattcacacagagggtattttacccggcccattaagagtaccacgtcgtgcagcttcactttatcgtgcgttgcaagcaaatacgaatttatctaacgatccaatgcgcgtaatcgactgggtcaatatgtttgcgcttgctgtcaatgaagaaaatgcagcaggtggacgcgtggttacggcaccaactaatggtgcgtgcgggattattccagcggtattagcttactatgaaaaattcatctcgccattaacacctgaaatcattgaacgctatttattagccgcagggatgattggttcactttataagatgaacgcttctatttctggtgcagaagtgggttgccaaggtgaagtgggtgtagcctgttccatggcggctgcaggactagctgaaattttgggtggtaatccactacaagtatgcatcgcagctgaaattgcaatggagcataatttaggattaacttgcgaccctgtcggcggtcaagttcaagtaccttgtatcgaacgcaatgcgattgcttcagttaaagcaatcaatgcatcgcgtatggctttacgccgtaccactaatccaagagtaactttagataaagtgattgaaacaatgtacgaaacaggtaaagatatgaacgccaagtatcgcgaaacatctcaaggcggacttgcagttaagattgtttgtaactaa

SEQ ID NO: 21940 - DNA, 1239 bp, Haemophilus influenzae
atgaaatcaacagaaaaactcaaatggaacaaatttgatgcaacgtggatgttaaaccttttcggtacggcggttggcgcgggcgtattgttcttgccgattaacgcagggatgggtggattttggccgttagttttaatggcaattatcgtcgggccaatgacttattttgctcaccgtggcttagcctactttgtactttcatcaaaaaatcctggcagcgatattactgaagtagtggaagaacactttggtaaaacagcgggtaaacttattaccttactttattttttcgcgattttccctattctgttgatttacggtaacggtatcacgaacaccgtagattcttttattgtgaatcaacttggtatggcatcaccaaatcgagtcattctctcttttgtattaattgcggtattgatttccgtgatgttatttaatgaaaaagtgatgttaaaaatcacagaatggcttgtttatccgttagtcttaattttatttgttctttctatttacttaattcctgaatggaatagtgccgtattatatgaatttccaacagtaggcggtttcttaacaactttatggctaaccattcccgtattagtattttcatttaaccattcgccagcaatttcatctttcacttgctcacaattccgtgaatataaaactttcgatggtgcagaacgccatatcagccatacagaaaaaggcgcctcaacgattttgttattcttcgtaatgttcttcgtatttagctgtgtattaacattaacacctgaagaattagtggcagcaaaagaacagaatattagtatcttgtctttcttagcgaataaatttgataatccatatatctcttattttggcccgcttgttgcattcttagcgattactagttcattcttcggtcactatatgggggcacgtgaaggcttagaaggtttatatttaaaaatgaaaggtgaagcagtaaatcgtaaaaaactcaattatgcgaccgcacttttcttcttattaacgttatggggcgttgcgattattaatccaagtatcttaggcttaatcgaatctcttggcggcccaatcattgcgatgattttgtttatcatgccaatgtacgcgattcgaaaaatcccagcaatgaaacgctacagcggacgtttcagtaatgtatttgtaacaattatggggctaattgctatttctgcagttgtttatggattattataa

SEQ ID NO: 21941 - DNA, 2169 bp, Haemophilus influenzae
atgctggatttgacgccacagagtaaaaaaatttcaattcagattggtgggatgacctgccaatcttgtgccaatcgcattgaaaaagttttaaataaaaaaccatttgtgcaacaagcaggcgtaaattttgctgccgaagaagcacaagttgtatttgacgctacgcaagcaagcgaagctcaaattatagagattatccataaaacaggtttctctgcccatatcaaacaagccaacgaattaccaatagaagaaaatacatcaatcccttggcgattaatcgtactttggataatcaatattccatttctgattggaatgcttggtatgataggtggctcccataacttaatgttaccgccgatttggcaatttgcattagcgagcattgtgcaactttggttagccattccattttatcgcggagcaatcggtagtattcgtggtggacttaccaatatggatgtactggtcagcacaggaacgctcactatttatctttattctgctttcatgttgttttaccacgccaatcatgcaatgggacatgtgtactttgaagcttctgttatggtaattggttttgtcagtcttggaaaatttcttgaagatcgcactaaaaagcacagcctaaatagcttaagtatgctcttgcaactgacaccgaaaaaagtcactgttttacgtaatgaaaaatggattgaaattgctcttgaccaagtcaatatcggcgaaatcattcgtgcgaatcaaggcgagcgtattgcggcagatggcgtaattgaaagtggaaatggttggtgtgatgaaagccatttaacgggggaatctcgcccagaagaaaaacagaaaggtggaaaagtattagcgggggcgatggtaacagaaggttctattatctatcgagcaaatcagcttggtagccaaaccttacttggcgatatgatgaatgcattatcagatgcacaaggttcaaaagcacccattgctcgatttgctgacaaagttacttccgtgtttgtgcctgtcgttttagtgatttcacttgttactttcgcactcacttatattctgacgaatgatagtgtgtcttcactaattcacgcggtatccgtgcttgtgattgcttgcccttgtgccttgggattagccacaccagcagccataatggttggtttaggtaaagcagtcaatgctggcgtatggtttaaagatgcggctgcaatggaggaaaccgcccacgtggataccgttgtacttgataaaactggcacattaacaaaaggagagcttgaaatctctgctttatggcagccacaaagtgcggtgtattctgaagacgatttgtatcgttttgcagcagcagttgaacgacaagctaaccacccaattgcaaaagctattgtgcaagcagcagaackaaaaatgttagaaattcccaccgcacttttttcaaagatggaagtgggtcaaggcattcaagccgaattagaacaagtgggaacaataaaagtcggtaaacctgattattgcggtttaatcttgcctaaaaatttagaggatatttggcaaattgcgagcattgtcgcagtatccataaatgatgaacccatcggtgcatttgcactgacggatactttaaaaaacgatagcttgcacgccattcaacgcttacaacagcaaaatattgatgtcgtaattatgagtggcgatcaacaatctgtcgtggattacatagcgaaacaactcggcattaagaaagcctttgggaaactaactccaagagataaagcggaacaaatccaaaagctgaaagatctaggtcatattgtcgcaatggtaggcgatggaataaatgatgcgcctgctttagcttctgcaaacgtcagttttgcgatgaaatcaagttcagatattgcagaacaaacagcctctgcaacgcttatgcaacattcggtgaatcaacttgtggatgcgctttttattgcaagagcaaccttgaaaaatatcaaacaaaatctattttttgctttgatttacaatattctcggcataccccttgccgctttcggttttcttagccctataatcgctggtgctgctatggcgttgagctcaatttccgtattgatgaacgccttaagattgaaaaaagtgcggttctaa

SEQ ID NO: 21942 - DNA, 207 bp, Haemophilus influenzae
atgaaaactatcacattaaacataaaaggcatacattgcggctgttgcgtaaaaaatcttactcaagttttaactgaattagatggtgtacaatctgctgatgtgcaattagagggtaaagcaaatattacttttgatgaaaatcgagtcaatgttgcacagttgattgaggtcattgaagatgctggatttgacgccacagagtaa

SEQ ID NO: 21943 - DNA, 207 bp, Haemophilus influenzae
atgaaaactatcacattaaacataaaaggcatacattgcggctgttgcgtaaaaagtcttactcaagttttaactgaattagatggtgtacaatctgctgatgtgcaattagagggtaaagcaaatattacttttgatgaaaatcgagtcaatgttgcacagctgattgaggtcattgaagatgctggatttgacgccacagagtaa

SEQ ID NO: 21944 - DNA, 318 bp, Haemophilus influenzae
atggcgaattgggacggaaaatatatcagcccttatgcagaacatggcaaaaaaagtgagcaagtaaaaaaaattacagtatccattcccattaaagtactggaaattttgacgaatgaacgcactcgccgccaattaaaaagtttacgtcacgcaactaacagtgaattgctttgtgaagcgttcttgcatgcattcacaggacaacctttacccaccgatgcagatttaatgaaagagcgtaatgatgaaatccctgaagatgccaaagtgcttatgcgtgaattaggtgtcgatccagaaagctgggaatattaa

SEQ ID NO: 21945 - DNA, 1263 bp, Haemophilus influenzae
atgcatttaacagaacttaaaaatacgcctgtttctgatcttgtgaaactcggcgaggagcaaatgggcttagaaaatttagctcgtttgcgtaaacaagatattgtctttgcaatcttaaaacagcacgccaaaagtggcgaagatattttcggcggtggtgtgttagaaattttaccagatggttttggtttccttcgttctgccgacagttcctatcttgcaggccctgatgatatttatgtttccccaagtcaaattcgtcgttttaatcttcaaactggggataaaatcgaaggtaaaattcgtccaccaaaagaaggcgaacgctattttgcacttttaaaagttgatcaagttaatgatgacaaacctgaagtttcccgtagcaaaatcttatttgaaaacttaacaccattgcacgctaattcgcgtttaagaatggaacgtggcaatggctcaacagaagatttgactgcccgtattttggatttagcatccccaattggtaaaggccaacgtggtttgattgttgctccgccaaaagcaggtaaaaccatgttgctgcaaaatattgcgcaaagtatcacacataattatcctgatgtagagcttatcgtgttattgattgatgaacgcccagaagaagtgacagaaatgcaacgttccgtaaaaggcgaagtcattgcgtctacttttgatgaacccgcaactcgtcacgttcaagtggctgaaatggtaatcgaaaaagcgaaacgttctgtagaacataaaaaagatgtggtcattttgcttgattctattactcgtttagcgcgcgcttacaatacagtcactccagcttcaggtaaaattttgtctggtggtgtggatgctaatgcgttgcatcgtccaaaacgtttctttggtgctgcgcgtaacgtggaagaaggcggcagtttaacgattattgcaacagcactagttgatacgggttcgaaaatggatgaagttattttcgaagaatttaaaggtacgggtaatatggaattacacctttctcgtaaaattgcagaaagacgcgtattcccagccattgactttaaacgctctggtactcgtaaagaagacttactcacaacagcggacgaattacaaaaaatgtggattcttcgtaagattcttaatccaatggatgaagtggatgcaatggaattcttgattgataagctgatgatggcgaaaaccaacgaagagttttttgaagtgatgaaacgttcgtaa

SEQ ID NO: 21946 - DNA, 900 bp, Haemophilus influenzae
atgaacgacgaacagcaaaattcaaaccaatctgaaaatacaaaaaaaccttttttccaatctttatttggtcgcttttttcaaggcgaattaaaaaatcgtgaagaacttgtggaagtgattcgcgattcagaacaaaatgatttaattgatcaaaatacgcgcgaaatgattgaaggcgtgatggaaattgcggaacttcgtgttcgcgatattatgattcctcgttcacaaattatttttattgaagatcaacaagatttaaatacttgtttaaacacaattattgaatccgctcattctcgttttcctgtgattgccgatgcggatgatcgcgataatatagtgggcattttgcacgcaaaagatttattaaaatttttacgtgaagatgcggaagtctttgatttatcttcattattgcgccccgtcgtgattgtgccagaaagcaaaagagtggatcgtatgttgaaagatttccgctcagagcgttttcatatggccattgtggtggatgaatttggtgcggtatcaggtcttgttaccattgaagatattttggaacaaattgttggcgatattgaagatgaatttgatgaagaagagattgcggatattcgtcagctttctcgtcatacttatgctgtgcgtgcgctcacagatattgatgatttcaatgcgcaatttaatacggattttgatgatgaagaagtggataccattggaggtctgattatgcagacttttggttatttaccaaaacgtggggaagaaattattttgaaaaatcttcaatttaaagtaacttctgcagatagtcgtcgattaattcaacttcgagtcacagtgccagatgaacatttggcagaaatgaataatgtagatgaaaaatctgaatag

SEQ ID NO: 21947 - DNA, 1569 bp, Haemophilus influenzae
atgaaaaatctgaataggattttattatcaattaaatttatgaataaatattttacttatcttattgcgattatatcaggtttactcggcgtttttgccttttcgccatttgattattggcctttagcctatgtttctttactcggtttactttatgtcgctaaaaatcctaaaaaatccaccgcacttttatccactttcttgtgggcgatgggatttttctgctttggagtaagttggcttaatgtcagcatccatcaatttggtggtgcatcgttaggggtaagttatttccttgtcggtttacttgcggcttatcttgcactatacccgatgctatttacctatttagttcatcatttcaaagtgcaaagtgcggtaatttttgccgtgatttggacattgacagaatttttacgaggttggatttttaccggttttccttggcttcaatttggttatacgcaaattgacagcccattttatggcattgcccccatttttggcgtaacaggattaacgttctttactgtttgggcaagtgcggtcatttttaatctcgtttcctctttgtttaaaacgaaaaaccttaaattagttttagcgaatgctttgttattgatcatcgtggggggattaagtgcttattcatcccgaattcactttgtaaaatctgttgaagataaggcaatttcagtcacgcttgcacaaggtaatattgaacaaaatcttaaatgggatcctaattatttctattctactttggcgatttatcaaaaattaatcacagaaaatcttggtaaaaccgatttaattattttgcctgaatcagccttgccaacgcttgaaaatgcgattacgccattttttgagggattagagcgtgcagctaaagaaacgaaaacggaaattatggttggaactgtattccaagatacaaaatctggtaagttattaaattcaattatgactgctggaaacccagattttccttatcaaccaaatacgcaaaatcgttataataaacatcatcttgtgcctttcggggaatatgttccgctagaaagtattttgcgaccacttaattcagtgtttaatttaccaatgtcagcatttcaaagtggggaggcagttcaaccctctttaatcgcaaaaaaacgtgctttttcgccagcaatttgttatgaaattattttcggtgagcaagtgcgacaaaatttgaaacaagatacggattatttgctcacgttatctaatgatgcgtggtttggcgattctatcgggccttggcaacatttacagatggcaagaatgcgtgctttagagttaggcaaaccgcttattcgtgcaacaaatacggggatttcagtttttgttgatgcgcaaggtaaggtattagcacaagccccgcaatttattgaaacaactttgacttataaaattgcacctgcggaaggcaaaaccccttattctgtgttaggaaatatgcctttgtatgctttatctttattgtttttactcttgcacagtatgatggcgtttattcgtcgtaagatgaatatcttataa

SEQ ID NO: 21948 - DNA, 738 bp, Haemophilus influenzae
atgcgcataccaagaatttatcatccaatatcccttgaaaatcaaactcaatgttatctttcagaagacgcggcaaatcacgttgctcgagtgttaagaatgacagaaggcgaacagcttgaactctttgatggttctaatcatatttatccagcaaaaattattgagtcaaataaaaagtccgtaaaagtagagattttggggcgtgagcttgcggataaagaatcccatttaaaaatccatttaggacaagtgatttctcgcggagaacgaatggaatttactattcaaaaatccgtagaattaggggtaaatgtgattacgccattatggtcagaacgctgtggcgtaaaacttgacgcagagcggatggataaaaaaatccaacaatggcaaaaaattgcgattgcagcttgtgagcaatgcggtcgtaatattgtgccagagattcgtccactgatgaaattacaagattggtgtgcagaaaatgatggtgcattgaaattgaatttacatccacgtgcgcactattctattaaaaccttaccgactattcctgctgggggtgttcgcttattaattggctcggaaggtggattatcagcacaagaaattgcccaaactgaacagcaaggatttactgaaattttattaggaaaacgtgttttacgcactgaaactgcatcacttgcagcgataagtgcattgcaaatttgttttggggatttaggcgaatga

SEQ ID NO: 21949 - DNA, 420 bp, Haemophilus influenzae
atgggaattaccgctctggcttttgattttggcactaaaagtatcggttgtgccataggacaaagtattactggcacagcacaagccttgcccgcttttaaggcgcaagatggcatcccaaattgggaagcgatcgaaaaatgtttgaaagaatggaaaccagatgttgtcattgttggtcttcctctaaatatggacggaacagaacaagatctcactctacgtgctcgtaaatttgcaaatcgtttacaaggtcgttttggcgttaatgttcatttacaagatgaacgattaaccaccacgcaagctcgtagtgagatttttgaacgtggtggttttaaagcattaaaaaaaggcaaaatcgatggagtgtcagcttgtttaattttagagagctggtttgaatacgctgaatattag

SEQ ID NO: 21950 - DNA, 894 bp, Haemophilus influenzae
atgaaaaatcttgcgctcattgatttgtttcttaacgaatattggattgaaaaagggctttcagaaaataccgttcaatcttatcgtttggatttaaccgcactttgtgattggttggataaaaacgacttgtctttggaaactttagatgctgttgatttgcaaggttttctaggagagcgtttggagaaaggttacaaagccacgagcactgcgcgaatgttaagtgcaatgcgtaaacttttccaatatttatatcgggaaaaatatcgagtggatgatccaagtgcggtgctaagttcgcctaaattacccagtcgcttgccaaaatatttaaccgagcagcaagtgtcagatttgctcaatacgccaaatgttgaagtgcctttggagttgcgtgataaagcaatgttagagttgctttatgcaacggggcttcgtgtaacggagttagtttcgcttacgattgaaaacatgagcgtgcaacaaggcgtggtgcgagtgattggtaaagggaacaaggaacgtattgtgccaatgggggaagaagctgcctattgggttcgtcaatttatgctttatggtcgccctgtgctattaaatgggcagagttctgatgttgtgtttccaagtcagcgcgcacagcaaatgactcgtcaaactttctggcatcgtgtaaaacattatgccattctcgcggatattgatgctgatgcactttctcctcacgttcttcgccatgcttttgccacccatttagtaaatcacggtgcggatttacgcgtggtgcaaatgttgttgggtcatacagatttatctacaacacagatttatactcacgtggcaaaagaaagattgaaacgattgcatgaaagatttcatcctagaggataa

SEQ ID NO: 21951 - DNA, 1767 bp, Haemophilus influenzae
atgatgcgtacacattattgcggagcattaaaccgtaacaatatcggacaagacgtaacattaagcggttgggttcatcgccgtcgtgatttaggtggcttgatttttattgatatgcgcgatcgtgatggtattgtgcaagtttgttttgatcctaaatatcaagatgcattgacagcggctgctgggttacgtaatgaattctgtattcaaattaaaggcgaggtgatcgctcgtcctgataatcaaattaataaaaatatggcaacaggcgaagtggaagtgttagcgaaagaattacgcatctacaatgcttctgacgttttaccattagacttcaaccaaaataacaccgaagaacaacgtttaaaataccgttatttagatttacgtcgtcctgaaatggcgcagcgtttgaaaacccgtgcaaaaatcaccagctttgtgcgtcgctttatggatgataatggttttcttgatattgaaaccccaatgctaaccaaagcaacgccagaaggcgcgcgcgactatttagtgccaagccgtgtgcataaaggcaaattctatgcattgccgcaatcaccacagcttttcaaacagcttttaatgatgtctggttttgaccgctattatcaaatcgtaaaatgtttccgtgatgaagatttacgagcagatcgtcagcctgagtttactcaaatcgatgtggaaacttctttcctaactgcgccagaagtccgcgaaattatggaacgcatggtgcacggcttatggcttgataccattggtgtggacttaggtaaattcccagtgatgacttggcaagaagcaatgcgtcgttttggttctgataagccagatttgcgtaatccattagaaatggtagatgtagcagatattgtcaaagatgttgaatttaaagtatttaatgagccagcaaacaatccaaatggccgtgttgcagtcattcgagtaccaaatggtgcagaaattactcgtaaacaaattgatgaatatacacaatttgtaggcatctacggtgcgaaaggtttggcttgggcaaaagtaaacgatattaatgctggtcttgaaggcgtgcaaagtccgattgcgaaattcttaaatgaagatgtatggaaagggttagcagaacgtgtgaatgcacaaactggcgatattttattctttggtgcagacaaatggcaaactaccactgatgcaatgggtgcgttacgtttgaaattaggtcgtgatcttggcttaactcgtttagacgaatggcaaccgctttgggtcattgatttcccaatgtttgaacgtgatgaagaaggtaatcttgcagcaatgcaccatccattcacttcaccaaaagatttcagcccagagcaattagaggctgatccaacaagtgcggtagccaatgcttacgatatggtcatcaacggctacgaagtgggtggtggttctgtgcgtatttttgatccgaaaatgcaacaaactgtgttccgtattcttggtattgacgaagaacaacaacgagagaaattcggtttcttattagatgcgttaaaatttggtactccaccacatgctggtttagcattcggtttagaccgcttaaccatgcttttaacaggcacggaaaacattcgtgatgtgattgcctttccgaaaaccacggcagcagcgtgcttaatgacggaagccccgagttttgcaaatccgcaagcattggaagagttggcaatttctgtcgttaaagcagaataa

SEQ ID NO: 21952 - DNA, 726 bp, Haemophilus influenzae
atggtaaaagatactctattttctacccccattgctaaattgggggatttcatctttgacgaaaacgttgctgaagtctttccagatatgattcaacgttccgtgccgggctattctaacattattactgcaatcggtatgctggctgaacgtttcgtcacggctgatagtaacgtttatgatctaggttgctcacgaggagctgccacactttctgcacgtcgaaatattaatcaacccaacgtaaaaattattggtatcgataattctcaaccgatggttgaacgttgtcgccaacatattgcggcatatcatagtgagataccagtagaaattctctgtaatgatattcgccacgttgaaattaaaaatgcctcaatggtcattctcaacttcaccttgcaatttttaccgcctgaagatcgcatcgcattgcttaccaaaatctatgaaggtttaaatccaaatggcgtattagtactttctgaaaaattccgttttgaagatactaaaattaatcatttactcattgacttgcaccatcaattcaaacgtgccaatggttatagcgaattagaagtgagccaaaaacgcaccgcacttgaaaatgtgatgcgtacagattctatcgagacacacaaagtgcggttaaaaaacgtaggattttcacaagtagaactttggttccaatgctttaattttggctcgatgattgcggttaaataa

SEQ ID NO: 21953 - DNA, 408 bp, Haemophilus influenzae
atgcaaattttacacactatgttacgcgtgggcgatttagatcgttcaatcaaattttatcaagatgttttaggtatgcgcttattacgcaccagtgaaaacccagaatacaaatatacgctggcttttttaggttacgaagatggcgaaagtgcggcagaaattgaattaacatacaactggggcgtagataaatatgaacatggcacagcatatggacatatcgctatcggcgtggatgatatttatgcgacttgtgaagccgttcgcgcgagcggtggtaacgttactcgcgaagcagggccagttaaaggtggctcaaccgtcattgcttttgttgaagatccagatggttataaaattgaatttatcgaaaacaaaagtactaaatctggtttaggcaactaa

SEQ ID NO: 21954 - DNA, 2232 bp, Haemophilus influenzae
atggttgctgttcgtggttctcatttgttaaatccgcaggattttgtgattgaacaatggtgcactggcttaaaactagcagaacaaacagaaaaaagtttgatcgatgcgtggtattacgcacgtgatttaatgaatgcctaccccgatgaaatgaagaatgcgaccttgatgctgcagtctggcgtggaaatggtagaaattttgcacgaacttaatatggatgcggaaacattgcttactgccatgttgtttcctattgttgcaaataaattaacagactgggaaagtctaaaagaaaaatttggtgcgaaaattactaaattacttaaaggcgtgttggagatggataatattcgccaacttaatgccagtcattccgctaacgctctgcaagtggataatgttcgccgtatgttgttggcgatggtggacgatttccgctgcgtgatcattaaacttgccgaacgtattactttcttgcgtgatgcagagcatcgttgtgcagaggaagacaaagtccttgccgtcaaagaatgttcttatatttatgcccctcttgccaatcgtcttggaattggtcagctgaaatgggagttagaagattactgcttccgttatcttcatcctgaacaatatcgcgctattgctaaattattgcaggaacgtcgtcttgatcgtgaacattacattgctgatttcgtcagtgagttgagcggttatttacgtgaaaatatcgagcaagtggaagtctatggtcgtccgaaacatatttacagcatttggcgtaaaatgcagaaaaagcatcttgaattcagcggtttatatgacgtaagagcggtcagaattatcgtgcaaaaattacaagattgttacaccgcacttgggattgttcatactcaatttaaacacttacccaaagaatttgacgattatgtggcgaacccgaaaccgaacggttatcaatctattcatactgttgttttaggtaaaggtggcaagccaattgaagtgcaaattcgaacccaacaaatgcatgatgatgcagagttaggtatggcggcacactggaaatataaagaaggcaatacaggcagtatgtctgcctatgaagaaaaaattgcgtggttgcgtaaattgttagcttggcaagatgatattacggattcaggcgaagtgctggcagagttgcgtagccaagtgtttgatgatcgtgtatatgtgtttacgccaaagggcgaagtggtggatttgccaacgggatctacaccattagattttgcttatgccattcatagtgaaattggtcatcgctgtatcggggcaaaagtggcggggcgtattgtgccatttacctatcagctacaaatgggcgatcaaattgatattattacccagaaaaatccgaacccgagccgtgactggctaaacccaaatttaggatttactcacaccgcaaaatctcgagccaaaattcaagcgtggtttaaaaaacaagatcgcgataaaaatattccagcgggtaaagaattactcgataatgaactcgcgcttttgaatttaagtattaagcaagtggaaccttatgcgttaccacgctataacttgaaaaatttggacgatctttatgcgggcattggcagtggtgatattcgtttaaataacttaatccatttcttgcaaagtaaattgattaaagtgactgctgaagaggctgatcaagaaattttacgtcatgttgctaacaaaagtgcggtcaattctcagcagaaatctgaaaagaacaatggctgtgtgattgtggagggtgtggacaatcttatgcatcatattgcgcgttgctgccagccgataccaggcgatgcgattgttggctatattacaatgggacgtggtatttctattcaccgagcggattgtgaacaattcttagatttgcaagcggctcatccagaacgcgtagtggaatcaatttggggcgaaaattacgcaagtggtttccatattaatatccgtattgtggcaggcgatcgcaatggcttattgcgtgatattacaacggttctagcaaatgaaaaaattagcgtattaggggtctcaagccgtgctgataccaaaaaacagcttgctactattgatatggaaattgaacttcataatgttgaaagtttgagtaaaatattggctcgattagcaaaattagatgatgttatcgaagcgaagcgtttataa

SEQ ID NO: 21955 - DNA, 357 bp, Haemophilus influenzae
atgtataaaacgacggggctaacccatttaatcaactccactaaatattcattacaaggcttaaaaagtgcgtttaaaaatgaaacggcttttcgccacgaatgttttttagcctgcattttaattcctcttactttctttttaggcgaaacaaaaattgaaattatattgatgatttcttctgttttgcttgtgatggcgttagaacttttaaacagtgcggtagagacagttgttgatcgcattggtacagaacgccacgaactttcaggacgtgcgaaagatcaaggttctgcatcggtatttattgccctttgtattgtcggtatcgtttggggcggaattttattcttctaa

SEQ ID NO: 21956 - DNA, 594 bp, Haemophilus influenzae
atgaccgcacttttaaaaattggtctggtgtctgtttctgatcgcgcatcagcaggcgtgtatcaagatcaaggtatcccagaattacaggcttggttagaacaagcgttagtagatcctttccatttagaaacaagattaatccccgatgaacagccagttattgaacaaaccttaaaagagctggtggatgaacaaggttgccatttagtgctgacaactggtggaactgggccagcaaaacgcgatgtaacgcctgatgcaacccttgcggtagcggatcgagaaatgccaggttttggcgaacaaatgcgtcaagtgagtttgcattttgtgcctaccgcaattttatctcgccaagtgggtgtaattcgtaaggaaagcctgattttaaatcttcctgggcaacctaaagcgattaaagaaaccttagagggcgtaaaagataaagaaggaaatgtgcttgtaaaaggcatttttagcgcagtgccttattgtttgcaactgattaacggcttatatattgataccaagcctgaaatcatcgaaagtttccgtcctaaatctgcaagacgcgaaaatctggagaaatag

SEQ ID NO: 21957 - DNA, 645 bp, Haemophilus influenzae
atgaaaattattcttttaggtgcaccgggtgcaggtaaaggcactcaagcacaatttattatgaacaaatttggtatcccgcaaatttcaactggtgatatgttccgtgctgcaatcaaagcggggactgaacttggcaaacaagctaaagcattaatggatgaaggtaaattagtgccagatgaattaaccgttgcccttgtaaaagatcgtattgctcaagctgactgcacaaatggtttcttgttagatggtttccctcgtactattccacaagcggatgcactgaaagattcaggtgttaaaattgactttgttttagaatttgatgtgccagacgaagtgattgttgaacgtatgagtggccgtcgcgtacaccaagcgtctggtcgttcttaccatatcgtttataatccaccaaaagtggaaggtaaggatgatgtaacaggcgaagatttaattattcgtgcagacgataaaccagaaactgtattagatcgtttagccgtatatcataaacaaactagcccattaattgattattaccaagcagaagcgaaagcggggaatactcaatatttccgtttagacggtacacaaaaagtggaagaagttagccaagagttagataaaatcttaggctaa

SEQ ID NO: 21958 - DNA, 648 bp, Haemophilus influenzae
atgattgaacaactcattcaacaagctcagccttattggcaacaatatattgaacacgaatttgtgcaacagctcgcaaaaggtacgctaccaaaagcttgttttcagcattatttgaagcaggattatctctatctttttcattacagccgagcctttgccttaggtgtattcaaggcaaaaaatttcgctgaaatggaaacacctcgtaaaaccttagagattctttgccaagaaattcaactacatttaaattattgccgtgagtggggaattagtgagcaagagatttttaccacccaagagagtgccgcttgcattgcttatactcgctatttgcttgattgcggcatgacgggcagtttggctgagctttatgcagctgtaaccccttgtgctttgggttacgctcaagttgctcgttacattactcagcattatcctcgcttaccgaacaatccttatcaaacgtggattgacacctatgcgagtgaggaatttcaacaagccgcccaagaaaccgttgattttcttaccgcactttgcaaaccactaaacccaagccagcttgctgagattcaacagattttcaccaccgcaactagaatggaaattgcgttttggcaaatggggttggatttggcttag

SEQ ID NO: 21959 - DNA, 921 bp, Haemophilus influenzae
atggactctttctcgacatcaatttgggttaatgatgtaactgttcgttacaacaatggtcatactgctattcacaatatgacgttctcactcaatagtggaactatttgtgcgttagttggcgtgaatggaagtggcaagtccacattatttaaaagcataatggggcttgtaaagccacaacaaggcgaaattaaactttgtgatttgccaatttcccaagcactgaaacgtaatttggttgcttatgtgccacaatcagaagaagtggactggcaatttccggtgtcagtgtatgatgtcgtgatgatgggacgttatgggtatatgaattttcttcgtatccccaaagcgattgataaacaaaaagttcaagaggcgatgcagcgagtaaatattgagcatcttgcgcatcgtcaaattggcgagttatctggcgggcagaaaaaacgcgtgtttttggcccgcgctttagcacaacaaagtccaattattttattggatgaacctttcactggcgttgatgtgaaaactgaaaatgccattgttgatcttcttcaacagcttcgagaagaaggtcatctgattcttgtttcaacccataacttaggttctgttcctgatttttgtgatcaagtggtcatgattaatcgcacagtcatcgccgcaggaaaaacagaagacacctttaaccaacataatttggaaattgtatttggtggggtgttgcgtcatattaaattattgggcgaaaatttacataatgatgaagataaacgttctgttaccgtcttaacagatgatgaaaaagccgttgtattctatggcgaaactaagcaagatccacctgcgccaacaacacaaaattgtcattttgaagattgcccttataaaagtgcagttaaaaataagagggattag

SEQ ID NO: 21960 - DNA, 912 bp, Haemophilus influenzae
atgaatccaactactgagcaagtgctttcccctggtgagatttttcgtcaaacacgcgaagccttaaatctttctcttgaagatgtcgctaaagaaatcacgctacgcccttctatattagagcaacttgaaaataatgaatttattcaaaaatctacccctgcaatctttgtaaaaggttatgtgcgtagctatgcaaagttcttacgtttgccagattctgtgtgggaaaatattgtttttgctgaaacagaaaaaaatgatttagggaaaaatgcacgttcaacccgtgccgttaatcaatattcctctcacaatcgttggatcgggcgtttaaccgcaatagtattcatgattgtaattggtatgactgggctttggtggtggcagagttatcaacaaaatactcaagaacgcgatgatttagtgcaaagctatgttgcctctaccgaaaacaatcagcccgccaccgctcttgtgacaacagaagaaagtaataaaactgtaccagaaacagcagcaccagtctcacaaccagtagaaataacaaataatctgttaccagaaatagcacaagaaaatagcgtttcacaacccaaaaacgatgaaaaatcagtttcagaaattcaaagtgcggtcgaaaatccaagtatttctccaacattacctatagcaaaaggcgatttagtgattgaaatactaacaaatagcagttggattagtgtaaaagataacgctcgccacgtattagcacaaaaagaatataaacaaggcgaaatattaacctttaatggcaatgaattttcattaattgtaggcgcgccaagcaatgtgcgcatcacttacaaaggcgagaattatcctctgaaagtggatggtcgtgtagcaaaattcaaactttcacaaccttag

SEQ ID NO: 21961 - DNA, 1107 bp, Haemophilus influenzae
atgtcagcttttcagccaactattaagcgtcgtgaatcgacaaaaatttatgtgggaaatgtaccaattggtggggatgcgcctattgccgtgcaatcaatgacaaatactcgcaccactgatgtggaagcgacagttgctcaaattaaatcattagaacgtgttggtgcagatattgttcgtgtatctgttccaacaatggatgctgcggaagcatttaaacaaattaaacaacaagtgaatgttccgctcgtagcagatattcatttcgactatcgtatcgcgttaaaagtcgcagaatatggagtggattgtttacgtatcaatcctggcaacattggtcgtgaagatcgcgtccgtgccgttgttgattgtgcgcgagacaaaaatattccgattcgtattggtgtaaatgcaggctctttagaaaaagatttgcaagaaaaatatggcgaaccaacgccagaagccttgttagaatccgcattgcgtcatgtagaaattctagatcgtcttaacttcgatcagtttaaagtgagcgtaaaagcctccgatgtattcttagcggttgaatcttatcgtttactggctaaagcaattaaacagcctttacatttaggcattacagaagcaggtggcgcacgcgctggtgcagtaaaatctgcagtgggtttaggaatgttattagctgagggcattggcgatacactacgcgtctctttggcggcagatcctgtagaggaaatcaaagtcggttttgatattttgaaatctttacggattcgttcaagaggaattaactttattgcttgcccaacctgttctcgccaagaatttgatgtaatcggtacagtaaatgcgctagaacaacgccttgaagatattattacaccaatggatgtatctattatcggttgtgtagtgaatggtcctggcgaggcactcgtctccgatctcggcgtaacgggcggtaacaaaaaaagcggttattatcttgacggagaacgccaaaaagagcgttttgataacgaagatatagtgaaccaattagaagcaaaaattcgtgcgaaagtcgcacgacaagatccaaaaaacagaattatttaa

SEQ ID NO: 21962 - DNA, 1272 bp, Haemophilus influenzae
gtggcaaaaacaattcaagcaattcgtggtatgaacgattgtgccccaacagaatctccattatggcaatggattgaagcacaagtacgcaatgtattaaatagttatggctattcggaagtgcgtatgccaattgtagaaagtacgccattgtttgcgcgtgcaatcggcgaagtaactgatgttgtctcaaaagaaatgtacacattttgggataacgatgaacaattaaccttacgccctgaaggcacagcaggttgtgtgcgagcagccattgaacacggttggatctataataatgaacaacgcttatggtatatcgggccaatgttccgtcatgaacgtccacaaaaagggcgttaccgtcaattccatcaagtaggtgttgaggtattcggtattgcaaatccagaaatcgatgccgaattaatcatgcttacctatcgtttatggaaagcattaggtatcgatcaacatgttacacttcaacttaactcaattggttctttagaagctcgagcaaattatcgttcagctttagttggattcttagaaaaccatcaagatttaatgagcgatgaagaaaaagagcgtttagtaagaaatccgcttcgtattttggatacaaaaaatccagaattacaaaaagtattagataacgcgcctaaattgcttgattatttagatgatgaaagccgtacgcattttgaacaattatgttcattattagatgcagtgggtattcaatatgaaattaatcctaaactcgttcgtggcttagattattacaacaaaactgtatttgaatgggtaacctctgctcttggcgcacaaggtaccgtgtgtggcggcggtcgttatgacggtttagtggaacaacttggcggacacgcaacgccaagtatcggatttgcgatgggattagagcgtttagtcttgttggtgcaagaagttaatccaaatgttcctgcgaaaagtgcggtggatatttatgttgtttatcaaggcgaaggcgcaacattagccgcttttgaattagcggaaaaagtacgctcggaattaccgcacttaaataccatgttgcactgctctagcggtaattttaaaaaacaatttaaacgtgcagataaatctggtgcaacattggcattagttatcggcgaaagcgaagtacaaaataaacaagtcgttgttaaacacttacaaggtggcacagatcagcaaaccttagatttagtgaatataatcgactatcttcaaactcaattttaa

SEQ ID NO: 21963 - DNA, 381 bp, Haemophilus influenzae
atggcttatagcgaaaaagtaattgatcattatgaaaatccacgtaatgtgggatcattggataaaaaagatagcaatgttggtactggaatggttggtgcgccagcttgtggtgatgttatgcaactacaaatcaaagtagatgataatggcattattgaagatgcaaaattcaaaacttacggctgtggttctgcgattgcatctagttcattaattactgagtgggtaaaaggtaaatctttagaagaagctggagcaattaaaaatagccaaattgctgaagaattagaattaccgccagtgaaagtgcattgctctattttagcagaagatgcaattaaagcagcaattgctgattataaagcaaaacaaggctaa

SEQ ID NO: 21964 - DNA, 453 bp, Haemophilus influenzae
atgaaacttacatcgaaaggtcgttatgcagttacagccgttttagatattgctttaaatgcagatggcgggcctgtaagccttgcggatatttctgaacgccaacatatttccttatcttatttagagcaactttttgctaaattacgtaaagacggtttagtcaaaagtgttcgcgggccaggaggtggttatcagttagggctaccaagtgaacaaatttctgtaggaatgattattgcggcagtaaatgaaaatattcacgtaacgaaatgtctggggcgtgaaaattgtaaaaatggtgtggaatgtttaactcacgaactttgggaagatttaagtttacgtattgaaagttttttaaatgagattacgttagcagagctggtaaataagcgtaatgtaaaacgtcaatctcatcgtgattttaataatttattagttaatcaataa

SEQ ID NO: 21965 - DNA, 738 bp, Haemophilus influenzae
gtggatattttctttgttatttctggatttttgattacgggtattattatcacagaaattcaacagaattctttttcgcttaaacaattttatactcgacgaattaaacgaatttatcctgcttttattacagtaatggcattagtgtctttcattgcgtctgctatttttatttataatgatttcaataaattaaggaaaaccattgaattagctattgcattcctatctaatttctatctaggattaacacaaggttattttgatttaagtgcaaatgaaaaccctgtattacatatttggtcattagccgtagaaggacaatactatcttatttttccactaatcctcattttagcttataaaaaatttagagaagttaaagtattatttattataacgctaattttgttttttattttacttgcgacatcttttgtttcagctaacttttacaaagaagtattgcaccagcctaatatttattatctctctaacctaagatttcctgaattacttgtaggatctttgttggcaatttatcataatctttcaaacaaggttcaattgagtaagcaagtaaataatattctggctattttaagtacattattattattttcctgcttatttttaatgaataataatattgcatttattccaggtattactttaattcttccttgtatttttacagcattaattattcataccacatcacaaaataacatccgttaa

SEQ ID NO: 21966 - DNA, 1092 bp, Haemophilus influenzae
atgggattcaaatgtggtattgtgggattgccaaatgtcggcaaatctactctttttaacgcactcactaaagctggcattgaagccgcaaactatccattctgtactatcgaaccaaatacgggtgtcgtgccaatgccagatccacgtttagacgcattggcagaaatcgttaagcctgaacgcatattacctactacgatggaattcgtggacatcgcaggcttagttgcaggtgctagcaaaggcgaaggcttgggtaataaattcttagcaaatattcgtgaaaccgatgcaattggtcacgtagtgcgttgttttgaaaacgatgacattgtacacgttgcagggaaaattgacccacttgatgatattgacactatcaacactgaattagccttagcagacttagacagttgtgaacgagcaatccaacgtttacaaaaacgtgcaaaaggtggcgataaagaagctaaatttgaactttccgttatggaaaaaatccttcctgtgctggaaaatgcaggaatgattcgttctgttgggttagataaagaagaattgcaagcaatcaagagttacaacttcttaacgttaaaaccaacaatgtatatcgcaaacgtaaatgaagatggctttgaaaataacccatatttagatcgcgttcgtgaaattgctgcaaaagaaggggcggtagttgttccagtatgtgcggcgattgaatctgaaattgcagaacttgatgatgaagaaaaagtcgagtttttacaagatttaggcattgaagaaccaggattgaaccgagtaattcgtgctggttacgcacttttaaatcttcaaacttatttcactgctggcgtaaaagaagtacgagcttggacagtttcagtcggcgcaaccgcaccaaaagcagcagctgtaatccacactgactttgaaaaaggctttatccgagcagaagttatcgcttatgaagactttatccaattcaacggtgaaaacggtgcaaaagaagcaggtaaatggcgtttagaaggcaaagattatatcgtacaagatggcgatgtaatgcatttccgattcaacgtataa

SEQ ID NO: 21967 - DNA, 1320 bp, Haemophilus influenzae
atgtcagacaatatttattccgtctctcaactgaattctgccgcgcgtcagatgcttgagggtaatttttgccaaatttggctaacgggggaaatttccaattttacccaacctgtgtctggacattggtatttaacgctgaaagatgaaaatgcacaggtgcgttgtgcaatgtttcgtatgaaaaatttgcgtgtagcttttcgtccacaaaatggaatgcaagtgcttgtgcgtgccaatgtgagtttatatgagcctcgcggcgattatcagcttattattgattctatgcacccagcaggcgagggattattgcaacagcaatttgaagcgttaaaaatgaagttggctgcggaaggattgtttgctcaaaatcttaagaaaactctaccgcactttagtaaagcagtggggattataacttcttctacaggtgcggcattgcaagatattttgcatattctggcacgccgtgatccaagtttaaaagtcgtcatttatcccactgcggttcaaggcaaagaggcaactgcagaaattgtgcaaatgattgaacttgctaatgcgcgacaagaagtagatgtattaattgtggggcgtggtggtggttcattagaagatctttggtgttttaatgaagaagaagtggcgcgagcgatttttcgttcaaccttacctattatcagtgcggtgggacacgaaacagatgtgacgattgccgatttcgttgcagatcttcgtgcgccaaccccctctgctgcggctgagttagttagtcgtaatcaagatgaattattgcaacaacttcgccatcaacagcaacgtttagatatggcatttgatcgtttatttacgcgaaaaagccagcgtttgaaacagcttgccttacgattgcaaaatcaacatccacagaatcagctacgtgctcaacaagcgaaaaatgaacagcttacacatcgcttgcaacttgcaatattgcgtcagtttgaaaatacacaacaaaaattcaccgcactttctgttcgtttaaaacaaaatccattgccatatcgcatacaacgttatcaacaaggcttagagcagttaaaagtgcggttaaatttttgcgtaaatcgccaagtgacggaacgtcaaaataaactggcaacattatgcggaaaactggatggcttaagcccattaaaagtcttggcgagaggttattccattgcggaaaatccgcaaggtaaagccattgttagcgtgaaagatgtcaatcaaggggacttcattacaactcaagtggctgatggaaaaattgtgagtaaggttttgtaa

SEQ ID NO: 21968 - DNA, 825 bp, Haemophilus influenzae
atgaaaaatacgtttgtttatcaggcggaaaagcctgttataaagttattacaaattaccgatccccatttatttaaagatgaaagtgcggaattattgggggtaaatacacaagcaagttttgctcaagtattaaaggaaattcagcaagaaaataacgaatttgatgtaattcttgctacaggcgaccttgtgcaggatagtagcgatgaaggttacattcgttttgtagaaatgatgaaacctttcaataaacctgtgttttggattccaggaaatcacgactttcagcctaaaatggcagaatttttaaatcagccacccatgaacgcagcaaaacatcttctattgggcgagcattggcaagccttattgttggatagccaagtttacggtgtaccacatgggcaactaagccagcatcaactcgatttattaaaagaaaccttaggaaaaaatcctgaacgctataccttggttgtattacaccatcatttattaccaactaattccgcgtggcttgatcaacataaccttcgtaattctcacgaattggcagaagtgcttgcgccttttaccaatgtgaaagctattttatatgggcatattcatcaagaagtaaacagtgaatggaatggttatcaagtgatggcaacgccagcgacttgtattcaatttaaacctgattgccagtatttttctcttgataccttacagcctggttggcgtgaaattgagctacattcagacggttcaattcgtacggaagtaaagcgtattcagcaagcggaatttttcccgaatatgcaagaagaagggtattaa

SEQ ID NO: 21969 - DNA, 288 bp, Haemophilus influenzae
atgaccgtaaaatgcaaagcagaagaatccttaacttgtagctgtgttgatgtaggcactattattgatggctctgactgtagcgtagaagtacatcaattttatagcactgaagctgatgccaatgcagtgcttgaacgattaacaaagaaagcgcgcaatacagaaagcgatccttgcgaaattaaaagcgaaatcgtggcagttgaaaacggcgttcaattaaatgcttctttcacttttagttgccaagcagaagcgatgatttttgaactggcgaatcgttaa

SEQ ID NO: 21970 - DNA, 1380 bp, Haemophilus influenzae
atgaaaaaatttaatcaatctctattagcaacagcaatgttgttggctgcaggtggtgcaaatgcggcggctttccaattggcggaagtttctacttctgggcttggtcgtgcctatgcaggtgaagcggcgattgcagataatgcttctgtcgtggcaactaacccagctttgatgagtttatttaaaacggcacagttttccacgggtggcgtttatgttgattctagaattaatatgaatggtgatgtaacttctcatgctacaataataacatcaagtagtggaattaaagcaatagagggcggctcagcttcagcgcgtaatgttgttcctggtgcttttgtgccaaatctttatttcgttgcaccagtgaatgataaattcgcgctgggtgcaggaatgaatgtcaatttcggtctaaaaagtgaatatgacgatagttatgatgctggtatatttggtggaaaaactgacttgagtgctatcaacttaaatttaagtggtgcttatcgagtaacagaaggcttgagcctaggtttaggggtaaatgcagtttatgctaaagcccaagttgaacggaatgctggtattattgcggatagtgttaaggataaccaagtaaaaactgcactcacagtacagcaagaaccactcaaatttcttgataagtatttgccctctaaagacacatctgttgtgtcattacaagatagagcagcttggggctttggctggaatgcaggtgtaatgtatcaatttaatgaagctaacagaattggtttagcctatcattctaaagtggacattgattttactgaccgcactgccactagtgtagaagcaaatgttatcaaggcaggtaaaaaaggtgatttaacccttacattgccagattacttagaactttctggtttccatcaattaactgacaaacttgctgtgcattatagttataaatatacccattggagtcgtttaacaaaattaaacgctagcttcgaagatggtaaaaaagcttttgataaagaattacaatacagtaataactctcgtgttgcattaggggcaagttataatcttgatgaaaaattgaccttacgtgcgggtattgcttacgatcaggctgcatctcgtcatcagcgtagtgctgcaattccagataccgatcgcacttggtatagtttaggggcaacctataaattcacgccgaatttatctgttgatcttggctatgcttacttaaaaggcaaaaaagttcactttaaagaagtaaaaacaataggtgacgaacgttcacttacattgaatacaactgcaaattatacttctcaagcacatgcaaatctttacggtttaaacttaaattatagtttctaa

SEQ ID NO: 21971 - DNA, 573 bp, Haemophilus influenzae
gtgtgcttttctttttataaaacaaggcgaaaaatgaccgcactttattacacttattacccctcgccagtcggacggcttttgattttatctgacggcgagagcattacacatattgattttgaaaaagagcaatatgcgcctaatccaaaatggcacaagcaagatgaattgcctgtttttcaaaaagtgcggttagcttttgaacgatattttaatggcgaagttgagtgtttttcaaacattcccttaaaaccagaaggcaccgcatttcaacaagccatttggcaagccttgcgagaaattgattatggcgagctttcaacttatggagagctggcgttacggattaataatcctaaagctgttcgtgccgtgggaggcgcggtagggagtaatccgattagtattattattccttgtcaccgcattttaggcaaagatcgtactttaactggttttggtggtggcttagaggcaaaacgttttttattgcagttagagaaaattccctatattgataaaggcactgaaaacacgaagcctcgcttttttaagaaatatcacgaatga

SEQ ID NO: 21972 - DNA, 672 bp, Haemophilus influenzae
atgattccacaaacccttgaacaattactttcccaagcgcaatcaatcgctggcttaacttttggggagttagctgatgaactgcatattcctgtcccgattgatttaaaacgtgataaaggctgggtggggatgttattagagcgcgctttaggcgcaacggcagggagtaaagctgaacaggatttttctcatttaggtgttgaacttaaaacattgccgattaatgcggagggttatcctcttgaaaccacctttgtgagccttgccccgttggtacaaaattcaggggttaaatgggaaaattcccacgttcgtcataaactttcttgtgtactttggatgcccattgaaggcagccgccatattccattacgtgaacgccatatcggcgcgccaattttctggaagccaaccgctgagcaagaacgtcaattaaaacaagattgggaagaattgatggatttaattgtacttggcaaattagatcaaattaccgctcgaattggtgaagttatgcaacttcgcccaaagggtgcaaatagtcgcgctgtgacaaaaggcataggaaaaaatggcgaaattatagataccttgcctttaggtttttatctaagaaaagaattcaccgctcaaattctgaacgcatttttagaaacaaagtcgctttaa

SEQ ID NO: 21973 - DNA, 1293 bp, Haemophilus influenzae
atggatttactttcagacattgaaaaacaactccaaaaagccaccgctcaagcatttcttattgccttgagtggtggtttagattccactgtacttctttctttatttgcaaaactttgtcaaaaacaaccgcacttaccgcctttatcaatacgagcaatccatattcatcacggattaagccccaatgccgacagttgggctaaacattgtcaagacttatgcgatcaatttcaaattccattgattattgagcgagtacaagtagataaaactaatggtattgaggctggcgcacgtgaagcacgctatcaagccatcaaaaaatatcttcaaacacaagaaatgctggtcacagcgcatcatctaaacgatcaaactgaaacctttttcttagccctaaaacgtggcagtgggctaaaaggcttaggcgcaatgcaacaacaaagtgtattattcggcatgccaattttacgccctttgttaggctttactcgcacccagttagaaaattacgcgcaaaaagaaaaactcaactggattacagacgaaagtaatgaagataatcgatacgatcgtaatttcttacgcaatgaaattttgccagaattacgtgaacgctgggctcattttgatttagccgtgcaacgttcagcacaacattgttttgagcaacaacagctaattaatgatttattgagcgaaatttttacagaacattgtcaaattaaaaaccaatttaaactgtgccagttccgccaatattctctcgcaaaacagaccgcacttttgcgtatgtggcttgccgaaaaccagcttgaaatgccaagtaaacgccagcttacacagcttattaatgatgtcatttttgcaaaagaagaggcaaatcctcaatttcagcttgtaaataaagttattcgacgttatcaagatagtttatatttaactaagccgttttctgatctaaccaaatgcaccctaaaattagaacaaaatacgctaaatttacccgatgatttaggcaatctcacagttcaagaaaatgaacataatctgattttctactggcaggattactctgttacgctggaaaaaacgaacttgcctatttctattcgttttggctattcgggcaaagtgaaacattatccgaaacgcccaagagaagatataaaaaaaatctggcaagaattaggcgtgccaccttgggaacgaaatcgaatccccttaattttttatggcaacgagctaaaaagtgcggtcggtttttttcgtgttttaaaatcaagttaa

SEQ ID NO: 21974 - DNA, 948 bp, Haemophilus influenzae
atgaaccaagaatatttagattttgaattgccgattgctgaattagaagcaaaaattgaagcattacgagcagcatcagatgataaagttgatttaactgatgaaatcaaacgcttacaaaagaaaagtaacgaactcactaaaaaaacctttgccaacctcgatgcttggcaagtttcacgtatggcgcgtcatccaaaccgcccctatacattagattatatcgaacatatttttacggaatttgaagaacttgcaggggatcgcgcttttgctgatgataaagcgattgttggtggcttggcgcgtttagatggtcgtccagtgatggttatcggtcatcaaaaaggtcgttctgtaaaagaaaaagtacaacgcaattttggtatgccagcacctgaaggctatcgtaaagcgttacgtttaatggaaatggctgaacgttttaaattgccaattatcacatttattgacacaccaggagcttatcctggtatcggcgcagaagaacgtggtcaagcggaagctatcgctcgcaacttacgcgaaatggcacagcttaccgttcctgttatttgtaccgttatcggcgaaggcggttcgggcggtgcgttagctattggcgtgggcgataaagttaatatgttgcagtattccacttattcagtgatctcgcctgaaggctgcgcttctattctttggaaaagtgcggaaaaggcatcaacagcagcagaagtaatgggattaaccgcaagccgtttaaaagaattaaatctcatcgacagcattgtgcaagaacctttaggtggtgcacatcgtagttatctagaaatagctgaaaacttaaaacttcgtttaaaagaagatttagctgaactcgatgaactaagcaaagaagaattattaaatagacgctatgaacgtttaatgtcttacggttattgctaa

SEQ ID NO: 21975 - DNA, 1428 bp, Haemophilus influenzae
atgccagtgcaacacgtaaaattagctcgagatagacgaaaaaaacgcgcatatataaaagtaggcgtgttttttgttgctattttgcttattttgacaggcattttactgacaataaaaagcaaacctgaagaaaactccatattttccacctttgacagtggggaatatcacgagttaaatacatcgccaaatgaaaattccaccgcacttcaacctgatgaaaacgccacctcttatgatgatgagctacaagcaaaagatgacgaagttgatgaagtaaaactatcttcagatgatctcgatactttacctcaacacgcacaagacgcactcaatggtttattagacgcagccgatcaagccataagaattactgatcaatttagctatacggtaaccgaaggggatacgttaaaagatgttttagttttgtcaggtttagatgattcatcagtacaaccattgattgcgcttgatcccgaattagcccacttaaaagcaggtcagcaattttactggattttagataaaaatgataacttggaatatttaaattggctggtttctgaaaaagaagaacgtatttatgaacgtctcgaagatgggaaatttaaacgccaagttattgaaaagaaaagtatttggcgaaaagaagtattaaaaggcgagattcaaaattctttaaatagtagtttaagagaaaaaggtcttgatacgcgtcaaattagccaacttagtaacgccttacaatggcaagtgagtttgagaaaactaaaaaaaggaactcaatttgccattttagtttctcgtgaatatttaggcgataaacttactggtcaaggtaatgttgaggcgttacgtatttcatctggtggtaagaattattatgctgtgcaagctgcaaatggtcgttattataatcagcaaggagaaaccttaggcaaaggttttgctcgttatccattgcaacgccaagcacgcgtatcctccccttttaatccaaatcgtcgtcatccagtaacaggacgtattcgtccgcataaaggtgtggatttctccgtttctcaaggcacaccagttattgcaccagcagatggcacagttgaaaaagtcgcttatcaggctggcggtgcaggacgttatgttatgttacgtcacgggcgtgaatatcaaactgtttatatgcatttgagcaaatccctagtaaaagcagggcaaacagttaaaaaaggcgaacgtattgcactttctggtaacacggggatttctacggggccgcatttacattatgaatttcatattaacggtcgagcagtgaatcctcttactgttaaattacccggtactagcagtggtatgacttcagctgaacggaaacaattccttgttcgtgttcgtgaagcagaaagaatgttaaaaccttag

SEQ ID NO: 21976 - DNA, 798 bp, Haemophilus influenzae
atgcttatgcaatcaatttatctctccaaaatccgtgagcagaatccgctcattcataacattaccaatattgtagcagcgaattttagtgccaatggcttgttggcattaggagcctcgcctttgatgtcggcgaatgttgaagaaatgcaggaagtaccgaaaatcagtcaagcattggtcattaatattggtacgctgattggtaaagatcgggaggcgatgttgcaggcaggaaaaacagcaaatgaggttggaattcctgtagtgttagatcctgttggtgtgggggcgaccagttatcgccgtgagaccattcgtgagcttttagccgaggtaaaattcgcacttattcgtggtaatgcaggtgaactggctgccattgcaggcgagacgtggcaggcaaaaggtgtagatgcagggcaaggcgaagtggatttaaaagccgttgccgagaaagtggctcaacgctatggctgtacggtgttgattagcggggcggtggatattgtcagcgatggcacacaaactgcgaccgttcacaacggcacgtcattgttcccgaaagttacggcttcgggctgtttattgagtgctgtgtgtgcggcatttttagcagtaagtgaagggaattatttttctgcgacattagaagcctgtgtagcatacaccattgcaggcgagtgtgcggcgcaaggcttaaccacacaagtgggacagttccaaatccgtttgttggacgagcttgctgccctttcccctgaaaccattggacaaagagggcgcatcaatgagtaa

SEQ ID NO: 21977 - DNA, 681 bp, Haemophilus influenzae
atgaaaaatattcaaaaaatcttaccgctttactttgtggcaggcacgcaagattgccgtcatttgggcgagaacttgtcggaaaatttattattcgtgcttaaacaagcgttagaaggcggaattacctgctttcaatttcgggataaaggcaaattttcgttagaacatacgccctcagcacagaaggcactggcgattaattgtcgtgatttgtgccgtgaatatggcgtaccgtttattgtagacgacaacgttgatttggcgttggaaatcgaggcggatggcattcacgttgggcaaagcgatatgcctgtgcaagagattcgcgctaaaacagataaaccgctaattattggttggtcggtgaatcgtttagacgaggcaaaaattggggaaaatttagcagaaattgattattttggaattggtccgattttcccaacgcaatcaaaagaaaatcccaaaccaacactaggaatggcatttattcaaactttgcgaaatgcgggcataactaaaccgcttgtggcaattggtggggtgaaattagctcacgttaaaaccttacgagaatttggggcggatggtgtggcagtgattactgcaattacgcacgccgataatgtgcaagccgcaacaaaagcattacgggaggcaagtgatgaatacgcaaaatag

SEQ ID NO: 21978 - DNA, 1383 bp, Haemophilus influenzae
atgacaacccaattcaaaccagaattactttcccctgcaggctctcttaaaaatatgcgctatgcgtttgcttatggtgcagatgcggtttatgcaggccaacctcgttatagcttacgtgtacgcaataatgaatttaatcacgccaatttgaaaatcgggatcgatgaagcccattcccttggcaaaaaattctatgtagtggtaaacatagcgccccataattccaaactcaaaacttttattaaagatttacaacctgtcatcgatatgaaaccagatgctttaattatgtctgatccaggcttaattatgttggtgcgtgaaaatttccctaatattgatattcacctttctgtacaagccaatgcggtaaactgggcaacggtaaaattctggaaacaaatgggattaactcgtgtgattttatcgcgcgaactttcaatagatgaaattgctgaaattcgccaacaagtgccagatattgaactcgaaattttcgtacatggtgcattatgtatggcgtattctggccgttgcttactttctggctatatcaacaaacgcgatccaaatcaaggcacttgcaccaatgcttgccgttgggaatacaaaatggaagaaggcaccacggatgacgtgggcaacatcgtgccgaaaatcgatcctgctcaacaaattgaagtgaaaaatgtagcaccaaccttaggcgagggtgcggtaacggataaagtcttcctttataccgaatcacaaaagcctgacgaacaaatgacagcgtttgaagataaacacggcacctactttatgaattcaaaagatctgcgtgccgtacaacatgtagaaaaattgaccgcacttggtgtgcattctttaaaaatcgaaggtcgtactaaatcattttattattgtgcaagaacggctcaagtttaccgcaaagcaattgatgatgcagccgcaggcaaaccatttgatgaaagtttaatggatacgttagaatcccttgcacaccgtggttataccgagggtttcttacgccgtcatacgcatgatgaataccaaaactacgaatatggctattctatttctgatcgtcagcaatttgtcggtgaatttacgggcaaacgtaacgaacaaggtatggcagaagtagcagtaaaaaacaaattcttacttggcgacaatgtagaaatgatgacaccacaaggcaatattaatttcaaaattgaaaaaatgctaaatcgtaaaaatgaaacggttgatgccgcactaggtgatgggcattttgtattcttaaatgtgccacaagatattaacttaaattacgccttattaatgcgtaatttagttaataccaatacaagaaatccacattctaattaa

SEQ ID NO: 21979 - DNA, 1833 bp, Haemophilus influenzae
atgtgtggtattgtcggcgcagtagcacaacgagatgtagcggaaatcttaattaatggtttacatcgtttagaatatcgtggttatgattcagctggtgttgcagtaatcaataaacaaaatgaattacaacgtattcgttgtttaggcaaagttaaagctttagatgaagccgtatcagaaaaaccattaattggtggaacgggaattgcacatacccgctgggcaactcacggcgaaccatcagaaactaatgcgcatccgcattcatcaggtacttttgctgtagtacataacggtattattgaaaatcacgaagaacttcgcgaattattaaaatctcgtggttatgtctttttatcacaaaccgatactgaagtgatcgcgcatttagttgaatgggaaatgcgtacgacggattcacttttagacgctgtgaaaaaagcagtaaaacaactcactggtgcatacggtatggtggtaatggacagccgtcatcctgaacatttagtggcagctcgttctggtagtccacttgtgattggcttaggtatcggtgaaaatttcttagcttcagatcaacttgcgcttttaagtgttacccgccgttttatctttttagaagaaggagatattgcagaaattacacgtcgtacagttgatatttatgatactcacggtaataaggctaaacgtgaaattcacgagtctaatcttgaaaatgacgcggcagagaaaggcaaattccgtcattttatgcagaaagaaatttacgaacagccaaccgcacttattaatacaatggaagggcgtatcaatcacgaaaatgtgattgttgattcaatcggtaatggtgcaaaaggcattttagaaaaagttgagcatattcaaattgttgcttgtggtacatcttataatgcaggtatggtggcgcgttattggtttgaatctttagctggagtgagctgtgatgttgaaattgcatcagaatttcgttatcgcaaatttgttacccgtccaaatagcttattgattaccctttctcaatctggcgaaacagccgatactttagctgcacttcgtttagcgaaagaaaagggctatatggcggcattaacaatttgtaatgttgctggctcttcgctcgtacgcgaatcagatcttgcatttatgacgcgtgccggtgttgaagttggggtagcatcaacaaaagcatttacgacacagctcgctgcgttattaatgttggtgacggcacttggtaaagttaaaggtcatatttctgtagaaaaagaacgtgaaattattaaagcaatgcaatctttacctgctgaaattgaaaaagcgttagcttttgatacagaaattgaagctttagcagaggattttgctgaaaaacatcatgcacttttcttaggtcgtggtgcgttttatccaattgccgtagaggcctctttgaaattgaaagagatttcttatattcacgctgaggcctatgcggcgggagaattgaaacacgggccattagcgttaattgatgctgatatgccagtgattgtcgttgcaccaaataatgaattattagaaaaagtaaaatcgaacattgaggaagtgcgagctcgtggcggtcaattatacgtatttgccgataaagaagcaggatttacgccaagtgaaggaatgaaaatcatcacgatgccaaaagtcaatgatattgttgcaccgattttttataccattccaatgcaattactttcttattatgtggctttaattaaaggtactgatgtagatcaacctcgtaacttagcaaaatcagttaccgttgaataa

SEQ ID NO: 21980 - DNA, 411 bp, Haemophilus influenzae
gtgagatttgtcacaatttttagaaatcctgcttttaattcatctcaagttagattatcctttgcacagtttttgcgacaaattcgcaaagatacttttaaagaatcaaactttttatttaacagaaggtacaaatttatgaacaaaacagatttaattgatgcaattgcaaacgctgcagagttaaacaaaaaacaagctaaagcagcgttagaagcgactttagatgcaattactgcaagcctaaaagaaggtgagcctgtacaattaatcggtttcggtacatttaaagtaaatgaacgtgctgctcgtactggtcgtaacccacaaactggtgctgaaatccaaatcgcagcatctaaagtgccagcatttgtatctggtaaagcattaaaagatgcaatcaaataa

SEQ ID NO: 21981 - DNA, 2595 bp, Haemophilus influenzae
atgcggatcgcaaaattaatattaaacaccctattaactttatgtattttaggtttagtagcaggcggaatgttgtatttccacttaaaatctgaattgccctcagtagaaacattaaaaaccgttgaattacagcaaccaatgcagatttatacggctgacggtaaattaattggcgaagtgggtgagcaacgccgtattccagtgaaattagccgatgtgccacaacgcttaattgacgcatttttagcgacggaagacagtcgtttttacgatcatcacggattagaccctatcggcattgcccgtgcattgtttgtcgcagtgagtaatggcggtgcatcacaaggcgcaagtacgattactcaacaattagcgcgtaactttttcttaacctcagaaaaaaccattattcgtaaagctcgtgaagccgtgcttgcggtagaaatcgaaaatactctcaacaaacaagaaatattagagctttatttaaacaaaatctttttaggctatcgttcttatggtgttgcagcggcagcacaaacctatttcggtaaatcattgaatgaattgaccttatcggaaatggcgattattgctggtttacctaaagcaccttcaacaatgaacccgctttattctttaaaacgttcagaagaacgccgcaatgtggtgctaagccgtatgttagatgaaaaatacatcagcaaagaagaatatgatgctgcattgaaagagccgattgtggcgagctatcacggcgcaaaatttgaatttcgagccgattatgtcactgaaatggtgcgtcaagaaatggtgcgtcgttttggcgaagaaaatgcttacaccagtggttataaagtatttaccactgtactttcaaaagaccaagctgaagcccaaaaagctgtgcgtaataacttgattgattacgatatgcgtcacggttatcgcggtggcgcgccattatggcaaaaaaatgaagccgcttgggacaatgatcgcattgtcggttttctacgcaaactacctgattcagagccatttattcctgcggcagtgattggaattgtaaaaggcggtgctgatatattgctcgcttctggggaaaaaatgaccttatcaaccaatgcaatgcgttggacaggcagaagcaatcctgtgaaagtcggcgagcaaatttggattcatcagcgtgctaatggggaatggcaattaggacaaattcccgcagcaaattcagcattagtttctcttaattcagataatggtgcgattgaagcagtggtcggtggctttagctatgaacaaagtaaattcaatcgagccacacagtctttagttcaagtgggttcttctatcaaaccatttatttacgcggcagcattagaaaaaggcttaacactttcaagcgtattacaagacagcccgatttctattcaaaaaccgggacaaaaaatgtggcaaccgaaaaactcgcctgatcgttatgatggcccgatgcgtttacgcgtaggattaggtcaatccaaaaatataattgctattcgtgctatccaaacggcaggtattgatttcacagcagaatttttacaacgttttggttttaaacgtgatcaatattttgccagtgaagccttagcacttggcgcagcctctttcacaccattagaaatggcgcgagcttatgcggtgtttgataatggtggcttcctcattgaaccttatatcattgaaaaaattcaagataacacgggtaaagacttatttattgcaaaccctaaaattgcttgcattgaatgtaatgatatacctgtaatttatggcgaaaccaaagacaaaatcaacggctttgccaatattcctttaggcgagaatgccttaaaaccaacagatgacagcaccaatggcgaagaattagatcaacaacctgaaactgtgcctgaactgccagaattacaatcaaatatgaccgcacttaaagaagatgcgattgatttaatggctgctgcaaaaaatgcttcgtcgaaaatagaatatgcgccacgtgtcattagtggcgaacttgcttttctcattcgtagtgccttaaatacggcaatttatggcgaacaaggtttagactggaaaggcaccagctggcgtattgcacaaagcattaaacgtagcgatataggcggtaaaacaggtactaccaacagttcaaaagtggcttggtatgcgggatttggtgcaaacttagtaaccacaacttatgtcgggtttgatgataacaaacgagtacttgggcgtggagaagcaggagcaaaaacagcaatgcctgcttggatcacttatatgaaaacggctttgagtgataagccagaacgtaaattgtcgctaccgccaaaaattgtggaaaaaaacattgatactttgacaggtttgctttctccaaacggtgggcgcaaagaatattttattgcgggaacagaaccgacacgtacctatctttcggaaatgcaagagcgtggttattatgttcctactgagttacagcaacgcttaaataatgaaggcaatacgccagcgacgcaaccacaagaactcttctaa

SEQ ID NO: 21982 - DNA, 846 bp, Haemophilus influenzae
atgctgagttatcatcactcatttcacgctggcaatcatgccgatgtcttgaaacatattgttttaatgctcattttggaaaatcttaaactcaaagaaaaaggctttttttatttggatacgcactctggtgtggggcgttatcgtttatcctcaaatgaatcagaaaaaacgggggaatataaagaaggtattggacgcctgtgggatcaaacagatttacccgaagatattgctcgttatgtaaaaatgatcaaaaaactcaattatggtggcaaagaactacgttattacgcgggttctccattaattgccgcggaattgttgcgctcacaagatcgcgcactattgaccgagcttcatcctagcgattatccaattcttcgcaataattttagcgacgacaaaaatgtcaccgtaaaatgtgacaatggctttcaacaagtcaaagcaacgcttccgccaaaagaacgccgaggcttagtactcatcgatccgccttatgaattaaaagatgattatgatctcgttgttaaagccattgaagagggctataaacgttttgccactggcacttatgcgatttggtatcctgttgtattacgccaacaaactaaacgtatttttaagggtttagaagcaacgggaattagaaaaattctaaaaattgaactcgccgttcgcccagatagcgatcaacgaggaatgactgcgagcggtatggtggtaattaatccaccttggacattagaaacccaaatgaaagaaattttgccttatctcacaaaaacattagttccagaaggtactggaagctggacagtcgaatggattacaccagagtaa

SEQ ID NO: 21983 - DNA, 366 bp, Haemophilus influenzae
atgcacgcaatttttgacttaataaaggataacattatgtttggaaaaggcggtttaggcggcttaatgaaacaagcccaacaaatgcaagaaaaaatgcaaaaaatgcaggaagaaatcgcgcaactagaagtaacgggtgaatctggtgcaggtttagtgaaaatcacaattaatggtgcacataactgccgtcgcattgacattgatccgtctttaatggaagacgataaagaaatgttagaagatttaatcgccgccgcttttaacgatgcggtacgtcgtgcagaagaattacaaaaagaaaaaatggcatcagttaccgctggaatgccattaccaccaggaatgaagtttccgttttaa

SEQ ID NO: 21984 - DNA, 603 bp, Haemophilus influenzae
atgcaaagcagtccacttttagaacaccttattgaaaacttacgttgtcttccaggcgtagggcctaaatctgcgcaacgtatggcttatcatcttttacagcgtaatcgtagcggtggaatgaatttagctcgagcactcacagaagccatgtctaaaattggtcattgttcacagtgtcgagactttacggaagaagacacttgcaacatttgcaataatccacgccgtcaaaattcaggtttgctttgtgtcgttgaaatgccagcagatattcaagcgattgagcaaacggggcaattttcaggacgttattttgttttaatgggacatttgtctccacttgatggtattggacctcgtgaaattggcttagatttactgcaaaaacgcttagtagaagaatctttccacgaagtgattcttgcaacaaatccaacggtggaaggcgatgcgacggcaaactacattgctgaaatgtgccgccaacataatatcaaagtgagtcgtatcgctcacggtatccctgtcggtggtgaactggaaactgtggacggcacaacgcttactcactcttttcttggtcgtcgtcaaatcgactaa

SEQ ID NO: 21985 - DNA, 1956 bp, Haemophilus influenzae
atgcgtttatttatcgccgaaaaaccaagcttagctcgcgctattgctgatgtgctcccgaaaccccatcaacgtggggatggttttattaaatgcggcgataatgatgtggtaacttggtgtgtagggcatttgctcgagcaagcagaacccgatgcctatgatcctaaattcaaacaatggcgtttagaacatctccctatcattcctgaaaaatggcaacttttaccgcgaaaagaagtaaaaaaacaactttctgtggtagaaaaactgatccatcaagcggatacacttgttaatgcaggagaccctgatagagaaggacaattacttgtagatgaagtgttcagttatgccaatttatctgccgaaaaacgcgataaaattttacgctgtttgattagcgacctaaatccaagtgcggtagaaaaagcggttaaaaaattacaacccaaccgtaattttattcctcttgccacatccgctctcgcacgagctcgcgccgattggctttatggcattaatatgaccagagcttataccattcgaggtagacaaactggctatgatggcgtgctttctgttggacgagtgcaaacccctgtgctaggtttaattgtacgtcgagatttagaaattgagcatttccagcccaaagacttctttgaagtacaggcttgggttaatccagagagcaaagaagaaaaaactccagaaaaatcaaccgcacttttcagtgccttatggcaacctagcaaagcttgcgaggattaccaagatgatgacggcagggtgctctctaaaggattagcagaaaaagttgtaaaacgtattacaaatcaacctgcagaagtcaccgaatacaaagacgttcgtgaaaaagaaacggcgcccttgccttattcactttctgcgttacaaattgatgcagcaaagcgatttggtatgtccgctcaagccgtattagatacgtgccaacgcctatatgaaactcatcgtttgattacttatccgcgttctgattgtcgctatttgcccgaagaacattttgccgaacgccataatgtattaaatgcaatttcaacccattgtgaagcttatcaagtcttaccaaatgttattttaactgaacagagaaatcgctgttggaatgataaaaaagtagaggctcaccatgcaatcattcctactgccaaaaatcgtccagtaaatctaacacaagaagaacgtaatatttacagccttatcgctcgccaatatttaatgcaattttgccctgacgcagaatatcgtaaaagtaaaatcacattaaatatcgctggcggtacttttatagctcaagcacgaaatttacaaacggctgggtggaaagaattgttaggcaaagaagacgacacagaaaatcaagaacccttattaccaatagtaaagaaaggacaaattttgcattgtgaacgcggagaagtgatgagtaaaaaaactcagccaccaaagcccttcactgatgcaaccttgctttcagcaatgacgggcattgcgcgatttgtgcaggataaagaactcaaaaaaattctgcgagaaaccgatggattgggtacagaggctactcgcgctggcatcattgaattactttttaaacgcggttttttaactaaaaaagggcgaaatattcatagcacagaaacaggaagaattttaattcaggcattaccaaatattgccacccaaccagatatgacggctcattgggaatcgcaactcacagacattagtcaaaaacaagcaacctatcaacaatttatgcataacttgaatcaaatattgcctgatttagtccgttttgtagatcttaatgcattaagacaattaagccgcattaaaatgattaaatccgatagagcgaaacctaaaagtgcggtaaaaaaatcgagtaaatcaaacggtgagactgattaa

SEQ ID NO: 21986 - DNA, 1671 bp, Haemophilus influenzae
atgaagttatttttaacccaatcagctaatgtaggcgatgtgaaagcctatttattacatgaagtttttcgagcagctgcacaaaaagcaaatgtctctattgtaggaacaccagccgaagcagatcttgttctcgtatttggttctgtattaccaaataaccccgatttagttggtaaaaaagtctttattatcggcgaagctatcgccatgatttctcctgaagtcacgctggcaaatgctttagccaatggggctgattatgttgcaccgaaaagtgcggtgagttttacaggtgtttctggtgtaaaaaatattgttgcggtaactgcttgtccaactggcgttgcacatacgtttatgtcggctgaagcgattgaagcctatgcgaaaaagcaaggttggaatgtaaaagttgaaacccgtggtcaagttggggctggcaatgaaattactgtggaagaagtcgcagcggctgatttggtatttgttgcagcagatattgacgtgcctttagataaatttaaaggtaaaccaatgtaccgcacttcaacaggcttagccttaaagaaaactgagcaagaatttgataaagcatttaaagaagccaaaatttttgatggtggaaataatgcgggaacgaaagaagaaagccgtgagaaaaaaggtgtgtacaaacacttaatgactggtgtttctcatatgttaccgttagtggttgctggtggattgttgatcgcgatttcctttatgttcagttttaatgtaattgaaaatacaggagtttttcaagatcttccaaatatgttgataaatatcggtagtggtgtggcgttcaagttaatgattgccgtgtttgctggctacgttgcattttctatcgctgatcgtccaggacttgcagttggtttgattgcagggatgctggcaagtgaagcgggtgcagggattcttggcggtattattgctggtttcttagcgggctatgtggtgaaagggctaaatgtgattattcgattgccagcgagtctgacttcattaaaaccgattttaattttaccgctcttaggttcgatgattgttggtttgacgatgatttacctcatcaatccaccagtggctgaaattatgaaagagctaagtaattggcttacttcaatgggcgaagtgaatgcgattgtgttaggcgcaattatcggcgcaatgatgtgtattgatatgggcgggccagtaaataaagcagcgtacactttttcggttggattgattgcttcccaagtttatacaccaatggctgcggcaatggccgcaggtatggttcctccaattggtatgactgttgcgacttggattgctcgcaataaatttaccgttagccaatgcgatgcggggaaagcatcatttgttcttggtttatgttttatttctgaaggagcattaccatttgtggcagcagatccaattcgagtcattattagctctgtgattggtggtgcggtggctggtgcgatttcaatgggattaaatattaccttacaagctccgcacggcggattatttgtcattccatttgtgtctgagccgttgaaatatcttggtgcaattgcgattggtgctttatcaacaggtgtggtttacgccattattaaatcgaaaaacaatgcggaataa

SEQ ID NO: 21987 - DNA, 942 bp, Haemophilus influenzae
atggcaagcgtcgtaaccattaccttaaatgccgcctatgatttagttgggcgtttaaatcgtattcaacttggcgaagtaaatacggtagaaacattgggcttattccctgctggaaaaggcattaatgtcgcaaaagtactaaaagatttaggcgttaatgttgcagtaggcggtttcttgggcaaggataattcagctgattttgagcaaatgtttaatcagcacggtttggaagataaattccaccgtgttgatggcaaaacgcgtatcaatgtaaaaattaccgagactgaagcggatgtgacagatttaaatttcttggggtatcaaataagcccacaagtttggcaacaatttgtgacggattctttggcttattgtttaaattatgacattgtcgcagtttgtggcagtttacctcgaggtgtgtctcctgaattgtttgctgattggttgaatcagcttcatcaagctggcgttaaagtggtgcttgatagtagcaatgctgcgcttaccgctggattaaaagcgaaaccttggctagtaaaacccaatcatcgagaacttgaggcttgggttggtcatccattaaatagtcttgaagaaattattgccgctgcacagcaactcaaagcggaaggcattgaaaacgtgattatttcaatgggcgcaaaaggttctttatggattaataatgaaggcgtgctcaaagccgaaccagcacaatgtgaaaatgtcgtgagtaccgttggagcaggggattcaatggtagcaggcttaatctatggttttgaaaaaggtttatcgaaaacagaaactttagcttttgctacggctgtgtccgcttttgctgtatctcagagtaacgtcggtgtgagtgatttgagtttacttgaccctattttagaaaaagtacaaataacgatgattgaaggatag

SEQ ID NO: 21988 - DNA, 1500 bp, Haemophilus influenzae
atgttagaactttcggaaagcaacattcatttaaatgctaatgcaattgataaacaacaagcgatcgaaatggcagtgtccgcattggttcaagcaggcaatgttgaaaatggttacttgcaaggaatgttagcgcgcgagctgcaaacctcgacctttttaggcaatggcatcgctattcctcacggcaccttggatactcgtttgatggtaaagaaaacgggcgtgcaagtgtttcaatttcctcaaggcatagaatggggcgaaggaaatattgcttatgtcgtgattggtattgcggcgcgatctgatgagcatttgtccttattacgtcaacttacccacgttttgagtgatgaagataccgcagcaaaattagcaaaaataactgatgtggctgaattttgcgcgattttaatgggcgagacaattgatccatttgaaattcctgctgccaatatcagtttagatgtaaatacccaaagtttattaactttagttgcgattaatgcggggcaattacaggtgcaaagtgcggtagaaaatcgctttatttctgaagtgataaataatgcggcattaccgcttggcaaagggttatgggtaacggactctgtcgtaggaaatgtgaaaaatgccttagcatttagtcgtgctaaaacaatttttagccacaatggcaaggccgtaaaaggcgtgataaccgtttcagccgtcggtgatcaaattaatccaactttggtgcgtttattagatgacgatgtccaaacaaccttgctcaatggaaattcaacagaaattttgaccgcacttttgggttcatcgagtgatgttgaaactcaatctgtagaaggtgctgttgtaggaacttttacaattcgtaatgaacacggcttacatgcacgcccaagtgcaaatttggttaatgaagtgaaaaaattcacttctaaaataaccatgcaaaatcttactcgtgaaagtgaagtcgtcagcgcaaaaagtttgatgaagattgttgcgcttggtgtaacacaaggacatcgtttacgttttgtggcagagggggaagatgcaaaacaagcaattgaatcattgggcaaagcgatagccaatggcttgggagagaatgtttcggcagtgccaccgtctgaacccgataccattgagattatgggcgatcaaattcacacacctgcggtaacagaagatgataatttgccagcaaatgccattgaagccgtatttgtgattaaaaacgagcaaggtttgcacgctcgcccaagtgcaatattggtaaacgaagtgaagaaatataatgcttccgtagcagttcaaaaccttgatcgtaattctcaattagtcagtgctaaaagtttgatgaaaattgtggcattaggcgtagtcaaagggactcgtttacgttttgttgcgacgggcgaagaagcgcaacaagctattgacggaatcggtgctgtgatcgaatcgggtttaggggaatag

SEQ ID NO: 21989 - DNA, 1299 bp, Haemophilus influenzae
atgattatggaattatttcatactattttggcaattgtggctttaattttaagtagcgcagttgtttcttctgctgaaatttctctggcgagtcctcgtaagttaaaattgcaatctcttgcaaataaaggcgacgtgcgtccgcttcaagtgcttaaattacaagagcatcctggtcgttttattacggtggttcaaattttgttgaatatggtggcgattttgggtgggggaattggcgaaagtgcgctaagtccttacattgcagatattttaaatcgttcttttgaaggaagttggattgcgccaaccgcctctacaatcgcttttatattagtgacttgtttgtttattttatttgctgatcttattccaaaacgaattgctattacttatcctgaaatggtggcgttgagcgttgtgggtattatgaattttagtatgtatgtgtttaaaccgcttgtgtggttttttgatactattgctaatgtatttttccgcttatttcgcatttctactgtgcgtgaagatggcatgacctctgaagatattttcgccgtagttgaagcaggcgcagaagctggtgtattaaaaactcaagagcattatttgatcgaaaatattttcgatatgcaagcccgtacggtaacttccacaatgacaacccgtgaaaacatcgtatatttagaccgcactttttctcgccaagaagtcatggatacgctttctcgtgattctcattctaaaattgtgatttgtgacaatggcctcgacaaaatcttaggttatatcgaatcccatactttgctcacaatgtatttgcagaatgaaaatgtggtgctgactgatcccaaactactacgtaaagccttatttgtgcctgatacgctttctctttacgaagtgttggaattgtttaaatctactggcgaagattttgcgattattgtgaatgaatatgctcttgtagtgggtattgttacgctaaatgatgtgatgagtattgttatgggggaattggtttctaacgaagaagaatatattgtgagccgtgatgaaaactcgtggctgattgatggcgcaacgccattagaagaggtaactcgagtattagatattgcttattttcccgatgaagaaaactacgaaactatcagtggttttatgatgtatatgttacgtaaaatcccgaaaaaaaccgattctgtggtttacggaaaatacaagtttgaagtgattgatacggaaaactttaaaatcgatcagattttggtgtctttagtaaaagagcaggagtag

SEQ ID NO: 21990 - DNA, 783 bp, Haemophilus influenzae
atgttcattgttgactcccactgccatttagatgcgttggattatgaaaatttacataaaaatatctcggatgtggtggaaaaagcgcacgcacgtgatgtgaaacatttgctcgcgattggtgtaaccttaagccgttttgagcaggcttatgactctttacgggaatttaataatgtctcgcttgcttgtggtgttcacccacttgattttgaagaagaaccttatgacgcagaacgtttattgcgtttagcgcaagatcctaaagtgattgctattggcgaaattggcttagattattattacagtgcggacaataaagcggcgcaacaagcggtgtttggtagccaaatcgatattgcaaaccaattagataagcctgtgattattcatacacgttctgcaggcgatgacaccattgcaatgttacgccaacaccgtgctgaaaagtgcggtggcgttattcattgttttacggaaactatggaatttscgaaaaaagcgttggatttaggattttacatttcttgttctggcattgtcacctttaaaaatgctgaagcgattcgtgaggttattcgttatgtaccaatggaacgcttattggtggaaacggattcgccttatcttgcgccagtgccttacagaggaaaagaaaatcaaccagcgtatacgagagaagtatgtgaatacgtggcaaccttaaagggcgtttctgcagaggcgtttgctcaaatcactacacaaaatttcgagcgtttatttaaaattcgtgtagaataa

SEQ ID NO: 21991 - DNA, 984 bp, Haemophilus influenzae
atgaccgcactttacccttggctaatgccaatttatcatcaaattgctcaaacctttgacgaagggttggggcatcatgctgtgctgattaaagctgattctggtttaggcgtagagagtttatttaatgcacttgcacagaaaataatgtgtgtagctcaaggcgataaaccttgtggtcaatgccattcttgtcatttaatgcaagcccatagccatccagattatcacgaattaagccccattaacggtaaggatattggcgttgatcaagtacgcgacattaatgaaatggttgcgcagcacgcacaacaaaacggcaataaagtggtgtatgtgcaaggggcggaacgtttaacggaagcggctgctaatgcattattgaaaacattggaagagcctcgtccaaatacttattttttacttcaagcggatagttcggcaagtttgttagcaactatttacagtcgatgccaagtgtggaatctttccgtgcctaatgaagaaattgcttttgaatggttaaaatcaaaaagtgcggtagaaaatcaggaaattttgaccgcacttgcgatgaatcttgggcgtccgcttttagcattagaaacgttacaagaaggatttattgaacagcgtaaaaacttcttacgtcaattttgggtgttctatcgccgacgttcgccattggaattgcttccgttgtttgataaagaacgctatgttcagcaagtggattggattttggcttttctttctgattgtttaaaacataaacttgaaattgatagtcatcgacaagtggctgatcttggccgtggtatcgaacaattcagcgacgagcaaactgcccttggtttattacaagccattaaaattatgcaaaaagtgcggtcagatttgcttacaattaatggtgtgaatgttgaattaatgctattggatggcttgacacgattagtcacagaagtatttgaaacgcaataa

SEQ ID NO: 21992 - DNA, 633 bp, Haemophilus influenzae
atgaaaggaaagtttattgtcattgagggcttagaaggtgcggggaaaagctccgctcatcagtctgtagtgcgagttttgcatgaacttggtattcaagatgttgtgtttacgcgcgagcctggtggaacgccactggctgagaaattacgtcatctcatcaaacatgaaaccgaagaacccgtgacagataaagcagagttattaatgctttatgcggctcgtattcagttggtggaaaatgtgattaaacctgctttaatgcaagggaaatgggtagtgggcgatcgtcacgatatgtcatctcaggcgtatcagggtggtggacgtcaattagacccgcattttatgctcaccttgaaagaaaccgtattaggtaattttgagccagatctcacaatttatttggatatagatccgagcgtcggtttagcgcgagctcgtggacgtggcgagttagatcgtattgagcaaatggatttagattttttccatcgtactcgagcacgctatttagaattagtaaaagataatcccaaagcagtggtgattaatgcagagcagagtattgaacttgttcaagctgatattgaaagtgcggtaaaaaattggtggaaatcaaacgaaaaatga

SEQ ID NO: 21993 - DNA, 792 bp, Haemophilus influenzae
atgcgctactccattcaagattttattcaactcatcgcccaacttcgcaatccaaatggcggatgcccttgggatttaaaacaaaattatgaatctatgatttcttgtttaacggaagaaacttacgaagtaattgaagccattgagaaaaaagacataccaaatttacgcgaagaattaggggatttattgttgcaagtcgttttcttcagtcagcttgctagggaagataaatactttgcttttgacgatgtattgcaagatgttgctgaaaaaattgtacgccgtcatcctcatgtgtttggtgatgcaaaagcgggggacgaaacagaagctctttcccgttggaatgaaatgaaagcgaaagaaaaacaaggtaaaagtgaagaaacctctattttagataatgtgcctcgtgctttgccttctcttacgcgagcggcaaaattacaaaaacgttgttcaaaagtagggtttgattgggaagaaatttcacccgtatttgacaaagtgcgggaagaattagaagaagttcaagctgaaattaaccgcacttcgattgaacaaaataaagtggaagaggaaatcggcgatttattgttcgcaaccgtcaatcttgctcgccacttaaaatgtgatcctgaagatgcattgcggaaagcaaatttaaaatttgaacgtcgttttcgagcagtagagcaagcggttcaacaacaaggtaagcaagtgaataatgtgccacttattgaattagatttgttatgggatgaagtgaaaaaacaagaaaactaa

SEQ ID NO: 21994 - DNA, 2412 bp, Haemophilus influenzae
atggcgaagaatacccaacgtacaatgcccgtattgccattacgcgatgttgtcgtttttccttatatggtgatgccactttttgtagggcgcgcaaaatcaattaatgcccttgaagaagcgatgaacgatgacaaacagattcttttggtatcccaaagagaagctgatttggaagaacctacccctgaagatttatttgatgtgggtaccattgctaacattattcagttattaaaattacctgatgacacagtaaaagtgctagttgaaggtcaaaatcgcgcgaaaattaacagtcttgaagacggcgaaaagtgcttttccgcccaaattacccctatcgaaaccacttatggcgatgaaaaagagttagtggtggcaaaaagtgcggtactttctgagtttgaaaattatcttaccctcaacaaaaaagtgcctacagatattctcaatgcccttcaacgtattgatgatgttgatcgcttagctgacacaatggctgcccatctccctgtaagcattcgccataaacaaaatgcgttagaactcgctaatgtgcaagaacgtttagaatatttgcttggtatgatggaatcagaggctgatattctccaagtggaaaaacggattcgcggtcgtgtcaaaaaacaaatggagaaaagccagcgtaactattatttgaacgagcaaattaaagccattcgtaaagaaatggatggtggcgaaaatgaagataccattgatgaagttgaacaactgcatcaaaaggtagaagcggcaggcatgccagctgatgtacgcgacaaagtagaaaatgaattacaaaaacttaaaatgatgtcagccatgtcttctgaagcaacggtaatacgcagttatattgaatggatgatccaagtgccttggcatcaacgttctaaagtgaaaaaagacattgttaaagcacagcaagttttagataccgatcactatggtttagatcgcgtaaaagaacgcattcttgaatatttagcagtacaagcgcgtttaaacaaagtgaaaggcccgattctttgtttagttggccctccaggtgtaggtaaaacttctcttggtcagtctattgccaatgctactggtcgtaaatatgtacgtatggcattaggcggcgtgcgtgatgaagcagaaatccgtggtcaccgtaaaacctatattggtgcattgccaggtaaattaattcaaaagatggcaaaagtgggcgtaaaaaatccattattcttgcttgatgaaatcgacaaaatggcatccgatatgcgaggtgatccagcatcagcattgcttgaagtattagatcccgagcaaaacaccacatttaacgatcactatttagaagtggattatgatctttctgatgtgatgtttgtggcaacatcaaactctatgaatattccaggcccattattggatcgtatggaagttattcgtctttctggttatacagaagatgaaaaacttaatatcgcaatgcgccatttattagcaaaacaaattgaacgtaatggtttgaagaaaggcgaacttaccgtagaagaaagtgcaattttagatattatccgctattacacacgtgaagcgggcgtacgtggattagaacgtgaaatttcaaaaatctgccgtaaagccgtgaaaaatttattagtaaatccaaaacttaaatctatcacggtaaattcagataatctgcacgattatcttggcgtaaaacgttttgaatttggtaaagctgacacgcaaaaccgcattggtgaagtgactggtttagcttggacagaagtgggcggcgatttactcactattgaaactgcctctgttgtgggcaaaggaaaactttctttcactggttcattaggcgatgtgatgaaagaatccattcaagcggcaatgaccgttgtgcgtgctcgtgcggataaactgggtatcaatgctgaattccacgaaaaacgtgacattcacattcacgtgccagatggtgcaacaccaaaagatggcccaagtgcaggtattgcaatgtgtactgcattaatttcttgtttaacaggtaatcctgtgcgtgctgatgtggcaatgacgggagaaatcagtttacgtggtaaagtattaccaatcggtggattaaaagaaaaacttcttgcggcacatcgtggtggaattaaaaccgtattaatcccaaaagaaaacgttaaagatcttgaagaaattccagagaacgtaaaacaaaatcttgcaattcatgcggtagaaaccattgatgaagtgcttggttttgcattggaaaatccaccagagggcattgagtttgttaaagtggaggctaaacctaaagcaccacgccgtaaagtgacgagtaaatcagaaagagcggtcaattaa

SEQ ID NO: 21995 - DNA, 843 bp, Haemophilus influenzae
atgtctcaatttatttctcttactcaatatcagctgattgaagtacagggtgcggatgcagaaaaatatttgcaagggcaattaacttctgatgttgtgcgattagcaagtggcgcaacgacacttacagctcactgcgacccaaaaggtaaaatgaatgcaatttatcgtttgtttaaagtaagtagtgaacaattctttttactcgttaagaaagatattttgccaagcggtctagatgctttgaaaaaatatgcggtattttccaaagttagttttgatttacgtgattggcaaatcattggcgtaataggtgaaaaatgtggaaaaattacaccgaacttttcattagaaattgatgaaaaacgttcaattttattaaatgaaactgaattgcccgtgaattttaatggcgatgaaaaaatttgggaagtagctgatattcaagcaggattgccaaatttaagtcctcaaacgcaaaatgaatttatcccacaagccctaaatttacaggctattgagcaagccatttcttttaccaaaggttgttatattgggcaagaaaccgtggcacgtgcgaaatatcgtggtgcgaataaacgcgcaatgtttatttttaaagtgcaaacccagcaggaagcggaaattggcagtgaaattgaaatgcagcttgaagctaattggcgtaagactggcacgattacaagtgcggtcaatttagacggtgttttatggttgcaagttgtgatgaataacgacattgattcagagcaacaatttaggttgctgaatagtgaaatattgttagagcgagtgcagttaccttattcgattactgaataa

SEQ ID NO: 21996 - DNA, 864 bp, Haemophilus influenzae
atgatttacagtatgactgcctttgcacgccttgaagtgaaaaaagattggggtgatgcggtatgggaaattcgttccgttaatcaacgttatttagaaaactttttccgtttgcccgagcaatttcgcggattagaaaacacgttgcgtgagaaacttcgtcaaaatcttactcgcggtaaaattgaatgttctctacgcattgaaacaaaaaaacaagcaaatgcagaattgaatttaaataaagaacttgcgaatcaagtaattcaatctttgcaatggattaaagctcaggctggagaaggggaaattaatttgacagacgtgttgcgttaccccggcgtagtggaagcgcaagagcaagatttagatgcgattagtcaagatttattgacagcctttgatgatttactgacagattttattgcaatgcgtggtcgtgagggggaaaaactgaacgatattattcaacaacgtttagattccattgcagtggaaacggataaagtgcggtcacaaatgccagcagttttacaatggcagcgtgaacgtttattgcaacgttttgaagatgctcaacttaatcttgatccgcaacgtgtggaacaagaaatgattttactcgctcaacgcattgatgtggcggaagagctagatcgtttacaaatgcacgtgaaagaaaccacgaatattttgaaaaaaggcggtgcagttggacgtaaattagattttatgatgcaagaattgaatcgggaatccaatacccttgcgtctaaatccattaatgcagatatcacggcttctgcggtggagctaaaagtgcttattgaacaaatgcgtgagcaaattcagaatttagaatag

SEQ ID NO: 21997 - DNA, 912 bp, Haemophilus influenzae
atgacaaacacaacaatgcaaccaaaccgccttcgtattgctttgcaaaaaaaagggcgtttaagccaagattgtgccatattacttaaacaatgtggcgtgaaaattaattggaatgaacaacgtttaatcgcttatgcggaaaatttgccgattgaaattcttcgcgtacgtgatgatgatattcctggattgatttttgatggcgtagtggatcttgggattattggcgaaaatgtgttagaagaggaagagcttggtcgccgtgcagcaaatgaaacagttacatacaaaaaacttcgccaacttgattttggtgattgtcgtctatcacttgcggttgatcgcgattgtcattatgagaatgtgaaagatcttgctaataggcgtattgcaacttcttacccgcatttgctcaaacgttatatgaatgagaatggggtgtcgtttaaaagttgtttattaaatggttcagtagaagtcgcacctagtgcgggtattgcttatgcgatttgcgatttagtatcatcaggggcaacgcttgaagcaaatggcttaaaagaagtggacgtgatttatcgttctaaagcttgtttaattcagcgtgctgaaccgcttgaatcaactaaacaagctcttgtggataaactactcactcgtattcaaggtgtgcagcaggcagcagaaagtaaatatattatgctccacgctccgaaagaaaaacttgaaaaaatcaccgcgcttttacctggcgttgaaaatccgaccattttaccattagccagtgatacaactcgggtagcaatgcacgtagtgagccaagaaaatttattttgggaaacaatggaacagttaaaagaggcaggagctagttcaattttagtgttaccaattgagaagatgatggagtaa

SEQ ID NO: 21998 - DNA, 1542 bp, Haemophilus influenzae
atgcaactaaattcaactgaaattagtgaattgattaaaaaacgcatcgctcaattcgacgtggtcagtgaagcgcgtaatacagggacaattgtttctgtaagcgatggtattattcgcatccacggtttaagcgatgtgatgcaaggtgaaatgatcgccttaccaggtaatcgttatgcgatggcacttaaccttgaacgcgattctgttggtgctgtagttatgggaccttacgcagatttagcggaaggtatggaagttcaatgtacaggtcgtattcttgaagtaccagttggtcgtggtttattaggtcgtgtagttaatacgcttggtcagccaatcgatggtaaaggcgaaattgaaaatgatggtttctcaccagtagaagtgattgcgccaggtgttatcgatcgtcgttctgttgatcaacctgttcaaactggttataaagctgtcgattctatggtaccgattggtcgtggtcagcgtgagttaatcatcggtgaccgtcaaacgggtaaaactgcgttagcaattgacgctattattaatcaacgtaattcaggtattaaatgtatctatgttgcgattggtcaaaaagcctctactattgcaaatgtcgtgcgtaaattagaagaacatggtgcgcttgcaaatactatcgtggtagctgcatctgcatctgaatcagcagcgttacaatatttagccccttatgctggttgtgcgatgggggaatatttccgtgatcgcggcgaagatgcgttaattgtttatgatgatttatcaaaacaagccgtagcttatcgtcaaatttcattattattacgtcgtccaccaggtcgtgaagcctatccaggtgatgtgttctatttacattctcgtttactagaacgtgcttctcgtgtaaatgaagattatgtagaaaaattcactaaaggcgaagtaaaaggaaaaacaggttctttaaccgcacttccgattattgaaacccaagctggtgacgtatctgcgtttgttccaaccaacgtaatttctattaccgatggtcagatcttcttagaatctaacttgtttaactcaggtattcgtcctgcggtaaacccaggtatttcggtatctcgtgttggtggttcagcgcaaactaaagttattaagaaattagcgggtggtattcgtaccgcgctagctcaatatcgtgaattagcagcgtttgcacagtttgcatcagatctagatgatgcgactcgtaagcaactttctcacggtgaaaaagtaactgaattattaaaacaaaaacaattcacgccattatctgttgcagaacaagcggttatattgtttgctgttgaatttggttatttggatgacgtggaattatcaaaaattgcaagttttgagaccgcacttttagattattctaaccgtaatcacgctgaatttatgcaagagcttaataaaaccggtaactataatgatgaaatcaaagatactttaaaaagtattttagatggttttaaagcgaatagtgcttggtag

SEQ ID NO: 21999 - DNA, 534 bp, Haemophilus influenzae
atgtcagaattaactacaatagctcgcccttatgcaaaagctgcattcgactttgccattgaacaaagtgcggtcgaaaaatggactgaaatgttaggttttgctgctgccgtagctgaagatgaaacggtaaaagcttacttaagtagttctctttctgcacagaaattagctgatacagtaatttctatttgtggcgaacaattggatcaatatgggcaaaatcttattcggttaatggctgaaaataagcgtttgagtgctattcctgcggtgtttgaagaatttaaacatcacgtagaggaacaccaagctattgcagaagttgaagtaacatctgcgcaaccattgaatgcaacacaaatcgaaaaaattgcagctgcaatggaaaaaagattagctcgcaaagtgaaattaaattgcaacgtggataacgcacttattgctggtgtgattgttcgtactgaagactttgtgattgacggaagtagccgtgggcaacttactcgtcttgcaaacgagttgcaattataa

SEQ ID NO: 22000 - DNA, 471 bp, Haemophilus influenzae
gtgaatttaaatgcaacattgattggtcaacttatcgcattcgcacttttcgtgtggttttgcatgaagtttgtttggccaccaattattaatgcgattgaaacacgtcaaagccaaattgcgaacgctttagcgtcagctgaagcagctaaaaaagagcaagcagatacgaaaaatcttgttgaacaagaactttcagctgcaaaattacaagctcaagacattttagatgctgcgaataaacgtcgcaatgaagtattagacgaagtgaaggcagaagccgaagaactaaaagcaaaaattattgcacaaggttatgctgaagtagaagcagaacgtaaacgtgttcaagaagaattacgtcttaaagtagcttcattggcagtggctggtgctgagaaaattgtgggtcgttctattgatgaagcggcaaacaatgacattattgataaattagttgcagagttataa

SEQ ID NO: 22001 - DNA, 255 bp, Haemophilus influenzae
atggaaactgtaattacagcaacaatcatcggtgcatcaattcttcttgcatttgctgcattaggtactgcaattggctttgctattctaggtggtaaattcttagaatcatcagctcgccaaccagaattagcatctagcttacaaactaaaatgtttatcgtagctggtcttttagatgcgattgcaatgattgctgttggtatttcattacttttcattttcgcaaacccattcatcggtttattaaactaa

SEQ ID NO: 22002 - DNA, 789 bp, Haemophilus influenzae
atgtctggacaaacaacatcggaatacattagccaccatttatcctttctcaaaacaggggatggattttggaatgttcatatagatacgttgttcttttctattcttgctgcggttattttcctatttgttttttctcgagtagggaaaaaagcaacaactggcgttccaggaaaaatgcaatgcttagttgaaattgttgtggaatgggttaatggaatcgtgaaagaaaattttcatggtccacgtaacgtagttgcgccacttgcattaacaattttctgttgggtattcatcatgaatgctatcgacttaattcctgttgatttcttacctcaatttgcaggtttgttcggtattcattatcttcgtgcagtgccgacagcagatattagcgcaactttgggtatgtccatttgtgttttctttttaattcttttttatacaataaaatctaaaggattcaaaggtttagttaaagaatatacgcttcatccattcaatcattgggcgtttattcctgttaattttattcttgaaacggtgactttattggctaaaccaatttcacttgccttccgtttattcggtaacatgtatgcaggggagttgatctttattcttatcgctgtaatgtattccgctaatatggccattgcagcattagggattccgttacatcttgcttgggctattttccatattttggttattaccttgcaggctttcatctttatgatgttgacggttgtttatttaagtattgcttataacaaagcagatcattaa

SEQ ID NO: 22003 - DNA, 612 bp, Haemophilus influenzae
atgaaagccaaattagtcagtttacttgcgcaagcaaatataaaaataagtgatcaacaaattcagcagttgattaatctggtcaatttactcaataaatggaataaagcttataatttgacgtcagttcgtgatccgcaagaaatgttagttaaacatattttagatagtcttgttgtaagtccttatttacaaggtgatcgttttattgatgtcggtacagggcctggtttgcctggtttacctttggcaattattaatccttccaaacaattcgtcctccttgatagcttaggtaagcgtattagttttattcgaaatgctatacgtgagcttagactaactaatgtaacccccgttttaagtcgagtagaagaatatcaacctgaagataaatttgatggtgtattaagccgtgcttttgcttcactaaaagatatgacagattggtgccatcatttaccaaaagaaaatggatatttttatgcattaaaagggatttatcaggaagatgaaattaatgaattgaataaaaaatatactattcaaaaagtgattgaattatctgtacctgaacttataggcgaacgacatttaatcgttttacgttaa

SEQ ID NO: 22004 - DNA, 357 bp, Haemophilus influenzae
atgaggggaagaactagaattggaaaatttactacgtgcggagaacgcaatcctaaaaaagttgcaagaactcaaccaacaaaaaaagacttgaagacgcaaaacccaattttacattccgaccaaggttggctgtatcaaatggtcggttatcaggcgattttacgagagaatagcattcaacagaatatgtcaaggaaaggaaattatttagataacaatgcgatggaaaacttctttggacgattaaaaactgaatgttattacgacaaacgatttgagacgttcaaacaactgaaaaaacaactcatgagtatattcattattacaaccatgatcacattcaggggaaactaa

SEQ ID NO: 22005 - DNA, 528 bp, Haemophilus influenzae
atgacaacgattgtaagcgtacgtcgcaatgggcaagtcgtcgtaggcggtgatggacaagtttctttaggcaataccgtaatgaaaggtaatgctcgtaaagtacgccgtttatataatggcaaagtgcttgctggttttgcgggtggaacggcagatgcatttacactttttgaattatttgaacgtaaacttgaaatgcatcaagggcatttgctaaaaagtgcggtggaattagcgaaagattggcgtacagatcgcgcacttcgtaaattagaagcgatgctaattgttgcggatgaaaaagaaagtttaatcatcacgggtattggcgatgtggttcagcccgaagaagatcaaattttagcaatcggatcgggtggtaactatgcgttatctgcggcacgtgcgttagtggaaaatactgaactttctgcacatgaaattgttgaaaaatctttaagaattgctggtgatatttgcgtgttcacaaataccaatttcactattgaagaattaccgaattaa

SEQ ID NO: 22006 - DNA, 420 bp, Haemophilus influenzae
atgaaaaaaacagctttattgaatgcgcaactttcgcattgcattgctacacttggtcatacggaaagtttgacgatttgcgatgcgggacttccaattccattaagtgtggaacgtatcgatctcgcattaactgcgggtgtaccaagttttctacaaacgttgaatgtagtaacgaatgaaatgtatgttgaacgcgttgttattgcagaagaaattaaagaaaaaaatccagaaatattgaccgcacttttaacacaacttcaaaaacttgaaagccatcagggtaatcaaatacaagtggaatttgtatcgcacgaaacttttaaaaaattcaccctcgaaagtaaagctattgttcgtactggcgaatgttcaccttatgccaatgtgattttatattctggcgtgccattttaa

SEQ ID NO: 22007 - DNA, 972 bp, Haemophilus influenzae
atgatgaaaaatgaaacatctaattttcaaataggaagatttttgattgaacagcgttcttttattgcattgattattcttatcgcgattgtatcaatgattaatcctgatttttttagcgtagataatattttgaatattttacgccaaacttcggttaatgcgattattgcagtgggtatgactttcgttattttaattgcaggtatagatctttctgttggatctgtattggcattgacaggtgcaatcgccgcttcaatggtgagtattgaattgcctatttttttagtcattcctgtggttttattgattggaacacttcttggtggcataagtggtgtaattgtggcaaagggaaaagttcaggcttttattgctaccttggttaccatgaccttactgcgtggtataacaatggtttatacagatggtcgtcctattacgacaggtttttcggataatgctgatctatttgctagcattggtacaggctatgttttaggtatcccagtaccaatttggattatgagtatcgtgtttgcggttgcttggtatattttaaaagacacaccaatcggtcgctatatttatgctttaggtggaaatgaggcagcgacccaactttctggtattaacgtcaataaaatcaaagtatttgtttttgcggtgagtggatttctttctgcgctggcgggtttaattgtaacttcacgtttatcttccgctcaacccactgctggcgtatcttatgaattagatgcaattgccgccgtggtagtcggtggaaccagtttgatgggggggaaaggtcgtgtaatgggaactctcatcggtgcattaatcatcggatttttaaacaatgcattaaatttattagatatttcatcttactatcaaatgatagcaaaagcgttggttattttggttgctgttttagccgataactatcttggtacaaaaaaactgtaa

SEQ ID NO: 22008 - DNA, 879 bp, Haemophilus influenzae
atgaaaaaactaaccgcacttacttctgctgtattattaggtttggctgtttctagctctgcttctgcgcaagacacaatcgctttggcagtatctacattagataacccattttttgtaacgttaaaagatggcgcacagaaaaaagcggatgaattaggttataagttagtagtgcttgattcacaaaatgaccctgctaaagaattagctaatatcgaagatttaactgtgcgtggtgcaaaaatattattgatcaatccaactgcttctgaagctgttggcaacgcagtggcgattgcaaaccgtaagcatattccagtaattacattagatcgtggtgcagctaaaggaaacgtagtgagccatattgcatctgacaatatcgcaggtggtaaaatggcaggtgattttatcgcacagaaattaggcgataatgccaaggtgattcaacttgaaggtattgcaggaacatctgcggcacgcgaacgaggtgagggtttcaaacaagctattgatgctcataaattcaatgtgcttgccagtcagccagcagattttgatcgaacaaaaggtttgaatgtaacggaaaatttgttggcatctaaaggtgatgttcaagcaatttttgcgcaaaatgatgaaatggcattaggtgcattacgtgcggtgaaagccgcaaataaaaaagtccttatcgtaggttttgatggtaccgatgatggtgttaaagcggtaaaaagtggcaaaatggcggcaactatcgcacaacaacccgagcttattggttcattaggtgttgttaccgctgataaaatcttaaagggcgaaaaagttgaagcgaaaattccagtagatttgaaagtaataagtgaataa

SEQ ID NO: 22009 - DNA, 720 bp, Haemophilus influenzae
atgaatgatttaaccttatcgcctatcgccattatccacacaccttataaagaaaaattctccgtaccacgccaacctaatttagttgaagacggtgtaggcattgtagaactcttaccgccttataattcgcctgaagccgtgagaggattggaacaattcagtcatctttggttaatttttcagttcgaccaaatccaacaaggaaaatggcaacccaccgtacgcccacctcggttaggcggtaatcaacgagttggtgtatttgcttcacgcgcaacgcaccgcccaaatcctcttggtttatccaaagtcgaattacgtcaagtagaatgcatcaacggtaacatttttctccatttaggtgcggtggatttagtggatggcacgcccattttcgatatcaaaccctatattgcctatgcggatagtgagccaaatgcgcaatcgagctttgcccaagaaaaactaccagtaaaactgactgttgaatttaccgagcaagccaaaagtgcggtaaaaaaacgagaagaaaaacgaccgcacttaagtcgttttattcgccaagtgctagagcaagatcctcgcccagcctatcaacaaggtaaaccgagtgatcgtatttatggtatgagtttgtatgaatttaatgtgaaatggcgaattaaagcgggtacggtaaattgtgtagaagtgattgaaatagaaaaagacaaatag

SEQ ID NO: 22010 - DNA, 987 bp, Haemophilus influenzae
atgttacactttgctcatatttttcaaaataaggttcatactatgaatataacaaagccttttcctcttccaacaggatatttcggtattcctcttggtttagcagccttatctttagcttggtttcatttagaaaacttatttcctgctgcgcgaatggtaagtgatgttcttggcattgtagcaagtgcggtctggattttatttattttaatgtatgcgtataaacttcgttattactttgaggaagttcgtgcagagtatcatagcccagttcgtttttcctttattgcattgattcctattacaactatgttggtaggcgatattctttatcgttggaatcctttaattgctgaagttttaatttggattggaacgattggtcaattacttttctcaacattacgtgtcagtgaattatggcaaggtggtgtatttgagcaaaaatctactcatccttcgttttatttgcctgcggttgctgcaaatttcacaagtgcaagttcattagcattacttggctatcatgatttaggctacttattctttggcgcaggaatgattgcttggattatttttgaacctgtattattacaacatttacgtatttcatctcttgagccacaatttagagccaccatggggattgttttagcacctgcgtttgtgtgtgtatctgcttatttatcgatcaatcacggcgaggtggatacgttagctaaaatcctttggggatatggatttttgcaattatttttcttattgcgattattcccttggattgtggaaaaaggacttaacattggcttatgggcattctcattcggattagcgtctatggcaaacagtgctaccgctttctatcatggcaatgttttacaaggcgtgtctatttttgcctttgttttctcaaatgtaatgattggcttattggttttaatgacaatatataaattaactaaagggcagtttttcctaaaataa

SEQ ID NO: 22011 - DNA, 4248 bp, Haemophilus influenzae
gtgaaagacttagttaagtttttaaaagcacaatcaaaaaccagtgaagattttgatgtgattaaaattgggttagcttccccagatatgatccgttcttggtcatttggtgaagtgaagaaacctgaaaccattaactaccgtacgttcaaacctgaacgtgatggtcttttctgtgcgcgtatcttcgggcctgtaaaagattacgaatgtttatgtggtaaatataaacgtttaaaacaccgtggtgtgatttgtgaaaaatgtggtgttgaagtcactcaaactaaagttcgtcgtgaacgtatgggtcatattgaacttgcatcgccagttgcacatatttggttcttaaaatcattgccgtctcgtatcggtttacttttagatatgccattgcgcgacatcgaacgtgtactttattttgaaatgtacatcgtgaccgaaccaggtatgacggacttagagcgcggtcaattattaacagaagaacaataccttgacgctgaagatcgctggcaagatgaatttgaagcgaaaatgggtgccgaagcgattcaagatctcttaaaaggtatggatcttgaagctgaatgtgaaaaattacgtgaagaattacaagaaactaactctgaaactaaacgtaaaaaaatcactaaacgcttaaaattattagaagcatttgttcaatctggtaataaaccagaatggatggtgatgacggtattgccagttcttccaccagatttacgcccattagtaccacttgatggcggtcgttttgcgacttcagatctgaacgatttatatcgtcgtgtaatcaaccgtaacaatcgtttaaaacgtttattagatttaattgcgccagatattattgtgcgcaacgaaaaacgtatgttacaagaatctgttgatgccttattagataatggtcgccgcggtcgtgcaattacgggttctaaccgtcgtccattaaaatcattagcggatatgatcaaaggtaaacaaggtcgtttccgtcaaaacttattaggtaaacgtgttgattactctggtcgttctgtaatcactgttggcccatacttgcacttacaccaatgtggtttaccgaagaaaatggcattggaattattccgtccgtttatctatgcgaaattagaaagccgtggttatgctacgacaatcaaagcggctaagaaaatggttgagcgtgaagatgcgatcgtttgggatattcttgcagaagttattcgtgaacacccaattctattgaaccgtgcgccaacacttcaccgtttgggtatccaagcgtttgaaccgatcttaatcgaaggtaaagctattcaattacacccgctcgtttgtgcggcgttcaacgcagacttcgatggtgaccaaatggcggtacacgttccattaacccttgaagcgcaattagaagctcgtgcgttgatgatgtccaccaataacgtgctttctccagcaaacggtgatccgattatcgttccatcacaagacgtggtattaggtctttactatatgacccgcgaaaaagtgaacggtaaaggcgaaggtatgttattgcaagatcctcgcgaagctgaaaaagcatatcgtacaggcgaagcggaattacattctcgcgtgaaagtgcgtattactgaatatgtgaaaaatgaagcgggcgaatttgatgcgaaaaccacgctgactgatacaactatcggtcgtgcaatcttatggatgatcgcgccgaaaggcatgccttattcattgttcaaccaaacattaggtaaaaaagctatttctaaactgattaacgaagcatatcgtcgtttaggtttaaaagaagcggtaatgtttgctgaccaaattatgtataccggttttgcgtatgcggcacgttctggttcatcagttggtattgatgatatggaaattccagcgaagaaatacgaaattatttctgcagcggaagaagaagtagctgagatccaagaacaattccaatcaggtcttgtgacggcaggcgaacgctataataaagtaatcgatatttgggctgccgcgaatgagcgcgtagcgaaagcgatgatggaaaacttatctcaagaagaagtcatcaatcgtgaaggtaatcctgaaaaacaagcgtcctttaacagtatctttatgatggctgattctggtgcgcgtggttctgcagctcagattcgtcagttagcaggtatgcgtggtttgatggctcgtccagatggctcgatcattgaaaccccaattacagcaaacttccgtgaaggtttgaacgtattacagtactttatttcaacccacggtgctcgtaaaggtttggcggataccgcattaaaaacagcgaactcaggttacttaactcgtcgtttagttgatgtggcacaagacttagtgattgtagaagatgactgtggtacgcacgaaggcttagtcatgaccccattaattgaaggtggagatgaaaaagtgccacttcgtgaattagtattaggtcgtgttgctgcagaagatattttaaaaccaggtacagaagaagtattaattccgcgtaacaccttattagatgaaaaactctgtgatgtgttggatgcaaactctgtagatagcgtaaaagtacgttctgttgtaacttgtgatactgattttggtgtatgtgcgaaatgttatggacgtgatcttgctcgtggtcatttaatcaaccaaggcgaagcggtgggcgttattgccgctcaatctatcggtgagccgggtacacagctaacaatgcgtacgttccatattggtggtgcggcatctgcggcagcgaaagaatctagtgtgcaagttaaaaacactggtacagtgcatttaatgaatgcaaaattcgtgactaacgatgaaagcaaactagtattaacttctcgtaacacggaattaactattactgatgcatttggtcgtactaaagaacattataaagtgccttatggtgcggtattaagcaaaggtgacggtcaagaagtcactgcaggcgaaactatcgcaaattgggatccacatacaatgccagttgtctctgaagtatctggttttgtgaaatttgtagatattattgatggtttaactgtgacgcgtcaaacagatgaattaacaggtttatcatcaatcgtggttcaagatgtgggtgaacgtgcaactgcgggtaaagatttacgtccaactattaaattagttgatgcaaatggcaacgatattttcttacctgaaactgatgttcttgcacaatacttcttacctggtaaagcaatcgtaagtttagacgatggcacagcagtaaaagtgggtgaaccattagcacgtattccgcaagaatccgtgggtactaaagatattactggtggtctaccacgcgttgcggatttatttgaagcacgtaaaccaaaagaacccgctatcttggctgaaatttctggtatcgtgtctttcggtaaagaaaccaaaggtaaacgccgtttattaattactcctgcggaaggcgaaacttacgaagaaatgattccaaaatggcgtcagctcaacgtatttgaaggcgaaatggtacaacgtggcgatgtaatttctgatggtgctgaaacaccacacgacattttacgtttacgtggcgtgcgtgcagtaactgaatacatcgtgaacgaagtgcaagatgtttaccgcttacaaggggtaaaaatcaacgataaacatatcgaagtaattgttcgccaaatgttacgtaaagcggtaattactaaagcttacgactcagaattccttgagggagaacaagtcgaagtggctcgcgtgaaaattgttaatcgccaacgtgaagcagaaggtaaaccaccagttgaatttgaacgtgaattattgggtatcaccaaagcgtctcttgcgactgaatccttcatctctgccgcatcgttccaagaaactactcgtgttcttaccgaagcagcagtggcaggtaaacgtgatgaattacgtggcttgaaagagaacgtaatagtaggtcgattaattcctgcgggtacaggttttgcgtatcatcaaaatcgtcataaacatcgcttagttgatgatgtcgtagcgaaattatctgaagaagatgaagccgctatcgctgatgagtttgtcataacggcagatgatgcaacgcaaaatcttgcaacattgttaaattctgaaatagaagattaa

SEQ ID NO: 22012 - DNA, 4032 bp, Haemophilus influenzae
atgggttactcctattctgaaaaaaaacgaattcgtaaagatttcggtaaacgtccgcaagttttaaatgttccttatttattaaccattcagttggattcttttgataaatttattcaaaaagatcctgaaggtcagcaaggtttagaagcggcattccgttctgtatttcctattgtaagcaataatggctatacagaattacaatatgtagattatcgtttagaagagccagagtttgatgtacgtgagtgccaaattcgtggctcaacttatgcagcaggcttacgtgtaaaattacgtttagtgagctacgataaagaatcttcttcacgcgcagttaaagatattaaagaaaatgaagtttatatgggggaaatcccattaatgactgataacggtacttttgtaattaatggtaccgagcgtgttatcgtttcacaattacaccgtagtccaggtgtattctttgattctgacaaaggtaaaacccattcttcaggtaaagtgctttataacgcacgcattattccttaccgtggttcttggttagattttgaattcgatccaaaagataacttatttgcgcgcattgaccgtcgccgtaaattaccggcaacaatcattcttcgtgcattaggctacaccactgaagaaatcttaaacttattctttgataaaattacctttgaaatcgctggcgataaattgttaatgactttagtgccagaacgtttacgtggtgaaacggcttcttttgatattgaagcaaatggcaaagtgtatgttgaacgtggtcgtcgcatcactgctcgtcacattaaagcattagaaaaagataatatctcacaagtggttgtgccttctgaatatattttaggtaaagttgcgtcgaaagattatgttgatttagagtctggcgaaattatttgtcctgcaaatggcgaaatttcgttagaaaccctcgcaaaattagcacaagctggttacaccacgatcgaaactttatttactaatgatttagattacggtccatatatttctgaaacgctacgtgtcgatccaacttatgacaaaactagtgcgctttacgaaatttatcgtatgatgcgtccgggcgagccaccaacaccagaatcttcagaagcgttattcaataatttattcttctctgcagaacgttatgatttatctacagtaggtcgtatgaagttcaaccgttctttagcttttccagaaggggaaggtgcgggtattttaagcaatgaagatattattgcggtaatgcgtaaattgatcgacatccgtaatggtcgtggcgaagtagacgatattgaccatttgggtaaccgtcgtatccgtagcgtgggcgaaatggctgaaaaccaattccgtatcggtttagtgcgtgttgaaagagcggtcaaagaacgtctatctttaggcgatttagatgcgatcacgccacaagacttaattaacccgaaaccgatttctgcggcagtaaaagaattctttggttcttcacagctttcgcaatttatggatcaaaacaacccattgtcagaagtgacacacaaacgtcgtatttctgcattaggtccaggcggtttaacgcgtgagcgtgcaggctttgaagtgcgtgacgtacataatactcactatggtcgtttatgtccgattgaaacccctgaaggtccaaacatcggtttgatcaactcactttctgcttttgcacgtactaatgattatggtttcttagaaacaccatatcgtaaagtggttgatggtcaagttactgaagaaattgaatacttatctgtaattgatgaagcaaactacatcattgcacaggcaaactcaaacttagacgaaaataaccgttttactgatgctttcgttactgctcgtggtgaacgtggtgaatctggtttatataaacctgaagatattcactatatggatgtttcgacacaacaagtggtatctgttgcggctgcattaattccattccttgagcatgacgatgcgaaccgtgcgttgatgggtgcgaacatgcaacgtcaagcagttccaacattacgtgcggataaaccattagttggtacaggtatggaaaaaccaatcgcacttgactcaggtgttgcggttgttgcaaaacgtggtggtaccgttcagtacgttgatgcgtctcgtattgtgattaaagtaaatgaagatgaaaccattgcaggtgaagctggtattgatatttataatttaattaaatacacccgctctaaccaaaatacttgtattaaccaaattccttgtgtgaatttaggcgatccaattaatcgtggcgaagtattagcagatggtccttcaactgatttaggggaacttgcattaggtcaaaatattcgcgtagcgttcatgccttggaacggctataactttgaagactcaatgttagtttctgaacgtgttgttcaacaagaccgtttcactaccatccatattcaagaattatcttgtgttgcgcgtgatactaagttaggtgcagaagaaattactgcggatattccaaacgtaggtgaatcagcgttaagcaaacttgatgaatctggtatcgtttatgtcggcgctgaggttaaaggtggcgacatcttagtaggtaaagtaacccctaaaggcgaaactcaattaaccccagaagaaaaattgttacgtgcaatctttggggaaaaagcttccgatgtgaaagattcttcattacgcgtgccaaatggtacatcaggtacggttattgatgttcaagtcttcactcgtgacggcgtagaaaaagataaacgtgcattagaaatcgaagaaatgcaacttcgtgaagcgaaaaaagatttaactgaagagttagagattttagaagctggtttatttgctcgtgtgcgtaatcttcttatttctagtggtgcggatgcggcgcaattagataaattagatcgcactaaatggttagaacaaaccattgcagatgaagaaaaacaaaaccaattagaacagcttgctgagcaatacgaagaacttcgtaaagagtttgaacataaacttgaagtgaaacgtaagaaaatcattaaaggcgatgatcttgcaccgggcgtattaaaagttgtgaaagtttaccttgcagtgaaacgtcaaatccagccgggggataaaatggcgggtcgtcacggtaacaaaggtgttatctcgaaaattaacccagttgaagatatgccatacgatgaaaatggtcagccagttgaaatcgtattaaacccactgggcgtaccgtctcgtatgaacatcggtcagatccttgaaactcacttaggtttagcggcaaaaggtattggtgatcaaatcaatgcaatgcttaaacaaaaacaagaagtggaaaaattacgtagctatatccaaaaagcatacgatttattaggtaatggttcacaaaaagtggatttaagcacctttactgatgaagaagtattgcgtttagcgggaaatttacgtaaaggcttaccagttgcaacgccagtgttcgatggtgcagacgaagcggaaatcaaagagctattaaaactgggtggattaccaacttcaggtcaaataaccctttacgatggtcgtactggcgagaaatttgaacgtccagtaaccgtgggttatatgtacatgctaaaattgaaccacttagttgatgataaaatgcacgctcgttcaacaggttcttatagccttgttacacaacagccattgggtggtaaggcacaatttggtggtcagcgtttcggtgagatggaggtatgggcacttgaagcatatggtgcagcctacaccttacaagaaatgctaactgtgaaatccgatgatgtgaatggtcgtacgaagatgtataaaaatatcgtaagtggcaaccaacatatggagccaggcacaccggaatctttcaacgtaattatgaaagaaatccgctcacttggtttaaatatcgagttagacgaagagtaa

SEQ ID NO: 22013 - DNA, 690 bp, Haemophilus influenzae
atggctaaattgactaaaaaaatgaaagcaatcaaagctggcgtagattctactaaagcatacgaaattaacgaagcgattgcggtattaaaacaattcgcaacggctaaattcgttgaaagtgttgatgttgcagtaaacttaggtatcgatcctcgtaaatctgaccaaaacgttcgtggtgcaactgtattaccacacggtactggtcgtgaagtacgtgtagctgtgttcactcaaggtgctaacgcagatgcagctaaagaagctggtgctgatttagtaggtatggaagatttagcagagcaaatcaaaaaaggcgaaatgaactttgatgttgttatcgcttctcctgatgcaatgcgtgttgttggtcaattaggtcaagtattaggcccacgtggtttaatgccaaaccctaaagttggtactgtaacaccaaacgttgctgaagcagttaaaaatgctaaatctggtcagatccgttatcgtaatgataaaaacggtatcatccacaccactatcggtaaagcaaacttctctgaagttcaattaaaagaaaatcttcaagcattattggctgctttaaataaagcaaaaccaactactgctaaaggtattttcatcaagaaagtaagcatctctaccactatgggtgcaggtgttgctgttgatcaagcttctttataa

SEQ ID NO: 22014 - DNA, 429 bp, Haemophilus influenzae
atggcaaaaaaagtccaagcctatgttaagttgcaagttgcagctggtatggctaacccatcaccaccagttggtcctgcattaggtcagcaaggtgtgaacattatggaattctgtaaagcattcaacgctcgtactgagagcttagaaaaaggtttaccaattccagttgttatcactgtatatgcagaccgttcatttactttcgtcactaaaactccaccagcagcagtattattgaaaaaagctgcaggtatcaaatctggttctggtaaaccgaacaaagataaagtgggtaaagtaactttagatcaagttcgtcaaatcgctgaaactaaagcagcagatatgactggtgcgactatcgaaacgaaaatgaaatcaatcgctggtactgctcgttcaatgggcttagtggtggaggaataa

SEQ ID NO: 22015 - DNA, 1545 bp, Haemophilus influenzae
atgttagcttcacttcaagatattctcgatacggttaaagccaataatctaacttatcatcaaaaattaatgacattaggcaatattgccgagcgtttatttgatcctcgcgatttgcttggttataccgatgaagaatggggctttttacagaatcaaatgatttgtgatttatgtgaaggctacgcgatttatcgtcctcgttatatcctgcctgattacaatgtgtatatccaaaaaggctgcgaatttttagagttgcctcctccaaaagatcttgatgaggcacttgatggattattgattctttactcccacgtgccatccattacgacttatcctgtttatattgggcgtcttgatgtgttgctcgaaccgttcattactgatgaagaaaaagattacataaaaattaaacgtttcttaaatcatattgataaaactgtgccagattcattctgtcatgccaatattgggccttatgatacgaaagcaggtcgcttgattttacgcgccgtgattgatcttgaagcaccaacaccgaatatgactattcgttatgacaaatcgaaaacaagccgtgagtttgctgaacttgcagcaaaagcctgtttgttggtttctaaaccatcttttgcaaacgatgcttactatatttccgatctaggcgaagaatacggcgtagcaagttgctataacgcactgcctgaatgtggcggtgcctacactttaacgcgtttacgtctagggacaattgctcgcacctgtaaaagtgcggatgaaatgctgaatgaattattaccgcgtgtggcgaaatgtgctctttcaaccatggataaacgccacaaatttgtagtggaagaaagtaatttctttaacagttcattcctcgaaaaagagggctttatcaaacgcactaattttacaggaatgtttgcgattgtgggcttggctgatgccacaaatcacttattgcaatgtgaaggcttaaatgaaacctttggtaagagcgttcgtggcgatgaaattgcgacagcgattatggataaattgaaagaaattactgatgcgcacgaaggagtttatgccgaacgtactggcaatcgttatttattacacgcacaagtgggcgcaagtaaccacgaagaagacaaacgcaacgcaccggctcaccgtattcgtgtaggtgaagaaccaacgctacttgcacatttgaaacaatctgcacctttccataaatatttcccatctggtacaggggatttatttgcctttgatcaaacctatgtagatcactgcgatgcggtggtggatattattgatggtgcattttccttaggctatcgctacattaccacctatttgaaaaacacggatttaattcgtgttacaggttatctagtgaagaaaagcgaagttgaaaaataccgtaaaggcgaagtcgcattacgcgatacaacttggtatggctcgggtacggatgaatgtgccaatgtgtttgatcgccaattacgcgatgaaaaagatgtgatcgctgaaaaataa

SEQ ID NO: 22016 - DNA, 1080 bp, Haemophilus influenzae
atggctaaattattagatattgtgaaacccggtgttgtaacaggcgaagatgtgcaaaaagtttttgcttatgctaaagagcataactttgctattcctgccgtaaactgtgtgggttcagactccgttaatgccgtgttagaaactgctgcacgcgtaaaagcaccagtgattatccaattttcaaatggtggcgcagcgttctacgcaggtaaaggtatcaaaccaacgagtggtactcgtcctgatgtgcttggtgcgattgctggagcgaaacaggttcatactttagcgaaagaatacggtgtgcctgttattcttcatactgatcacgcagcgaaaaaattattaccttggatcgacggtttattagatgcaggcgaaaaacattttgccgaaacgggtcgtccacttttctcttcacatatgatcgatttatctgaagagtcaatggaagaaaatatggcaatctgtcgtgaatacctcgctcgtatggataaaatggggatgacccttgaaatcgaaattggcattactggtggcgaagaagacggcgttgataactctgatgttgatgaatcacgtttatatacacaaccttctgatgtgctttatgtttacgatcaattgcatccagtaagccctaactttaccgttgctgctgcattcggtaacgtacacggtgtttacaaaccaggtaatgtaaaattaaaaccatctattttaggtgaatcacaagagttcgtttctaaagaacgcaatcttcctgcaaaaccaattaatttcgtattccacggtggttcaggttctagccgcgaagaaatccgcgaagcaattggctacggtgcaatcaaaatgaacattgatactgatacgcaatgggcatcttggaatggtattttgaatttctataaagcaaatgaagcatatcttcaaggtcaattaggtaaccctgaaggcccagatgcaccaaacaaaaaatactacgacccacgtgtttggttacgtaaaatggaagaatctatgtctaaacgcttagagcaatctttcgaagacttaaattgtgttgatgttttataa

SEQ ID NO: 22017 - DNA, 1161 bp, Haemophilus influenzae
atgtcagtaatcaaaatgaccgatttagatttagccggtaaacgtgtatttatccgtgcagatcttaatgtgccagtaaaagatggcaaagtgacctcagatgcgcgtattcgtgcgaccattcctactttaaaattagccttagaaaaaggtgcgaaagtgatggtaacttctcacttaggtcgtccaactgaaggagaattcaaaccagaagattctttacaaccagttgttgattacttaaaaaacgcaggctttaatgtgcgtttagaacaagattatttaaatggtgtggatgttaaagatggcgaaatcgttgttttagaaaacgtacgcgtaaacaaaggcgaaaagaaaaatgatccagaattaggtaaaaaatatgccgcactttgcgacgtatttgtaatggatgcctttggtacagcgcaccgcgcgcaagcatcaacttatggcgttgcagaatttgcgccgatcgcttgtgcaggcccattattagccgctgagttagatgcattaggtaaagcattaaaagaacctgctcgtccaatggtggctattgttggtggttctaaagtttccactaaattagaagtattaaattctctttcaaaaatcgctgaccaaattattgtgggcggtggcattgcgaatactttcatcgcggcagctggtcacaatgtaggtaaatctttatatgaagctgatttaattccagttgcgaaagaattagccgcaaatacagatattccagttccagttgatgtgcgtgtaggtttagagttctctgaaacggcagctgcaacagaaaaagtggtaaatgaagtgaaagatgatgaatctatttttgatattggcgataaatcagcagaacaattggctgaaattatcaaaaatgcaaaaaccgttttatggaatggcccagttggcgtgtttgagttccctcacttccgtaaagggactgaaatcatttctcacgccattgcaaacagcgatgcattctctatcgctggtggcggcgataccttagcggctatcgatttatttggtattgctgataagatttcttacatttcaacgggtggtggtgcattcttagagtttgtagaaggcaaagtattacctgcagtagaaattcttgaaaaacgtgcgaaaaactaa

SEQ ID NO: 22018 - DNA, 261 bp, Haemophilus influenzae
atggcattactcatcactagcaaatgtaccaactgcgatatgtgcttgcctgaatgcccaaacgaagccatttccattggcgatgagatttatgtgatcgatcctatactttgcacggaatgtgtcggccattacgacaccccaacctgccaaaaagtttgcccaatcactaactgtattaagcccgatcctgaacatcaagaaaccgaagaacagctttgggaacgctttgtgatgattcatcattcggataaattgtaa

SEQ ID NO: 22019 - DNA, 582 bp, Haemophilus influenzae
atggcgaaactctacttctattactccacaatgaacgctggaaaatcaacgacgttgctacaatcttcctataactatcgtgagcgtgatatgaacacattagtttatacggctgcgattgatgatcgttttggcgtgggaaaagtcacatcgcgtattggcatttcgcaagatgcctttttatttcgctcggaaaccaatttgtttgatgaaattaatgagcatttaaaaaaagaaaaagtgcattgcgtgttggtggatgaagctcaatttcttagcaaacaacaagtttaccagttgagtgatgttgttgataaactcaaaatccctgtgctttgttatggcttgcgtacagatttccaagcggaactttttgaaggaagtaaatatttactggcttgggcggatcaactcgaagaattaaaaacaatttgttattgtggccgcaaggctaattttgttttgcgtttaaatgatcagggcgaggtcattaaagaaggtgcacaaattcaaattggaggcaatgattcttatctttctgtttgccgtttacactataaagaaaagtgcggtcaaatttaa

SEQ ID NO: 22020 - DNA, 1029 bp, Haemophilus influenzae
atgaaaatcttaggcattgaaacttcctgtgatgaaacgggcgtggcgatttatgatgaagaaaaaggattaattgctaatcaactttatactcaaattgccctgcatgcagattatggtggtgtggttcctgaattagcatcacgtgatcatattcggaaaacagcacctcttattaaagcggcattagaggaagccaatttaaccgcgagcgatattgatggtattgcttatacgagtggccctgggcttgttggcgcattgcttgtcggtgctacgattgcacgttctttagcctatgcttggaatgttcctgcgattggtgttcatcatatggaagggcatttacttgcgccaatgcttgatgacaattcaccgcactttccttttgttgctctgttggtatcgggtggccacactcaattagtgcgtgtcgatggtgtaggaaaatatgaagtgataggagaatctattgatgatgctgctggcgaagcctttgataaaacagcaaaattacttggactagattatccaggtggcgcggcactttctcgtttagcggaaaaaggtacgccaaatcgtttcacatttccacgtccaatgacagatcgtgcaggccttgattttagtttttctggtttaaaaacatttgccgcaaatacagttaatcaagcaattaaaaacgagggcgaactgatagagcaaactaaagcagatattgcttatgctttccaagatgcggtggtggatactcttgccattaaatgtaagcgtgcattgaaagaaacaggctataaacgtttagtgattgcgggaggggtgagcgcaaataaaaaactccgagaaacgcttgcgcacttaatgcaaaatttaggtggcgaagtgttttatcctcaacctcaattttgtacagataatggtgcgatgattgcttacacaggttttttacgtttaaaacaaggtcagcatagcgatctggctattgatgttaaacctcgttgggcaatggcggaattaccggcaatttag

SEQ ID NO: 22021 - DNA, 216 bp, Haemophilus influenzae
atgcctgtaattaaagtacgtgaaaacgaatcatttgacgtagctttacgtcgtttcaaacgctcttgcgaaaaagcgggaatcttagctgaagtacgcgctcgcgaattttacgaaaaaccaactacaattcgtaaacgtgaaaatgcaacacttgcaaaacgtcacgcaaaacgcaacgctcgcgaaaacgcgcgcaatacccgtttatactaa

SEQ ID NO: 22022 - DNA, 1782 bp, Haemophilus influenzae
atgaaaggttctattcctcgcccctttattgatgatttgctgacaaagtccgatattgtcgatgtgattaacacgcgcgtaaaactaaaaaaagctggccgcgattatcaagcctgctgccctttccatcacgaaaaaacaccatccttcacagttagccaaaagaaacagttttatcattgctttggttgtggcgcacatggtaatgcgatttcctttttaatggattatgacaaacttgaatttatagaggcgattgaagaacttgcagcaatggcagggcttgaaataccttacgaaaaacgcgttaatcacagcggaaaacctcaagctaattaccaaaccaaacgaaatctctatgaattaatgcaagagattgccacgttttatcaaaaccaattaccattaaatactcaagcacaagaatatttacaacaacgtgggctttcacctgaaattattgagcgtttccaaattgggtttgtgccgaatgcaatggatactgtactgcgtaaatttggtgttaatcgtgaagaacaacaaaaactcattgagttaggcatgctttctcgaaatgatcgtggcaatatttacgataaattccgaaatcgcatcatgtttccaatccgcgataaacgtggtcgcacagtggcttttggtgggcgtgtattaacagatgaaaaaccgaaatatctgaattcgccagaaaccattacttatcataaaggtaaggagctttatggtttgtatgaagccttgcaaaccaacgatgaacccaaacaattacttgttgttgaaggttatatggatgtagtggcattagcacaatttggcgtggattatgcggtcgcttctttagggacatccacgacatcagaacaaattcaacttattttgcgttcgaccgaacaggttgtttgttgttacgatggtgaccgtgcagggcgtgatgctgcttggcgcgcactagaaaatgcgttgccctatttagaagatggcagacaactcaaatttattttcttgccagatggagaagaacctgatacttacattcgtcaatacggcaaagaaaaatttgaagaatacatcgaaagtgcgcaatctttaagcgagtttatgtttgcacatttaagtcctcaggttgatttttccactaaagaagggcgtggaaaattagttgcgctagctgcgccgttaattcaccaaattccaggagaaatgcttcgcttatcgctacgcaatatgcttgctcaaaaacttgggatttttgatcaaactcagctggaaaatcttattcccaaaaaattagaacaagccaatacacaacaaaaagtcactcataataagatcaagaagacaccgatgcgaatggtcatttcattgcttatgcaaaatcctgagttagtaaaacgtatgtctgaaagcggcgtgcaagcattacgtgcggaagcagggtttgaaattctggaaaaattgaccgcactttgtcgccaacgagagggcattactacggggcaaattttggaatacttccgcaatacatcttacagtaatccccttgaaatactggcgacttgggatcatttattggacgaatccgacataatcaacgcattttctcaaaattaccgtcgcttaaatattcaagctattgagcgcgatattgaaatgcttattgctaaagaacgaacagagggtctcactaatgaagaaaaaacggtacttgtacatcttttagctggtaaagaacagcagaaaaaacagttagtgaatccgctataa

SEQ ID NO: 22023 - DNA, 1890 bp, Haemophilus influenzae
atggaaaaaaatcaacaatctacggctgaacaatattcagaacaaattgagcaattgatggagctaggtcgtacacaagggtatttaacttttgctgaaatcaatgacttattgcccgaagatgctattgatcctgaatattacgacaaattgctacaaacgttgcaaaatgatgctggtatccctgtattagatgaagcaccagaaagcgatgatatgatgttgagtgataccatccctgatgaagatgcagtggaagaagcaactcaaattctttcaaatgtagaatctgaaatcggtcgaacaacggatcccgtacgcatgtatatgcgcgaaatgggaacggtggatcttcttactcgtgaagatgaaattagcattgcaaaacgtattgaaggagggattgatgaagttcaaacctctatctcagcctatcctgaagcattaaatggattactaaaaaattatgatgatgtagaaaaaggtaatttccgtttgaccgatttaattacgggttttgttgatccaaatgccgaaatagaagaacacaacggacttgatgaagacttttctgacgaagatgatgaagaagaatctagtaatgcagatgtggaagacaatgaagatgaagaagacaatgaatcagaatctacatcagattcaagcgactctgataacagtattgatcctgaagttgctcgcgaaaaatttcagcaattaagagaacagcactctaaaacccttgctgttattgaaaaacacggtcgctctggaaaacgtgcccaagatcaaattgcactacttggcgaaatttttaaacaattccgtttagtaccaaaacaatttgatttactcgttctatcaatgaaagaaatgatgaaacgtgtgcgctaccaagaacgtcagctacaaaaaatattagtggatatagcaggaatgccaaaggatgattttgaaaaaattattaccactaatggcagtaacagtgaatgggtagcaaaagcattaaaatctagcaaaccttgggctaaacgtttaattaaatatgaagatcgtatttatgaagccttaaacaatctagcgataacagaagaaaatactaaacttaccattactcaaatgcgtgacatttgcgatgcagtcgcacgaggcgaacaaaaagcacgtcgagctaaaaaagaaatggttgaagctaacttgcgtttagtaatttccatcgcgaaaaaatacacaaatcgaggtttacaattcttagatttaattcaagaagggaatatcggtttaatgaaagcggtagataaatttgaatatcgacgtggctacaaattctctacatatgctacttggtggattcgtcaagcaatcactcgctctattgcggatcaagcgcgtacaatccgtattcctgtgcatatgattgaaacaatcaataaacttaatcgtatttctcgccagttgttacaagaaatgggacgtgaagcaacaccagaagaattggcagaacgtatgggaatgccagaagataaaatccgtaaagtactgaaaattgcaaaagagccgatttctatggaaacacctattggcgatgacgatgattcgcatttaggggattttattgaagattcaaccttagaacttcctcttgattctgccacagcacaaagtttaaaagttgcaactcacgaagtgctagaaggcttgacgccacgtgaagcaaaagtattacgtatgcgttttggcattgatatgaataccgaccatacacttgaagaagtgggtaaacaattcgatgtaacacgcgaacgtattcgtcaaattgaagcaaaagcattacgtaaattacgtcatcctagccgttctgaaacactgagaagttttttagatgaatag

SEQ ID NO: 22024 - DNA, 678 bp, Haemophilus influenzae
atgagcaacacagttgctacgatgataaacaaaaggaacattatgcgtaactacattaaaattggcgtggctggccctgttggggcgggtaaaacggcgttaattgaaaaactcactcgtgaaatagcgtcaaaatatagcgtagcagtcattactaacgatatttacacccaagaagatgcggaatttttaacgaaaaatagtttgcttccaccagagcgaattatgggcgtggaaacgggcggttgcccgcacacagcaattcgtgaagatgcctcgatgaatttagaagccgtggacgaaatggtgactcgtttccctgatgtggaaatcgtgttcattgaatcaggtggcgataacctttcagcgacttttagccctgatttggcagacgtgacgatttttgtgatcgatgtggctcaaggggaaaaaatccctcgtaaaggtgggccaggtatcactcgttcagatttacttgtgatcaacaaaactgatcttgctccattcgttggtgctgacttaagcgtcatggaacgtgatgctcgtcgtatgcgtaacggtcagccgtttattttcaccaacctgatgaaaaaagaaaatctggatggcgtgatcggttggatcgaaaaatatgcgttgttgaagaatgtggaagaacctgcatctttggttcgttaa

SEQ ID NO: 22025 - DNA, 585 bp, Haemophilus influenzae
gtggtagaaagcaaagcgaccctagaagaatatgtgcaaacccagcttttacaaaactggatttacaacgacggggcgtatctttctcttgcctttgatgcaatgtgtgaggggaattttgaccgcttgtgcgaactggattggcaactttccgccaccaaagtggcacgcgaaagtcgtgaagggagtttcaaactcggcgtacgattgctgaaaatttttattcgctatgaaacacatacgttgctcacagcttaccagcaagcgattgcagaaaaacgagtacagggctatttcccaatagtgtttgcgatggtcgctcaagccatgggtttaagcaaagcagatacgctctatgcgttctactacaacgcagcagttggtgtaatcactaacggcgtgaagctaattcctctcagccaaatggatggacaagatattttgtttgacttgcgaggatcgctcgtacaagcggtagaattaagccttgaccctgacgaagaatggcttggtgcggcaacgctggcgaatgatattcgggctatgcaacacgaagtgctttatacgcgactttatatgtcgtaa

SEQ ID NO: 22026 - DNA, 1719 bp, Haemophilus influenzae
atggcattaacaatttcaagagcgcaatatgtagcaacttatggtccaacagttggcgataaagtccgtttaggcgataccaatttatgggcaaccattgaacaagatttattgaccaaaggtgatgagtgtaaatttggtggcggtaaaagcgtgcgtgatggtatggctcaaagcggtacggcaactcgcgacaatccgaatgtattggattttgtgattaccaacgtgatgatcattgatgctaaattaggcattatcaaagccgatattggtattcgtgatgggcgtattgtgggtattggacaagcaggtaaccctgacaccatggataacgtcacaccaaatatgattatcggtgcaagcacggaagttcataacggtgcacatttaattgcaaccgctggtggtatcgatacccacattcactttatttgtccacaacaagcacaacatgcaattgaaagtggcgttaccacgttaattggtggtggaactggccctgctgatggtacacacgcaaccacttgtacccctggcgcatggtatatggaacgtatgtttcaagcggcagaagccttgccggtaaacgtcggattttttggtaaaggcaactgttcaaccctagatcctctgcgtgagcaaattgaagcgggtgcattaggtttaaaaatccacgaagactggggtgcaacgcctgccgtgattgattctgccttaaaagtagcagatgaaatggatattcaagtggccattcacacagacacgctaaatgaaagtggctttttggaagacacgatgaaagcgattgatggacgagtcattcatactttccatacggagggcgcaggtggtggtcatgcacctgacatcattaaagcagcgatgtattcaaacgtattacctgcttcaaccaacccgactcgtccgtttaccaaaaacaccattgatgaacatttggatatgttgatggtttgccatcacttagataaacgcgtgccggaagacgtagcttttgccgatagccgtatccgccctgaaaccattgcagcagaagatattttgcatgatatgggcgtcttctccattatgagttcagactctcaagcgatgggacgtattggcgaagtcgttattcgtacatggcaaactgcagataagatgaaaatgcaacgtggtgagctaggtaatgaaggaaacgataacttccgtattaaacgatatatcgcgaaatacaccatcaacccagcaattgcacatggtattgcggagcatattggctcgttagaagtgggtaaaatcgcagatatcgtgttatggaaaccgatgttctttggcgtaaaacctgaagtggtgattaaaaaaggctttattagctatgcgaaaatgggcgatccaaatgcctcaattccaacaccgcaacctgtattctaccgtccaatgtacggtgcacaaggcttagcaaccgcacaaacagcagtattctttgtttcacaagccgctgaaaaagctgatattcgtgcgaagttcggtttacacaaagaaaccattgctgtgaaaggctgccgcaacgtaggtaaaaaagatctggttcataatgatgtaacaccaaacattactgttgatgctgaacgttatgaagttcgagtggacggagagttaattacctgtgaaccagtggatagcgtaccattgggtcagcgatatttcctattctaa

SEQ ID NO: 22027 - DNA, 303 bp, Haemophilus influenzae
atgcacttaacttccagagaacaagaaaaactgatgcttttcctcgcgggcgaacttgcggcaaaacgcaaagcacgcggcgttaaattaaactatccagaaactattgcttatattgctagtcatttacaagaggcagcaagagaaggaatgagtgtagcggaagtcatgcaatatggcgcaacacttttaaccgttgatgatgtcatggaaggtgtggcggaaatggttcatgaagtccagattgaagctactttccccgatggcacgaaacttgttaccgtgcataatccaatcagataa

SEQ ID NO: 22028 - DNA, 1647 bp, Haemophilus influenzae
atggcagcaaaagacgtaaaatttggtaatgacgcacgcgtaaaaatgcttaaaggcgtgaatgtattagcggatgcagtaaaagtaacccttggcccgaaaggtcgtcatgtaattttagataaatcatttggcgcaccaactatcactaaagacggtgtgtctgttgctcgtgaaatcgaattagaagataaattcgaaaacatgggggcacaaatggtgaaagaagtggcatctaaagcaaatgatgctgcaggtgacggtacaactactgcaactgtacttgcgcaagctatcgtaaatgaaggcttgaaagcagtagctgcaggtatgaatccaatggatttaaaacgtggtattgataaagcagtaagtgcggttgtttctgaacttaaaaatttatctaaaccttgtgaaacagcaaaagaaattgaacaagtagggactatttctgcaaactctgacagcattgtgggtcaattaatctcacaagcaatggaaaaagtgggcaaggaaggtgtaattactgttgaagatggtacgggtcttgaagatgaattagatgtggttgaaggcatgcaattcgaccgtggttacctttctccatatttcatcaacaaaccagaaactgcaaccgttgaattagataatccatatcttcttcttgtagataaaaaaatctctaacattcgtgaattacttcccgtgttagaaggcgttgcgaaagcaggtaaaccgttattaatcatcgctgaagacgtggaaggcgaagcgcttgcaaccttagtggtaaacactatgcgcggtatcgtgaaagttgcagccgtgaaagcaccaggttttggtgatcgtcgtaaagcgatgttacaagatattgcaattttaacagcgggtacagtgatttctgaagaaattggtatggagcttgaaaaagcaacattggaagatttaggtcaagcaaaacgtgttgttatcaataaagataacacaaccattattgatggtatcggcgatgaagcacaaatcaaaggtcgtgtggctcaaattcgtcagcaaatcgaagaatcaacttctgactacgacaaagaaaaactccaagaacgcgtggctaaattagcaggcggtgtggcagtaatcaaagtgggcgcagcaactgaagttgaaatgaaagagaaaaaagatcgtgtagatgatgcattacatgcaactcgtgcagcggttgaagaaggtatcgttgctggtggtggcgttgcattagttcgcgcagcagcgaaagttgcagcaagcctaaaaggtgacaacgaagaacaaaatgtgggtatcaaacttgcattacgtgctatggaagcgcctttacgtcaaatcgtcactaacgcaggtgaagaagcttcagttgtggcaagtgcggttaaaaatggcgaaggaaactttggttataatgcaggaacagaacagtacggcgatatgatcgaaatgggtatcttagatccaactaaagtcactcgttctgcattgcaattcgcagcttctgtagcaggcttaatgattaccactgaatgtatggtaactgatcttccaaaagatgataaagccgatttaggtgctgctggaatgggcggtatgggtggaatgggcggaatgatgtaa

SEQ ID NO: 22029 - DNA, 450 bp, Haemophilus influenzae
atgcaagtaattcttttagataaaattgttcacttaggtcaagtgggcgatcaagtaaatgttaaatcaggttttgcacgtaacttcttaatcccacaaggtaaagctgttatggcaactaaagctaacattgaacactttgaagcacgtcgtgcagaattagaagcgacagcagcagcaaatcttgcagcagctcaagctcgtgcagcagaagttactgcattaggttctgtgactatcgcatctaaagcaggtgatgaaggtcgtttattcggcgcaatcactactcgtgatgtggcagaggcagtaactgcagcaggcgttaaaattgcgaaaagtgaagttcgtttaccaaacggtccaatccgtactcttggtgaccacgatgttcgtttccaacttcacggtgaagtatttgcggcattagatgtaatcgttgttgcagaataa

SEQ ID NO: 22030 - DNA, 228 bp, Haemophilus influenzae
atggcacgttatttccgtcgtcgtaagttctgccgtttcacagcggaaaatgttgttgaaatcgattacaaagatatcgctacattaaagaactatatttcagaaagcggcaaaattgtacctagccgtattaccggtactcgtgcgaagtaccaacgtcaattagctcgtgcaatcaaacgcgctcgctatttagcgttacttccatacactgacaatcatcagtaa

SEQ ID NO: 22031 - DNA, 285 bp, Haemophilus influenzae
atgggagtcgtttctcggttaccaaagcgattaaagagccctagtggaattgagcattgcaagtttttgttagaacatcgttctgatcagattgaaagtggtttcacacgtcaagcttggttaaaaatgcctgttcaaattagtggtaatcaattgatagaaaaaactcaaagcattacggtcggtagtaaaattttggtggtgggatttattacatcacataaaacccaaagtgggttatgccaattagttttacatgccgagcaaatcgaatttatagattag

SEQ ID NO: 22032 - DNA, 378 bp, Haemophilus influenzae
atgcgtcactacgaaatcgtgtttatggttcatccggaccaaagcgagcaagtaccaggtatgatcgaacgttacaccggttctgtaaaagaagctggtggtcaagttcatcgcctagaagattggggtcgtcgccaattagcgtacccaattaataaattacacaaagcacattatgtgcttatgaatgtagaagcgcctcaacaagtcatcgacgagctagaaacgactttccgttataacgatgctgtattacgcagtcttgttatccatactaagcacgccgtaaccgaagcgtccccaatgaaagcggctaaagaagaacgtaaacctttagctgaagttgaaaacaacgattttgaggatgctgaagagtaa

SEQ ID NO: 22033 - DNA, 255 bp, Haemophilus influenzae
gtgcggataaaaaatcgattatttttagaggatacaatggcgaaagaagattgcattgagatgcaaggcacaattttagagactttaccgaatactatgttccgcgtggagttggaaaacggtcacgtggttactgcacatatttctggaaaaatgcgtaaaaactatatccgtattttgactggggataaagtgactgtagaaatgacgccttatgatttaagtaaaggacgtattattttccgtagtcgttaa

SEQ ID NO: 22034 - DNA, 864 bp, Haemophilus influenzae
atgaactcaaaaaaacacttaggccatacggcgcgtaaacgctttggtcaaaactttttacatgatacttctgtcattcaaggtatcgtggcggcgatttacccacaacctaatcaattcttagtggaaattggcccagggcttggtgcattaacagagcctgttggtgaacttgtcgatcatctgactgtggtagagcttgaccgagaccttgcagaacgtttacgtcaccatccatttttacatcaaaagctcaccgttattgaaacggatgcgatgcaatttgattttggtgcgctttacacaaaagaaaatttagcagaaaaagggcaaaaattacgtgtgtttggtaacttaccttacaacatttctacgccattgatgttccacttgtttaaatatcatgatgtgattcaagatatgcactttatgctgcaaaaagaagtggtaaaacgcctatgtgccgcaccaaatagcaaagcttatggtcgtttaacgattatggcgcaatatttctgccaagtgatgcctgtgcttgaagtaccgccttcggcattcaaacctgcaccgaaagtagattcagccgttgtgcgtttaattccgcataaggaattgccgcaccctgtaaaagatttatattggttgaaccgtgtttgctcccaagcgttcaatcaacgtcgtaaaacattacgcaatgcactctcaactctattttcacctgaaaatctgaccgcacttggtattgatttaaatgcacgtgcagaaaatttggctatcgcagattatgcacgtttagcgaactggttagcggataatccaccagcagatgtcaataaagatgaaatcttagattcagaagagtaa

SEQ ID NO: 22035 - DNA, 1455 bp, Haemophilus influenzae
atgtcagtaaaaggcgacatcggtgttatcggcttagccgtaatggggcaaaacctcattttaaatatgaacgaccacgggtttaaagtcgtggcatataaccgtaccacttcaaaagtggatgagtttttacaaggtgcggcaaaaggcaccaatattatcggcgcatactctttagaagatttagctgctaaattagaaaaaccacgtaaagtgatgttaatggtgcgcgctggtgatgtggtggatcaattcattgaagcattattaccacatttagaagagggcgacatcattattgatggcggtaactcaaactatccagatacgaaccgtcgagtgaaagccttggcggagaaaggtattcgctttatcggttcgggtgtgtctggtggcgaagaaggggcgcgtcacgggccttcaattatgccgggcggtaatcaagaagcgtggcagtatgtgaaacctatcttccaagcaatttcagctaaaacagaacaaggcgaaccttgttgtgactgggtcggcggcgaaggtgctggtcattttgtgaaaatggttcacaatggtattgaatatggcgatatgcagttaatttgcgaagcataccaattcttaaaagaaggtttaggcttaagctatgaagaaatgcaagccatcttcgcagaatggaaaaatactgaacttgatagctatttaatcgatatcaccactgacattcttggttataaagatgcaagtggagaacctttagtcgaaaaaatcttggatactgcgggtcaaaaagggacaggtaaatggacaggtatcaatgcgttagattttggtattccattaactttaatcactgaatccgtttttgcacgctgcgtgtcttcctttaaagatcaacgtgttgcggctaatcaattattcggcaaaactattacaccagttgaaggcgacaaaaaagtatggattgaagcggtacgtaaagcattattagcgtcaaaaattatttcttacgcacaaggctttatgctgattcgtgaagcctctgaacaatttggttgggatattaactatggtgcaacggcgttgttatggcgtgaaggttgtatcattcgtagccgtttcttaggtaatattcgcgatgcttatgaagcaaatccaaatcttgttttcttaggttcagatagctacttcaaaggcattttagaaaacgcattaagtgactggcgtaaagtggtggcaaaatctatcgaagtgggtatcccaatgccttgtatggcgtctgcgattactttcttagatggctatacttcagcacgtttaccagcaaacttattgcaagcacaacgcgactacttcggtgctcatacttatgaacgcacagataaacctcgtggcgagtttttccacactaactggactggtcgtggcggtaatacagcatcaactacttatgatgtgtag

SEQ ID NO: 22036 - DNA, 1485 bp, Haemophilus influenzae
atgcaaactgataataattgtatcgtcatttttggcgcgtctggtgacttaactcatcgtaaactcattccagccctttataatctctacaaaatcgggcgtttgagtgaaaacttttccgttcttggtgttgcacgttctgacttgaacgatgaaactttccgcgaaaaaatgcgtgaggcgttaattcataatgaagaaacaacaccagaaaccttagatgctttctgctctcatctttattaccaagcagtgaatacttcggatgctcaagattacggcaaacttgttccacgcttagacgatcttcacgataaatatcaaacctgtggtaacaccttttactatatgtccactccaccaagtctttatggcgtgattcctgagtgtttggctgcacatggtttaaatacggaagaatatggctggaaacgtattatcgttgaaaaaccttttggttacgatgaaaaaacagcgcaaacattagacgtacaaatccaccgtttctttgaagaacaccaaatttatcgtatcgatcattatttaggtaaagaaaccgttcaaaacttgctcgtattacgtttttcaaatggttggtttgaaccgctttggaaccgtaatttcattgattatgtagaaattactggtgcagaatctattggcgtggaagagcgcgggggctattatgatggttctggcgcaatgcgagatatgttccaaaaccatttattgcaagtgttagcgatggtggcaatggagccgccagcgattattaacgcgaattcaatgcgtgatgaagtagcaaaagtgatgcatagtttgcgtccattaacttcggaggatatggagaataaccttgttttgggtcaatacacagcggctgaaattaacggcaaaatggaaaaaggctatctagaagaaaaaggcgtaccggcaaattctcgtactgaaacctacatcgcattacgttgtgaaattgaaaactggcgttgggctggtgtgccgttctatgttcgtacgggtaaacgcttaccagctcgtgtgactgaaattgtgatccattttaaaactacgccacatcctgtattcagccaaaatgcaccagagaataaattaattattcgtattcaacctgatgaagcgatttcaatgcgttttggtttgaaaaaaccaggtgcaggttttgaggcgaaagaagtatcaatggatttccgttatgcagatttagcaggtgcgcaagtattaaccgcttatgaacgtttattgttggatgcgatgaaaggcgatgcaaccttgtttgctcgtactgatgctgtgcatgccgcatggaaatttgtgcaaccgattttagattacaaagccaatggtggtcgtattcacgaatatgaagctggcacttgggggcctgttgcagctgataaattaatcgcaaaacaaggcaaagtgtggcgtaaaccaagtggattgatgaagaaaaaagtttaa

SEQ ID NO: 22037 - DNA, 396 bp, Haemophilus influenzae
atggcagaaaaagaagtcagattagataaatggttgtgggctgcccgattttacaaaacacggagcattgctaaagcgatgattgaaagtggtaaagtgcattacaacaatcaacgtgcgaaagtaagtaaaattgtggaagtgggcgcaatgttaaaacttcgccagggaaacgaagaaaaagaaataaaaattatcgccttaagcgatcaacgccgaggtgcgccagaagcacaattactctatcaagaaaccgaaagtagcgtgaaaaaaagagaagaaatcgcatgggcaagaaaaaataattccctttcaatgccccatcctgatcgtcgcccaaataaaaaagagcggagagatttattgaaatttaaacaccaagataaatttgaataa

SEQ ID NO: 22038 - DNA, 2421 bp, Haemophilus influenzae
atgtcagaaacgaccaatgataactatggtgcatcgagcattaaagtattaaaaggccttgatgcggtgcgtaagcgtcctggtatgtatatcggcgataccgatgacggtactggtttgcaccatatggtatttgaagtggtggataatgccattgatgaagccctcgctggccattgttccgatattatcgtgacaattcacgatgataattctgtatcggtgcaagatgatgggggcgggattcctgtggatattcatcctgaagaaggcgtttctgcagcagaagttattatgactgtgcttcacgcaggcggtaaatttgacgataactcttataaagtatcgggcggtttacacggcgtgggcgtatctgtagtgaatgcgctttctgataagttacaattaaccattcgtcgtcaaggtcacgttcacgagcagttttatcatttaggggagcctcaatcgccattaacagtgattggcgaaacagaggcaacggggacaacggttcgtttctggccaagctcagatatttttgctatcacaacctttgattacaaaatcttagcaaaacgcttacgtgagctttctttcttgaattctggcgtatctattcgtttaatcgataaacgtgatggatctgaagatcatttccattatgaaggcggtattcaagcattcgtagaatatttgaacaaaaataaaaacccaattcatccaaagccattttattttaccgctgagaaagatggcatcggcgtagaagtcgccttgcaatggaatgatggtgtaaatgaaaacgtgtactgctttaccaataacattcctcaacgtgatggcggtactcacttagctggttttcgtggagctttaacccgtagcttaaatagctatatggaaaacgaaggcatgctgaaaaaagaaaaagtggcgacttcaggcgatgatgcacgtgaaggtttggtggcgattatttccgttaaagtgcctgatccaaaattctcatcgcaaacgaaagacaaactcgtgtcttcagaagttaaaagcgcggtggaatctgcgatgaatgaaaaaatgcaggaatatttattggaaaatcctgcagatgcaaaaatcattgtaaatcaaattattatggcagcgcgtgcgcgtgaagcagcacgtaaagcgcgtgaaatgacgcgccgtaaaggggcattagatattgcaggtttaccaggtaaactagcagactgccaagaaaaagatcctgctctttctgaactttacttggtggagggggactccgcgggtggttctgcaaaagttggtcgtgatcgtaaaactcaagcaattttgccattgaaaggtaaaatcttaaacgtagaaaaagcacgtttcgacaaaatgttgtcttcccaagaagtgggcacattaattactgctttaggctgcggtattggtcgtgatgaatataatccagataaattacgttatcatcatatcattattatgaccgatgctgatgtggatggttctcacatccgtacgttgcttttaaccttcttctatcgtcaaatgcctgagctgattgagcgtggttatgtttacattgctcagccgccactttacaaagtgaaaaaaggaaaacaagaacgctacattaaagatgcggatgaaatggagcaatatgaattaacccttgcgttagatggcgcagaattacatatcagcacaaatgcaccagcaatgaatgcccttgtatttgagaaattggtggcagaatataacagcgtacaaaaacttatcggtcgtttaaaccgtcattacccagcccctgtattgcaaggattaatttatcagtcgccaatttctattgaaatgatgaaagaggaaagtgcggtggaaaattggggtaaatcttttgttgaacaactgactgcaaaagaaactgaagcacatcaatattcagtgcgtacacaatttaatgcggaacgccaagtgtatgaagcggtgattactgttcgcaaacacggtattgataccgattatttcttgaattttgattttgttcacggcaatgaatacgcaaaaattgtttctcttaataaacaactcaatggtttattagaagagggtgcttatgttattcgtggcgaaaaagtacaaccagtgcgtagttttgaacaagccgttgaatggttagtgaaagaatctcgtaaaggtcttgaagtacaacgttataaagggcttggggaaatgaatgcagatcaactttgggaaaccacaatggatccaaattcacgtcgtatgttgaaagtttctattaaagatgctgttgcagcagatcaattattcactaccttaatgggagatgaagttgagccacgtcgtgagttcattgagctgaatgcgttaagagcaaatttggacgtgtaa

SEQ ID NO: 22039 - DNA, 2289 bp, Haemophilus influenzae
atgttaaatcaacaaattagccaaattattgcggcagaattaaccgttcaaccccaacaaatctttgcagctattcaattattagatgatggcaacaccattccatttattgcacgttatcgtaaagaagctacaggtggcttagatgacacccaacttcgtcattttgaaacccgtttaatttatttgcgtgaattagaagatcgtcgtcaaactattttgaaatctattgaagagcaagggaaattgaccgatgaattgcgtgacaaaatccatgcgacacaaagcaaaaccgaattagaggatttatatttaccgtacaaacctaaacgtcgcaccaaagggcaaattgccattgaagccggtcttgagccattggctaatttactttggaatgagccaaaaaatgatccagaatcaaccgcactttcctttgttgatgctgaaaaaggcgtagctgatagcaaagctgcgttagacggtgctcgcattattttaatggaacgttttgctgaagatgcgggcttattagcgaaagtccgtgattatttagcgaaaaatgcggttatcgtatcaaaagtgatcgaaggcaaagaaacggaaggtgcaaaattccaagattatttcgaccaccaagaattattgaaaaatgtgccttctcaccgagcattggctatgttccgtggacgtaatgagggcattttacaattaagtttaaatgctgatcctgatgcggaagagggaagtcgtcaaagttattgtgaagaaattattcgtgattatttagatgtacgtttcacgggacagccagcagataaatggcgtgagcaagtgattgcgtggacgtggaaaatcaaagtttcgttgcatttagaaacggaattaatggcaagtttacgtgaaaaagcggaagaagaagccatagatgttttcgcccgaaatctgaccgcacttttaatggctgcaccggctggtgcgaagagcacaatgggcttggacccaggcttacgtacaggtgttaaagtcgcgatggttgataacacaggtaaattattagataccaccaccatttatccacacacgggtcgtgaagctgaagctcaagtggcgattttcagcttaatccgcaaacataacgtggaattaattgccattggtaatggtacggcttctcgtgaaactgaacgttttgcgaaagacgtgattaaagaaattaaagaaaataaaccacaaaccgttgtagtaagcgaagctggcgcgtccgtttattcagcttctgaatttgccgcaaatgaattcccgaatttagatgtatctttacgtggtgcggtctctattgcacgtcgtttacaagatccattggcagaattagtgaaaatcgaaccgaaagccattggtgtagggcaatatcagcacgatgtaaaccaaacccaacttgcgcgtaaactcgatgcagtagtggaagactgtgtaaacgcagtaggtgtggatttgaatacggcatccgcaccattgctcgctcgcgtggctggaatgacgaaaaccttagcgcaaaacattgtggaatatcgtgatgaaaatgggcgttttgaaagtcgtagcgaattgaaaaaagtgccacgtttagggccaaaagcctttgagcaatgtgcaggctttatgcgtattgcaaacgggaaaaatccacttgatgcttcaggtgttcacccagaagcttatcctgtggtcgaaaaaattttgcaagctaccgcgcaatctattcaagatttaatgagtaatgccggtgtggtacgtcagcttgatgcaaaacaattcattgatgagcaatttggtttaccgaccgtccaagatattttcaaagagttagaaaaaccagggcgcgatccgcgtggcgagttcaaaaccgctgtatttgctgagggcgtggaagaaataacggatttaaaatctggaatgattttagaaggaacagtgactaatgtaactaattttggcgcatttgtggatattggtgttcatcaagatggtttagtgcatatttcatcattaagcgataaattcgtggaagatccccatcaagtggtaaaaacaggcaacattgtaaaagtcaaagtgttagaagtggatgtgccacgtaaacgcattgcattgacgatgcgattagatgaaagtgcggtcaaaaatgatagcaaatctgaccgcactttatccacaagacctcgtggaaatatgcagcgagaggcgcgtaattcaagaggtaataatgtgataggcaatgcctttgcctga

SEQ ID NO: 22040 - DNA, 726 bp, Haemophilus influenzae
atgtctagtatggaaggaaaaaaagtccctcaagtgacattccgcactcgtcagggtgataaatgggttgatgtaactacctcagagttatttgataacaaaacagtgatcgtgttctcattaccgggcgcattcactccaacttgctcatcatcacacttaccacgttacaacgaattagcgccagtattcaaaaaatacggtgtagacgatattcttgttgtatctgtaaatgatactttcgtaatgaacgcatggaaagaagatgaaaaatctgaaaacatctctttcattccagatggtaatggtgaatttaccgaaggcatgggtatgttagttggtaaagaagatttaggcttcggcaaacgttcatggcgttattctatgcttgtgaaaaacggcgtagttgaaaaaatgtttatcgaaccaaacgaaccaggcgatccgttcaaagtatccgatgctgacactatgttgaaataccttgcaccacaacaccaagtgcaagagtctatttcaatcttcacaaaacctggctgtcctttctgtgcaaaagcaaaacaacttttacacgataaaggcttaagctttgaagaaatcatattaggtcacgatgcaacaatcgtgagcgtacgtgcagtttcaggtcgtactactgttccacaagtgtttatcggtggtaaacatattggcggtagcgacgatttagaaaaatactttgcataa

SEQ ID NO: 22041 - DNA, 1185 bp, Haemophilus influenzae
atgtctaaagaaaaatttgaacgtacaaaaccgcacgtaaacgtgggtacaatcggccacgttgaccacggtaaaacaactttaacagcagcaatcacaaccgtattagcaaaacactacggtggtgcagcgcgtgcatttgaccaaattgataacgcgccagaagaaaaagcgcgtggtattaccatcaacacttcacacgttgaatacgatacaccgactcgccactacgcacacgtagactgtccgggacacgccgactatgttaaaaatatgattactggtgcggcacaaatggatggtgctattttagtagtagcagcaacagatggtcctatgccacaaactcgtgaacacatcttattaggtcgccaagtaggtgttccatacatcatcgtattcttaaacaaatgcgacatggtagatgacgaagagttattagaattagtcgaaatggaagttcgtgaacttctatctcaatatgacttcccaggtgacgatacaccaatcgtacgtggttcagcattacaagcgttaaacggcgtagcagaatgggaagaaaaaatccttgagttagcaaaccacttagatacttacatcccagaaccagaacgtgcgattgaccaaccgttccttcttccaatcgaagatgtgttctcaatctcaggtcgtggtactgtagtaacaggtcgtgtagaacgaggtattatccgtacaggtgatgaagtagaaatcgtcggtatcaaagatacagcgaaaactactgtaacgggtgttgaaatgttccgtaaattacttgacgaaggtcgtgcaggtgaaaacatcggtgcattattacgtggtaccaaacgtgaagaaatcgaacgtggtcaagtattagcgaaaccaggttcaatcacaccacacactgacttcgaatcagaagtgtacgtattatcaaaagatgaaggtggtcgtcatactccattcttcaaaggttaccgtccacaattctatttccgtacaacagacgtgactggtacaatcgaattaccagaaggcgtggaaatggtaatgccaggcgataacatcaagatgacagtaagcttaatccacccaattgcgatggatcaaggtttacgtttcgcaatccgtgaaggtggccgtacagtaggtgcaggcgttgttgcgaaaatcatcaaataa

SEQ ID NO: 22042 - DNA, 2103 bp, Haemophilus influenzae
atggctcgtacaacccctattgaaagatatcgtaatatcggtatcagtgcgcatattgatgcgggtaaaactactactactgagcgtatcttattctatactggtgttagccacaaaatcggtgaagtgcacgatggtgcagcaacgatggactggatggaacaagaacaagagcgtggtatcaccattacctctgcggcaacaactgcattctggtctggtatgtcacaacaattcccacaacatcgtatcaatgttattgatactccgggacacgtggactttactgttgaagtagaacgttctatgcgtgttcttgatggtgcggtaatggtttactgtgcggttggtggtgttcaaccacaatctgaaaccgtatggcgtcaagctaataaatatgaagttccgcgtattgcgtttgtaaataaaatggaccgtactggtgctaacttcttacgtgttgttgaacaattaaaaactcgcttaggtgctaatgctattcctcttcaactccctgttggtgcagaagaaaacttcacaggtgtagttgatttgatcaaaatgaaagcgatcaattggaatgaagcagaccaaggtatgactttcacttatgaagaagtgcctgctaatatgcaagcagactgtgaagaatggcgtcaaaaccttgttgaagcggcagctgaagcgtcagaagaattaatggaaaaatacttaggtggtgaagacttaactgaagaagaaattaagtcagcattacgtcagcgtgtattagcaaatgaaattattttggtaacctgtggttctgcgttcaaaaacaaaggtgttcaagcaatgcttgatgcagttgttgaatacctaccagcaccaactgatattcctgctattaaaggtatcaatccagatgaaactgaaggtgagcgtcacgcaagtgatgaagaaccattctcttcattagcatttaaaattgcaactgacccattcgtaggtaacttaacattcttccgtgtatattctggagtgattaattctggagatacagtattgaattctgtacgtcaaaaacgtgaacgttttggccgtatcgtacagatgcacgctaataaacgtgaagaaattaaagaagttcgtgcaggtgacatcgcagctgctatcggattaaaagatgtaactactggtgatacattatgtgcaattgatgcaccaattatccttgagcgtatggaattcccagagccagtaatctctgttgcggtagaaccaaaaactaaagctgaccaagaaaaaatgggcttagcattaggtcgtttagcacaagaagacccttcattccgtgttcacacagatgaggaatctggtgaaaccattatttctggtatgggtgagttgcacttagatatcattgttgatcgtatgaaacgtgagttcaaagtggaagccaatattggtaaaccacaagtatcataccgtgaaactatccgtactcgtgttaatgatgtagaaggtaaacacgctaaacaatctggtggtcgcggtcaatatggtcatgttgttatcgacttatacccattagatccagaaggccctggttatgaatttgtaaacgaaatcaaaggtggtgtaattcctggtgaatacattccagccgttgataaaggtattcaagaacaacttaaatctggtccattagctggttacccagtagttgatcttggtgtacgtttacacttcggttcataccatgatgtggattcatctgagttagcatttaaacttgctgcgtctttagcatttaaagcagcattctcaaaagcaaacccagtattacttgagccaattatgaaagttgaagttgaaactccacctgaatatgttggtgatgtaattggtgatttaagccgtcgtcgtgctatggttaacggtcaagaagcgaacgagtttgttgttaaaatctatgcagaagttccactttctgagatgttcggttatgcaacagacttacgttcacaaactcaaggtcgtgcatcatactcaatggaaccgttaaaatatgctgaagctccaacaagtgtggcagctgcagtaattgaagcgcgtaaaaaataa

SEQ ID NO: 22043 - DNA, 471 bp, Haemophilus influenzae
atgccacgtcgtcgtagtgttgaagcacgcaagattcttccagatccgaagttcggttcagaattacttgcaaaatttattaatgtaatcatggtagacggtaaaaaatccgttgctgaatcaatcgtttatggtgctttagaaactttagcacaacgcacaggtaaagagcctttagaagcgtttgaagttgcacttgaaaatgtacgtccaactgttgaggttaaatctcgtcgcgttggtggttctacttaccaagtaccagttgaagtgcgccctgtacgtcgtaacgcattaggtatgcgttggatcgttgaagcagcacgtaaacgtggtgataaatcaatggctttacgccttgcgaacgaattatctgatgcttcagataataaaggtgcagcagtgaaaaaacgtgaagacgttcaccgcatggctgaagctaacaaagcatttgctcactaccgttggtaa

SEQ ID NO: 22044 - DNA, 375 bp, Haemophilus influenzae
atggcaactatcaaccagctagtacgcaaaccgcgtgtgaaaaaggttgtaaaaagcaacgttcctgcattagaggcttgcccgcagaaacgtggtgtatgtactcgtgtatatactacaactcctaaaaaaccaaactctgcgttacgtaaagtatgtcgtatccgcttaactaacggttttgaagtaacttcttatatcggtggtgaaggtcataaccttcaagagcacagtgttgtattaatccgtggtggtcgtgttaaagacttaccgggtgtgcgttaccacacagtacgcggtgcattagactgcgcaggcgttaaagatcgtaaacaaggtcgttctaaatacggcgttaaacgtcctaaagcttaa

SEQ ID NO: 22045 - DNA, 1890 bp, Haemophilus influenzae
atgttttacactgaaacttatgatgtgattgtgatcggtggtggtcatgcgggtacagaagccgcacttgcaccagctcgtatgggatttaaaacccttttattaacacataatgtagatactttagggcaaatgtcttgtaaccctgcaattggtgggatcggtaaaggtcatttagtaaaagaagtagatgcaatgggcggtttaatggcgcatgctgcagataaagcagggatccaatttcgtactttaaatagcagtaaaggcccagcagtgcgtgctactcgagctcaatctgacagagttctatatcgtcaagctgttcgtactgcattagaaaatcaacctaatttagatattttccaacaagaagcgacagatattctgattgagcaagatcgagttacaggcgttagcacaaaaatgggattaaccttccgtgcaaaatcagtgatcttaacggccggtactttcttagctggtaaaattcatattggtttggaaaattatgaaggtggccgtgcaggagattctgcttctgtaaatctttcacatcgattaagagatctcggattacgtgtagatcgccttaaaacaggtacaccgccgcgtattgatgcgcgtacgatcaattttgatattttagctaaacaacatggtgatgaggtgttgcccgtgttctcttttatgggatctgttgatgatcaccctcaacaaattccttgttatataacccataccaatgaacaaacccatgaagtgatccgtaataacttggatcgcagtccaatgtataccggtgtgattgaagggattggtccacgttattgcccatccattgaagataaagtgatgcgtttcgcggatcgtaattcacatcaaatttatttagaaccagaaggcttaaccagtaatgaagtgtatccaaacgggatctctaccagtttaccgtttgacgtgcaaatgggcattgtgaattctatgaaaggtttagaaaacgcacgtattgtgaaaccaggttatgctattgaatacgattattttgatccacgtgacttaaaaccaaccttagaaactaaatcaatttctggtctatttttcgcaggtcaaattaacggtacaactggttatgaagaagcagcggcacaaggtttattggctgggattaacgcaggtctttatgttcaagagaaggatgcatggtatccacgccgtgatcaatcttatactggcgtattggtggatgacctttgcacacttggtaccaaagaaccgtatcgcgtatttacttctcgtgcagaataccgtttgttactacgtgaagacaatgcagacattcgtttaacaccaattgcccatgaattaggtttgattgatgaggctcgctgggcacgtttcaatcaaaaaatggaaaatattgaacaggaacgccaacgtttacgcagcatttggttgcatcctcgttcggaatatttagaagaagcgaataaagtgcttggtagtccacttgtacgtgaggctagcggtgaagatttattgcgtcgtcctgaaatgacctacgatattttgacttctttaacgccatataaaccggcaatggaagataaggaagctgttgagcaagtagaaattgctattaaatatcaaggctatatcgagcatcaacaagaagaaatcgaaaaacaaaaacgccatgaaaatacggctattccagctaactttgattatagtaaagtttccggtttatctaatgaagtacgtgcgaaattggaacaacatcgtccggtttccattggtcaagcgagccgaatttcaggtatcacccctgcagcaatttcaattattttggtaaatttgaaaaaacaaggaatgctaaaacgtggggaataa

SEQ ID NO: 22046 - DNA, 1530 bp, Haemophilus influenzae
atggatgcatccaaaaagaagaaaacgtttaatttcccatcagcgtttaccattttatttgcaatattaattctcgctgttggattaacctgggttattccatccggttcatattcaaaattaacatataattccactgataatgtatttgttgtcaaagcttacggcgttgatgataaaacttatcccgccacaacagacactcttgataatctcaatatcaaaattaaactctccaacttcaccgaaggcgtgatcaaaaaaccaatcgctattcctggcacctatcaacgtgtagaacaacaccacaaaggcattgaagacatcaccaaaagtatggtggaaggaactatcgaagccgttgatgttatggtctttatcttcgtattggggggtatgattggtgttattaaccgaaccggttcttttaatgcaggtttgatggctctcgtgaagaaaactaaaggcaatgagttttttattgtattctgcgtatccgtcttaatggtgttaggcggcacaacctgtggtatcgaagaagaagcagtggcattctacccgattctggtgcctgtattcttggctctgggatatgatgcgatagtctgcgtaggggctatattccttgctgcatctatgggaactgcattctctacaattaacccattctccgttgttatcgcatcaaatgcggctggtattcaatttactgaaggtattggtttccgtgctctaggtttagttttaggggcaacttgcgtaatcgcatatctttattggtactgtaaaaaaatcaaagctgacccaagtttttcttatacttacgacgatcgcgaagaattccgtcaacgttatatgaaaaactttgatccgaacacaactatcccattctcagctcgtcgcaaattaatcttaacgcttttctgtatctcattccctattatgatttggggtgtaatggttggcggatggtggttccctcaaatggctgcatctttccttgccattaccatcatcattatgtttattagtggattgtctgaaaaagatattatggaatctttcactgaaggtgcatcagaattagtaggcgtatccttaatcattggtcttgctcgtggcgtaaacttagtactcgaacaaggtatgatttctgacactatccttgattatatgtctaatgtagttagtggtatgccgggtagcgtattcatcttaggccaattagtcgtatttattttcctaggtttaatcgtaccatcttcttctggtttagccgtactttcaatgccaattatggcaccacttgctgactcagtgggtattccacgcgatatcgtggtttccgcttacaactggggacaatatgcaatgctattcttggcgccgacaggattagtgttagtgacactccaaatgttgcaaattccatttgatagatgggttaaattcgtcatgccaatgattggatgcttattgctaattggttccattttattagtagtacaagtatccttatatagcgtttaa

SEQ ID NO: 22047 - DNA, 933 bp, Haemophilus influenzae
atgagaatagtgattgcattaggcggtaatgcgttattacgacgcggagaaccaatgacagccgaaaatcaacgacaaaatgttcgcattgcttgtgagcaaattgctaagatttggccaaataatgaattagtgatagcacacggtaatggcccacaagtgggtttgctcgccttacaaggtgctgcctatactgatgtgccaacctatcctttagatgtattgggagcagaaacagctggaatgattggttatatgattcaacaagaactcggtaatttagttccatttgaagtgccatttgcaacgttattatctcaagtagaagttgatatcaacgacccagctttcaaaaatccaactaagccaataggccctgtttatacgaaagaagaagctgaacgtttggcaaaagaaaaaaattggtctatagcacaagatggtgataaatatcgtcgcgttgtgccaagcccattaccaaaacgtatttttgaaattcgtccggtcaaatggttgcttgaaaaaggcagtatcgtaatttgtgcggggggcggtggcattccaacctattatgatgaacaccataatttacaaggtgttgaagccgttatcgacaaagatttatgttcagctttacttgcagaaaatcttgacgctgatttattcatcatcgcaactgatgtttccgcaactttcgtagattggggtaaacctaatcaaaaagcaatttcagttgcctcacctgaagctatttcagaacttggtttcgcttcaggttccatggggccgaaagtacaagccgcgatcaactttgcgaaacaaacaggaaaagatgcagtaataggatctttatctgatattgtggacattgtgaaaggcaaagctggtactcgtattacgaaaaaaactgaaggcatatcctattatgcttaa

SEQ ID NO: 22048 - DNA, 1005 bp, Haemophilus influenzae
atggctttcaatatgaaaaatagacatttacttagtcttgttcatcacacagaacgtgaaattaaatatctcttagatctctcccgagatttgaaacgagccaaatatgctggcacagaacaacaaaaattaaaaggcaaaaatatcgcgctcatctttgaaaaaacctccacccgtacacgctgtgcatttgaagtcgccgcttatgatcaaggcgcacaagtcacctacatcgaccctaattcctctcaaattggccacaaagaaagcatgaaagataccgcccgcgtattaggcagaatgtatgatggcattgaatatcgtggctttaaacaaagtatcgttcaagaactggctgattatgctggagtgccagtattcaatggtttaaccgatgaattccacccaacacaaatgcttgccgacgtacttaccatgattgaacattgcgacaaaccattaagtgaaattagctatgtatatattggggatgctcgcaataacatgggtaattcacttttattaattggtgcaaaattaggtatggatgttcgtatttgtggacctaaagcattattaccagaagcaaatcttgtggaaatgtgcgaaaaatttgcgaaagaaagtggagctcgtattactgtaactgaagatatcgacaaagcggtgaaaggcgtagattttatccatactgatgtgtgggtttcaatgggtgaaccattagaaacttggggcgaacgcattaaattattacttccttatcaagtcacacctgaattaatgaaacgcactggtaatccaaaagtgaaatttatgcactgcttgccagccttccataacagcgaaaccaaagttggtcgtcaaattgctgaaaaatatcctgaattagctaatggtattgaagtaactgaagaggtatttgaatcgccaatgaacattgcatttgaacaagcagaaaaccgtatgcacacaattaaagcggtaatggtagcaagtttggcataa

SEQ ID NO: 22049 - DNA, 819 bp, Haemophilus influenzae
atgaatttaccttttcgagcaatggtgtctgatttagatggcacacttttaacacctgaacatttagtcggtgatcttaccattgatacgctgagagcattagagcaaaaaggcgtagatattattttggcaacaggacgcaatcataccgatgtgtcatccattcttggaaaaattggtgcggaacgtgcggttatgattacatcaaacggtgctcgtgtacgggatttacagggtaatttgctttatagcaatagtttgcctgaagaattagttcttgagctttacaaaacgccatttgatacttccaaagtatgcatgaatagctatcaagatgaaggttggtttactaataaagatattcctgcaatgcgtcagttccataaagaatctggattcgattataacgttgtcgatttttctaaacatcatggacgtgggacagaaaaagtcttttttattggtaaaacgccagaggatttagttgaagtagaaacttatttacgagataagtttggtgacgtaacgacaattgtttattcagcattagcttgtttggaagtaatgaataagaatgtttcaaaaggggatgcattaaaacatttactcgaatcacgcgagtatgagttaaaagactgtattgcttttggtgatggaatgaatgatgtagaaatgctttcttgggctggaaaaggttgcattatgaaagatgctgatattcgtttaaaaatggcttgtccagagttagaagttattggctcaaataaagaagaatcagtcgctcgttatttgcgaacccaatttggattagattattaa

SEQ ID NO: 22050 - DNA, 381 bp, Haemophilus influenzae
atgcaggaaaagaacttttcggaagaagaaattgatgatgcattatctcgatgccaagcaaaaaattggcaaagtgatcgtcgtttttcagaaaattatctaaattcacgcgtgcaaaaaggttatggtgtaggaagaattcgacaagaattacgccaattaaaaggtgtgtcttctgatattattgatgaagttttaatggaatcagaaattgattggtatgaaatggctgagaacttgttacgtaaaaaattcccaaattataacgaacagcaaacgcctaaaatgaaacaaaaaatttggcaatatatgctatcacacggatttcgtagcgatgaatttgctgatttaattgggcaaaaccaaagtgaatgggattaa

SEQ ID NO: 22051 - DNA, 1065 bp, Haemophilus influenzae
atggcaactcaagaagaaaaacaaaaagccctagcggctgcactagggcaaatcgaaaaacaatttggtaaaggctcaattatgaaattaggcgataccaaaacgttggatgtagagtctatttctactggttcacttgggttagatgttgcgctagggattggtggtttgcctatgggtcgaattgtagaaattttcgggcctgaatcatcgggtaaaacaacattaactctttccgtcattgctcaagcgcaaaaagcaggaaaaacctgtgcatttattgatgcagaacacgcacttgatcctatttatgcagcaaaacttggtgtagatgtaaaagaactttttgtttctcaaccagataatggggaacaggcacttgaaatctgtgatgcattagttcgctcaggtgcaattgatgtaattattgtggactccgttgccgcactgacaccaaaagctgaaattgaaggcgatatgggcgattctcatatggggctgcaagcacgtttaatgtctcaagctttgcgtaaactcacaggtcaaattaaaaatgcaaactgtctagttgtgtttattaaccaaatccgtatgaaaataggcgtgatgtttggtaatcctgaaaccaccacaggcggtaatgcattaaaattctattcttctgttcgcttagatattcgccgtacaggttctgtaaaagacggggaaaatattattggaaatgaaacccgcgtaaaagtagtgaaaaacaaattagcggcaccgttccgccaagtggatttccaaattctctatggagaaggcatttcaaaagcaggtgaattattagaacttggtgtaaaacacaaacttgtagaaaaatcaggcgcttggtattcctacaatggtgaaaaaattggtcaaggaaaggctaattcaatgaaatggcttaacgaaaatatagagaaatcagatgaattagaagctcgtttacgtgctgaattagtggccaatccagaacaagccttaatggcggatattgaacaatctgaaaataatactgaatcagaaagtgattttgaataa

SEQ ID NO: 22052 - DNA, 1008 bp, Haemophilus influenzae
atgataacttcgcaaacaccaatcactgtgctaggtgcgggatcttatggaactgcgctggcaattaccttttctcgcaatggttctcccactcacttatgggggcacaatcccgcccatatcgcacaaatgcagacagaacgacaaaattatcgttttttgccggatgtcatctttcctgaggatcttcatttagaaagtaatcttgcacaagcaatggaatattctcaagatattttaatcgtggtgccaagccatgctttcggtgaaattcttataaaaatcaaaccgcacttaaaagcccatcaccgattaatttgggcaacaaaaggtttggaacgtaacacagggcgtttactacaaaccgtagttgaagaacaactcggaacgcaatatccactagctgtactttctggcccaacttttgcaaaagaattagcgcaaggtctaccatcagctattacgcttgctgccaataacgagcaattcgcacgggaatttcagtctcgtattcattgtagtaaaggtttccgagtttatataaattcggatatgactggcgttcaacttggtggagcaattaaaaatgtgatcgcaattggtgcgggtatttcagacggtatgggatttggcgcaaatgctcgcacagcactgattactcgaggtattgcagaaattacccgcttaggtatctcgctcggtgcaaataccaatacatttatgggaatgtctggattgggcgatttagtgctaacttgcaccgataatcaatcgcgcaatcgacgttttggattaatgctaggtaaaggattagatgcccaaatggctatggaaaatatcgggcaagtcgtagaaggtttttataatacaaaagaagcctatttgcttgcacaaagacaaggtgtggaaatgccgattacagaacaaatttatcaaatgctgttttgtggcaaaagcgcacaagatgtagcaatcagccttttggggcgagcatgtaaaggcgaataa

SEQ ID NO: 22053 - DNA, 804 bp, Haemophilus influenzae
atgacattagatgtgtggcaacatattcgccaagaagccaaagaacttgctgaaaacgaacctatgcttgctagtttttttcactctacaattttaaagcatcaaaatctgggcggtgcgctaagttatttattggctaacaaattagccaatcctattatgccagctatttctctccgtgaaattattgaggaagcctatcaatctaatccttcgattattgattgcgctgcttgcgatatccaagctgtccgccaccgagatcccgctgtagaattgtggtccactccattgctttatttaaaaggtttccatgcgattcaaagttatcgaattacccattatttatggaatcaaaatcgtaaatcccttgccctttatttacaaaaccaaatttcagtagctttcgatgtagatattcacccagcggcgaaaattggccacggaattatgttcgaccatgcaacaggtattgttgtgggtgaaacatctgtaatcgaaaatgatgtttcaattttgcaaggggtaacgcttggcggtacgggaaaagaatcaggcgatcgtcatcccaaagtacgcgagggtgttatgattggggcgggtgcaaaaattctcggtaatattgaagtaggtaaatacgccaaaattggggcaaactctgttgtgcttaaccctgtgccggaatatgccacagcggctggcgtgcctgctcgtattgtgagtcaagataaagcagcaaaacctgctttcgatatgaaccaatattttatcggcattgatgatggaatgaatttaaatatataa

SEQ ID NO: 22054 - DNA, 1287 bp, Haemophilus influenzae
atgaacgccaaagttttagaaaagaaattcatcgtcccctttgtgcttattactagcttatttgctctttggggatttgccaacgacattaccaatccgatggttgcggtatttcaaacagtaatggaaattccagcctcagaagcggcattggtacaattagctttttatggaggatacggcacaatggctattcctgcggcattatttgccagtcgctatagctacaaagcggggattcttctggggcttgctctttatgcaataggtgcatttttattttggccagctgcgcaatatgaaatatttaatttctttttagtctccctttatattttaacctttgggctcgcttttttggaaaccactgccaatccttatattctcgcaatgggagatcctcaaacagctactcgacgtttaaatttcgcacaatcatttaatccacttggttcaattacaggtatgtttgttgcttcccagttagtcctaactaatcttgaatctgacaaacgtgatgctgcaggtaatttgattttccacaccctgtctgaagcagaaaaaatgagtattcgcacccatgatttagctgaaattcgcgatccttacatagcactcggttttgtcgtggttgcagtgtttattatcattggattgaaaaaaatgccagccgtaaaaatagaagaggccggacaaatcagctttaaaacagcagtaagccgactggctcaaaaagccaaatatcgtgaaggcgtgatcgcacaagccttttacgtaggtgttcaaatcatgtgttggacatttatcgtacaatacgctgaacgtttaggttttactaaagctgaagggcaaaactttaacatcattgctatggctatttttattagcagtcgctttattagcacggcattaatgaaatatttaaaagcagaatttatgctgatgctctttgctattggtggttttttaagtattctcggagttatctttattgacggtgtatggggtctatactgcctaattttaacctcaggttttatgcctttaatgttccctaccatttatggtattgccctctatggcttaaaagaggaatcgacattaggagctgcaggtttagtaatggctattgtaggcggcgcattaatgccaccactacaaggaatgattattgaccaaggcgaagttatgggacttccagcagtaaatttttcctttatcctaccattaatctgttttgtagtaattgccatttatggcttcagagcttggaaaatacttaaatag

SEQ ID NO: 22055 - DNA, 435 bp, Haemophilus influenzae
atgctaaaaggtattcacccagctctttctcctgaattactaaaaaccctcgccgaaatggggcatggcgatgagatagttctagctgacgcccattttcccgcacattcactacataaaaatgtaatacgtgcagatggtatatctatagatattttacttgaagcaataactcccttattcgaatttgacgcttatgttgatgcccctctgttgatgatgaaagcagttgagggagattctttagatccgaatgttgaaactcgttacttaaatgcgattgaaagtgcggtcggtttcacaccaaatttaacctgtctagaacgcttcgatttttatacacgtgctaaacaggcttatgctgttgttgtcagtggtgagatcgcaaaatatggcaacattatcattaaaaaaggggttactcccattttataa

SEQ ID NO: 22056 - DNA, 822 bp, Haemophilus influenzae
atgaaattaaaacaactttttgcaatcactgcaatcgcatcagctctcgttttaacaggctgtaaagaagacaaaaaacctgaagctgcagcagcaccgcttaaaatcaaagtaggcgtgatgtctggcccagagcatcaagttgcagaaattgcagcaaaagtcgctaaagaaaaatatggtttagacgttcaattcgttgaattcaatgactacgcattaccaaatgaagctgtatctaaaggtgatttagatgcaaacgcaatgcaacataaaccttatttagatgaagatgcaaaagcgaaaaatttaaataacttagttatcgtgggtaatactttcgtctatccattagcgggttattctaaaaaaatcaaaaatgtgaatgaattacaagacggtgctaaagttgttgttcctaacgatccaacaaaccgtggtcgtgcattaattcttcttgaaaaacaaggtttaatcaaattaaaagatgcaaataaccttctttcaactgtattagatattgttgaaaatccgaaaaaattaaacatcactgaagtagatacttctgttgcggcacgcgcattagacgacgttgatttagctgtagtaaacaatacttatgcgggtcaagtaggcttaaatgctcaagatgacggtgtatttgtagaagataaagattctccatatgtgaacattatcgtttctcgtaccgataacaaagacagcaaagctgttcaagatttcataaaatcttaccaaacagaagaagtttaccaagaagctcaaaaacactttaaagatggcgttgtaaaaggttggtaa

SEQ ID NO: 22057 - DNA, 1356 bp, Haemophilus influenzae
atgaaaaaattctcttctaaaactatcaaagcaaaaaattcagtaaaaatgaccgcactttcgaccagggctattgctgcaaacttaattttgcaagtattggatgagggcaaatcattgtcagcgttaattccagaagtgcaactttctgtaaaagctcaagatttgcctttactacaagaaatttgttttggcgtgtgtcgagtattgcctcgcttagagcaaattatcaaacgtcttgtggataagccgcttaaaggtaaaactcgcattgttcattgcctgttacttgtagggttataccaattgctttatatgcgagtgcctgctcatgcggcagttgatgaggttgtgaacgcaacaaaatcattaaaatctgatagttttagaggattagtgaatgcggttttgcgtagatttttacgtgaacaagatgaaattttggcaattatcgataaaaattggcaaacgcttcaccctgaatggttcgtgaataaattaaaaaaagcctatccgaattggcgtgagatcattgaggcgaacaatcagaaaccaccaatgtggctacgtgtgaattcacaaaaaaacgccctcgaaacttaccgcactttacttgaagaacaaggtgtttcttcgaaaacaagccatcatcctaatgcgctatgtttagatataccgattgcggtgcaaaaattaccacactttgaagaaggggcggttacggtgcaagatttgagtgctcaatgggcggcaacgttgcttgagccaaaaaatgaggagtggatcctcgatgcttgcgcggcaccaggcggtaagacgacccatattttagaactggcacctcaagctaatgtgattgcattagatgtagaatctcatcgcttaaaacgagtagaagaaaatcttgaacgtttaaatcagcaagcgatagtggtgtgtggtgatgcgagtaaacctgacgaatggttagctgaaatcggtaaaagtgcggcgaaatttgaccgaattttacttgatgcgccttgttctgcaacgggggtgattcgccgccaccctgatataaaatggttacgcaaagaaaccgatatcgctcagctcgttgaattacagaagaaaattttgagtgcactttgggaaaaactgaagccaaacggtgttttgctttatgcgacttgttctgtattgccagaagaaaattgcgaacaaatccaagcatttttaaatgctcacgcagatgcggagttattgtcattgccctttagtgatgataaaagtgcggtgggttttcaatttattccgcaaccaaatagtggcgatgggttctattatgcgaaattgcttaaacgagcatcataa

SEQ ID NO: 22058 - DNA, 1377 bp, Haemophilus influenzae
atgaaaattatcattttgggtgcaggtcaggtaggaacgacgcttgcagaaaacttagtcagtgaagataacgatattaccttagtggataatgaatctcctcagttacaaacattgcaagaaaagcacgatttgcgtgtggtacaaggctctccatcatctccaaaagtgcttcgtgacgcaggcgcggcagatgccgatttaatggttgctgtgacagcctctgatgaaatcaatatggtcgcctgccaaatgggctatacattatttaatacgccaacgcgaattgcacgtatccgtaattcagaatatttacgtgaaaaagacaagttgttcaacaatgaaaatattcctattgatcatttaatttcgcctgaaaatcttgtaactgatgaaattacacgtttaattgcttatccaggcgcattacaagttgcccattttgccaataatcgtattagtattgttgtagtgaaagcttattatgggggggctttggttggatatgcactttccgcatttcgcgaacatatgccacatattgattgtcgcattatgtctattttacgtaatggcaaaccgattcgtccacaaggctcaaccattgtagaagctggcgatgaaatcacgtttatttgcgctactgaacatattaaggcgataatgggagagttacaacgtttggagaaaccttataagcgagtaatgattgttggtggaggaaatgttgcttttggcgtagcaaaacgtttggaaaattcttgtactgtaaagcttattgaacgagattcaaacagagcgcaagccttagcagaaaagttgccaaaaacgttagtatttaatggagatgcctcagaccaaaacttgctttttgaagaacatattgaaagtgtggatgtatttctttcattaagtagcgacgatgaagcgaatattatgtcagctttgttagccaagcgtttaggtgcgaaaaaagcaatggtactgattcaacggattgcttatattaatcttattcagggaggcacgattgatattgcggtttctccacaacaagtaacgatttctgctttgttaggtcacgtgcgtaaaggcgatgtaaaaaatgtggcaacattacgacatggcattgccgaagccattgaaattgttgcacacggtaatgtgaatacttcaaatatagtagggcgaaaaattggtgagttgcgtttgccgatgggaatcattattggtgctttattacgagggaatgatgtaattattgctcgtcgtcaagtgattattgaagaaggcgatcatatagtgatttatttaagtgataagaaaaatgtgccagaaattgagaaattattccaaccaagcgcattctttatttag

SEQ ID NO: 22059 - DNA, 258 bp, Haemophilus influenzae
atgaaaaaatataataaacttcgcattgaatgggattgtcgccgaggaatgttagagttagataaaatcataatgcctttttatttgacgcattttcatgaattaacggatgacaaaaaagatatctttattcgtttattagcaagtacggatttgcagttattttcgtggttttttaatcttgcgaaatcacaagatgtagagcttcaaatgatggttgaatatattcaaaaagtgcagaaaatcatcataaattaa

SEQ ID NO: 22060 - DNA, 1185 bp, Haemophilus influenzae
atgtctaaagaaaaatttgaacgtacaaaaccgcacgtaaacgtgggtacaatcggccacgttgaccacggtaaaacaactttaacagcagcaatcacaaccgtattggcaaaacattacggtggtgcagcgcgtgcattcgaccaaattgataacgcgccagaagaaaaagcgcgtggtattaccatcaacacttcacacgttgaatacgatacaccgactcgccactatgcacacgtagactgtccgggacacgccgactatgttaaaaatatgattactggtgcggcacaaatggatggtgctattttagtagtagcagcaacagatggtcctatgccgcaaactcgtgaacacatcttattaggtcgccaagtaggtgttccatacatcatcgtattcttaaacaaatgcgacatggtagatgacgaagagttattagaattagtcgaaatggaagttcgtgaacttctatctcaatatgacttcccaggtgacgatacaccaatcgtacgtggttcagcattacaagcgttaaacggcgtagcagaatgggaagaaaaaatccttgagttagcaaaccacttagatacttacatcccagaaccagaacgtgcgattgaccaaccgttccttcttccaatcgaagatgtgttctcaatctcaggtcgtggtactgtagtaacaggtcgtgtagaacgaggtattatccgtacaggtgatgaagtagaaatcgtcggtatcaaagatacagcgaaaactactgtaacgggtgttgaaatgttccgtaaattacttgacgaaggtcgtgcaggtgaaaacatcggtgcattattacgtggtaccaaacgtgaagaaatcgaacgtggtcaagtattagcgaaaccaggttcaatcacaccacacactgacttcgaatcagaagtgtacgtattatcaaaagatgaaggtggtcgtcatactccattcttcaaaggttaccgtccacaattctatttccgtacaacagacgtgactggtacaatcgaattaccagaaggcgtggaaatggtaatgccaggcgataacatcaagatgacagtaagcttaatccacccaattgcgatggaccaaggtttacgtttcgcaatccgtgaaggtggccgtacagtaggtgcgggcgttgttgcaaaaatcatcaaataa

SEQ ID NO: 22061 - DNA, 984 bp, Haemophilus influenzae
atgcctcaaaatctaccgcacttttaccgcggccgtttttctgttgcaccaatgttagattggacaacacgccattgtcgttattttcatcgccaattttcaaagcacgcattactttacactgaaatggtcacagcaccagcgattatccacgcaaaatacgaccacttggattttgatttacaagaaaatcccgttgcgttacagctgggaggaagcgatcctgaacaactcaaatattgcgcaaaacttgctgaggaacgaggctatcacgaaattaatcttaatgtaggatgcccttctgatcgcgtacaaaatggaatgtttggtgcttgcttaatggcgaaagcagatttggtagcagactgtgtagaacaaatgcaaagtgcggtcaaaattccagtcactgtgaaaacgcgtattggcattgatgaattagacagctatgaatttttatgtgattttattgaaaaggttcaaggaaaaggttgccaagagtttattatccacgcacgaaaagcttggctttcaggcttaagtcccaaagaaaatagagaaattccgccattagattatattcgggtgtatcaactaaaacgtgattttccacatctaactattgcaattaatggtggtataaaaaccattgaagaaatgaagcaacatttgcaatatgtggacggcgtgatggttgggcgagaggcctatcaaaatccaagtttacttgggcaaattgaccaagccttatttgatcctaacgcaccaattgttaccgctcatgaagcggtagagtcaatgcttccttatattgaacaacaacttagccaaggaatacaccttaatcatatcgtccgtcatatattaggcgcattccaaaattgcaaaggtgctcgtcaatggcgacgctatttaagcgaaaatgcgtttaaacaaggcgcaggaattgaagtggttgaaacagccttaagctttgtagaaagctaa

SEQ ID NO: 22062 - DNA, 1005 bp, Haemophilus influenzae
atggcaaaaccaattgtttttagtggcgtgcagccttctggtgaattaactatcggaaattatttgggagcgttgcgtaactgggtgaaaatgcaagaagattatgaatgtattttttgcgtagttgatttacatgcgatcactgttcgtcaagatcctgttgcccttcgcaaagcaacccttgatgtgcttgcactttatttagcgtgcggaattgatccaaataaaagtactatttttgttcaatctcacgttccagaacacacgcaattaagctgggtgttaaactgttacacctatttcggtgaaatgagccgaatgacgcaatttaaagataaatcagcgcgttatgcagaaaatattaacgtgggtttgtttgattaccctgtgttaatggcggcggatattttactttatcaagcaaaaagcgtgcctgttggcgatgaccaaaaacaacacttagaaattacgcgtgatattgcaaaccgctttaatgcactttatggcaatattttcaccattcctgaaattttcattggaaaagcaggtgcgcgtattatgtcattgcaagatcctgaaaagaaaatgtcaaaatcagatgataaccgcaacaacgtggtgacacttttagaagatccaaaatctgtggcgaagaaaattaaacgtgccgtaacagattcagatgagccgcctgttgttcgttatgatgtgcaaaataaagcgggggtatctaatcttttagatattctttctgcggttacggataagccaattgctgatcttgaaaaagaatttgaaggtaaaatgtacggacatttaaaaactgcagtagcggatgaagtctcaaccctacttgctagtttacaagaacgtttccatcaatatcgtaatgatgaaactttattagataatatcttacgacaaggtgcggaaaaagctcgtgcaaaagcacaagaaaccttggcgaaagtgtatgaagcagtgggttttgtcgctgcaaaataa

SEQ ID NO: 22063 - DNA, 1371 bp, Haemophilus influenzae
atgcaactctctacactgaccgcactttcccctcttgatggtcgttatcaagataaagtaacgccattacgtgctatttttagcgaattcgggttaatgaaattccgtgtagctgtggaagttcgttggttacaaaaattagcttcaacggcagacattaccgaagtaccgccattttctacgcaagcaaatgcttttttagatggaattgtggctaattttaatgaggccgatgctgcgcgtattaaagaaattgaacgcacaactaatcacgatgtgaaagccgttgagtattttctgaaagagaaaattcaaaacgaagtggaactagtgaaggtttctgaatttattcacttcgcttgcacctcagaagatattaacaatctctctcacgcattaatgttaagcaccgctcgtgacgaagtgattttaccagaatggcaaaaactgattgatgaaattactcgtcttgcagaagaatataaaacgattccattactttctcgcacacatggccagccagcttcaccaagcaccgtgggcaaagaaatggcgaatgtcgtttaccgcctaaaacgtcaatttaaacaactccaaaatgcggaaatcttaggtaaaatcaatggtgcagtaggtaactacaatgcgcatttatcggcatatcctaatattgattggcataaattcagcgaagaatttgtcacttcattaggtattcaatggaatccttataccacacaaattgagccgcacgattacatcactgaattttttgatgctgtagttcgctttaataccattatcattgattttgatcgtgatttatggggatacattgcattaaatcactttaaacaacgaacgattgcaggcgaaattggttcttctaccatgccacacaaagtcaatccaattgattttgaaaactcagaaggcaatctaggattagccaatgcagtgatgacccatttaggtcaaaaattaccaatttctcgctggcagcgtgacttaacagattcaactgtattacgtaatttaggcgtaggattaggttattgtttgatcgcttatgcttcaacacgcaaaggcatcagtaaacttgaagtaaatcaaccgcacttattagaagaactcaatcaaaactgggaagttttggctgaaccaattcaaaccgtaatgcgccgctatggaatagaaaaaccttacgaaaaattaaaagaattaacgcgaggtaaacgagtgacagaacaggctatgcgtgaatttattgataagttggatattccacaagaagaaaaattacgtttacaaaaattaacacctgctacttatattggggctgcagtggaattagtagaaaaactatcatag

SEQ ID NO: 22064 - DNA, 492 bp, Haemophilus influenzae
atggcattaaatcttcaagacaaacaagcaattgttgctgaagtaaatgaagcagccaaaggtgcactttcagcagtaatcgcggattctcgcggtgtaactgttgagaaaatgactgaattacgtaaatcagcacgtgaagctggtgttacaatgcgtgtagttcgtaatactttattacgtcgcgcagttgaaggcacagattacgaatgcttaaaagatacgtttgtaggtccaacacttatcgcgttctctaacgaacacccgggcgcacgtgctcgtttgttcaaagagtttgctaaagcaaacgataagtttgaaattaaaggtgcagcctttgaaggtaaaatccaagatgttgaattcttggcaacattaccaacttacgaagaagcgattgcacgtttaatgggcacaatgaaagaagctgcagcaggcaaacttgctcgcaccttcgcggcattacgcgacaaattacaagaagcagcttaa

SEQ ID NO: 22065 - DNA, 372 bp, Haemophilus influenzae
atgtcattaactaacgaacaaatcattgaagcgattgcttcaaaaactgtaactgaaatcgttgaattaatcgcagcgatggaagaaaaattcggtgtttcagcagcggcagcagtagcagcagctccagcagcaggcggtgcagcggcagcagaagaaaaaactgaattcgacgttgtacttaaatctgcaggtgcgaacaaagtagcagtaattaaagcagtacgtggtgcaactggtttaggcttaaaagaagctaaagatttagttgaatctgctccagctaacttaaaagaaggcgtttctaaagaagaagctgaagcacttaagaaagaattagaagaagcgggtgcagaagtagaagttaaataa

SEQ ID NO: 22066 - DNA, 1371 bp, Haemophilus influenzae
atgacaaaaaaagcattaagtgcggtaattttagcagctggaaaaggaacgcgtatgtattctgatttacccaaagttctacatacaatcgcgggtaaaccaatggtaaaacacgtgattgatactgcccatcaattaggctcagaaaatattcatttaatctatggtcacggtggggacttaatgcgtacccatcttgcgaatgaacaagtaaattgggtattacaaacagaacaacttggcacagcacatgcagttcaacaagcagcacctttctttaaagataacgaaaacattgttgtgctttacggcgatgcaccattaattactaaagaaacattagaaaaattaattgaagcgaaaccagaaaatggcattgcattgcttaccgtaaatttagataacccaacaggctatggacgaattatccgtgaaaatgggaacgttgtagccattgtagaacaaaaagatgcgaatgctgagcaactaaatattaaagaagtcaatactggcgttatggtatctgatggtgcaagtttcaaaaaatggctagctcgtgtaggcaataataatgctcaaggcgaatattacttaacggatcttattgctctcgcaaaccaagataattgtcaagttgttgctgtacaagcaacagatgtcatggaagttgaaggcgcaaataatcgcttacaattagccgcacttgaacgttatttccaaaataaacaagcctccaaattattacttgaaggcgtaatgatctacgatcccgctcgttttgacctacgtggaacattagagcatggaaaagatgtggaaatcgatgttaatgttattatcgaaggtaatgttaaactcggtgatcgcgtaaaaattggcacaggttgcgtattgaaaaatgttgttattggcaatgatgtagaaataaaaccctattcagtgctagaggattctatagtaggagaaaaagccgcaattggcccattttctcgtttacgcccaggtgcagaacttgcagctgaaacgcatgtcggtaactttgtagaaattaaaaaatctaccgttggtaaaggttctaaagtaaatcacctgacctatgttggcgattcagaaattggctcaaattgtaatattggagcgggtgtcataacctgcaactacgatggtgcaaataaatttaaaacgatcatcggtgatgatgtgtttgtgggatctgatacacaattagtcgcgccagtgaaagtcgcaaatggcgcaactattggtgctgggactacaattacacgtgatgttggcgaaaatgaattagtgattacaagagttgctcaacgacatattcaaggttggcaacgaccaataaagaaaaaataa

SEQ ID NO: 22067 - DNA, 942 bp, Haemophilus influenzae
atgatcagagaaccttattttcatcaatttgctcttgcagaattattgcctttttttgagcaatttcctacccaatatctttctggtaaacgaaatataaaattagcttatcgtcatttgattcaacctgaaagtgcggtcagaaaattgatgattttagtaaatggtcgagcagaaaatatgctgaaatggtcagagctcgcttatgatttttatcatcaaggttacgatgtattgctatttgatcatcgcggtcaaggctattcacagcgtattattcctcaaaaagggcatttagatgaatttcgtttctatgtcgatgatatggcgaaaatcatcgaaaaagtaaccgcacttttcagctattcaacgcagcatttgcttgctcattcaatgggcgcattgattgcaacctattatttggcaaattatgatcatcacattaataaagcggtactttcttcgcctttttacggtattcttttaaaacatcccattagagatgaactgattattaccctaatgaatattttaggacaaggcgagcgttatgtttttggcaaaggtgcttatcaacaagcccacttggaatacaatgaattaactttctgtaaaaccagaatgaaatggatgaatcgtataaatcgtaaaaatccagcaattaatcttggcgggccaacattccgttgggtacatttgtgtttgaacgcaattaaacgcttgccgaaagttattcctaagattgaaattccaatcctaattttacaagccgaaaaagaaaaaatagtagataacaaaaatcttgaaaaattaaccgcactttttccgaatgctagatgtgaagtcatattaaatgctaaacatgaggtgttatttgaaaaagataatgttcgaagaaatgtacttaaaagtgttaatcattttctaaatgtgcaaagttga

SEQ ID NO: 22068 - DNA, 1116 bp, Haemophilus influenzae
atgaaaaatgtaggctttatcggctggcgcggaatggtgggttccgtattaatggatcgtatgtcgcaggaaaatgattttgaaaatcttaatcccgtattttttacaacttcacaagcaggtcaaaaagcacctgtttttggtggcaaggatgcaggcgacctgaaaagtgcattcgatattgaagaacttaaaaaattagacattatcgtgacttgccaaggtggcgattacaccaatgaagtctatccaaaattaaaagcaacaggttgggatggttattgggttgatgccgcttctgcgttgcgtatgaaagatgatgcaattatcgtgcttgatccagtaaaccaacacgtgatttctgaaggtttgaaaaaaggcattaaaactttcgtgggcggtaactgtaccgtaagcttaatgttaatggctatcggcggtctatttgaaaaagatttggtggaatggatttctgtggcaacttatcaagcggcttcaggtgctggcgcaaaaaatatgcgtgaattactttcacaaatgggtttattagaacaagcagtttcgagtgaattaaaagaccctgcttcatctattttagatattgaacgtaaagtgactgcaaaaatgcgtgctgataatttcccaacggataactttggcgcggcattaggtggtagcttaatcccttggattgacaaacttcttcctgaaacagggcaaactaaagaagaatggaaaggttatgcagaaaccaataaaattttaggtttaagcgacaatccaattcctgttgatggtttatgtgtgcgtatcggtgcattacgttgccatagccaagcgtttaccatcaaactgaaaaaagacttaccattagaagaaatcgaacaaattattgcatcacataatgaatgggtaaaagtgattccaaacgacaaagaaatcacattgcgtgaattaacgccagcgaaagtaacaggtacattaagcgtgccagtggggcgtttacgtaaattggctatggggcctgaatatttggcagcttttaccgtgggcgaccaattattatggggtgcggcagagccagttcgccgtattttaaaacaattagtggcataa

SEQ ID NO: 22069 - DNA, 2013 bp, Haemophilus influenzae
atgaaactcaatcctcaacaacaacaagccgttgaatatgtgacaggtccttgtcttgtgcttgctggtgcaggctctggcaaaactcgcgtaatcattaataaaatcgcccatttaattgaaaagtgcggttattctccgaaacaaattgccgccgtcacttttaccaataaagccgcacgcgagatgaaagagcgtgtggcacattccattggcaaagaacaatctaaaggcttgcttgtttccacttttcatacgctcggttttgacattcttaagcgtgaatataaagcgttgggctttaaatcaaatatgaccttgtttgatgagcacgatcaatttgcgttgttaaaagagctaaccgctgatgtgttaaaagaagataaggatttattgcgcgagttaatttcagtgatttctaactggaagaatgatttgatttcgccaaaacaggcgtttgcgttggcgcgtgatgctaaatatcaaactttcgcaaaatgttatgaacgttacgccacacaaattcgaacttacaatgctcttgattttgatgatttgattatgcttccgacgttgttgttcaagcaaaatgaagaagtgcggtcaaaatggcaggcaaaaattcgttatttgttggtggatgaatatcaagataccaataccagtcaatatgaactgattaaacttttagtgggtgatcgtgcttgtttcactgtggtgggcgatgatgaccaatctatttattcgtggcgtggcgcacgaccagaaaatatggtgcgtttacgcgatgatttccctcgtttgaacgtgattaagctagagcaaaattaccgttcaacccagcgtattttgcattgtgccaatattttgattgataacaatgagcacgtgtttgataagaaacttttttcaaccattggtaaaggggaaaaattgcttgtcatcgaagcaaaaaatgaagaacacgaagcagagcggattgtcgccgagttgatcgcccatcgttttagccgtaaaaccaaatataaagattatgcgattttgtatcgaggcaatcatcaatcccgattactcgaaaaagtactgatgcaaaaccgtattccttacaaaatttcgggcggtacttcttttttctctcgtgcagaaatcaaagatatgatggcgtatttacgcttggtggtaaatcaagatgatgacgcagcattcctgcgtattgtaaatacaccgaagcgtgaaattggcaccgcaaccttacaaaaacttggcgagttggctcaagaaaaacacatcagtttgtttgaggctatttttgagtttgagcttattcaacgcatcacgccaaaagcctatgattcattgcaaaaatttggtcgatggattgtagaacttaatgatgaaattcaacgttctgaaccagaacgtgcggtacgttctatgttatctgcgattcattatgaagaatatttgtacgaatacgcgacaagccctaaagcggcagaaatgcaaagtaagaatgtcgccacgctatttgactgggttgcggatatgttaaaaggggatgaaaccaatgagccgatgaaccttaatcaagtggtaacccgcctgacattacgggatatgttagagcgaggcgaagacgatgatgacagcgatcaagttcaactgatgacattacacgcatccaagggattggaattcccttatgtttatttgattggtatggaggagggcattttgcctcaccaaactagcattgatgaagacaacgtggaagaagaacgccgcttggcttatgtggggatcacaagagcgcaaaaagaactcactttttccttatgtcgtgagcgtcgtcaatatggcgaattagttcgcccagaaccaagccgatttttagctgaattacctaatgacgatgtgctatgggaacgcgataaaccaaaacttaccaccgagcaaaaacaagaaaaaacacaaaaccaacttgatagattgagggcgattttgaaaagttaa

SEQ ID NO: 22070 - DNA, 819 bp, Haemophilus influenzae
atggatctttatgctgtgtggggcaatccgattgcgcaaagtaaatcgccgttaattcaaaataagttagccgcacaaacccatcaaactatggaatacattgcaaaattaggcgatcttgatgcttttgaacaacagcttttggcattttttgaggagggtgcgaaaggttgcaatattacttcgccttttaaagaacgcgcttatcagctggcagacgaatatagccaacgagcaaaactggcggaagcctgtaatacgctaaaaaaactcgatgatggaaaactttatgcggataacactgatgggattggcttagtgacggatttacaacgtttaaattggcttcgtccaaatcagcacgtattaatcttgggggcgggcggagcaacaaaaggcgtattattgccacttttacaagctcaacaaaacattgtgcttgctaaccgcactttttcgaaaaccaaagaattagctgaaagatttcagccttacggcaatattcaagctgtctctatggattcgattccgctacaaacttatgatttggtgattaatgcaacttccgctggattaagtggtggaacggcttcagttgatgctgaaattttaaaattgggctcggctttttatgatatgcaatatgcgaaaggcacagacacgccatttattgcattatgcaaaagtttaggtttaaccaatgttagcgatggctttggaatgttagtcgcacaagcagcacattctttccatttatggcgaggcgtaatgccagattttgtctcggtttatgaacagcttaaaaaggcgatgttatga

SEQ ID NO: 22071 - DNA, 1917 bp, Haemophilus influenzae
atgattatatttagtaacttatccttaaaacgagggcaaacggaacttctcgaaaatgcgtctgctacgattaatcccaagcaaaaagtcggtttggtggggaaaaatggttgtggaaaatcttcgctttttgccttattaaaaaaagaattaatgccagagggcggtgaggtgaattatccagcaaattggcgggtatcttgggtaaatcaagaaacgcctgcattggatatttctgcgattgattatgtgattcaaggggatcgtgaatattgccgtttgcaacaaaagcttgaacgtgcaaatgaacgcaatgacggtaacgccattgcacgcattcacgggcaattagaaaccttggatgcgtggacaattcaatcgcgtgccgcgtctttattgcatggtttaggatttagccaagaagaaacaatacagccagtgaaagccttttcgggcggttggcggatgcgtttgaatttggcacaggcattgctttgtccgtcagatttattattactggatgaaccgacgaaccatttggatttggatgcggttatttggttggaacgatggttagtgcaatatcaaggcactttagtattaatttctcacgatcgtgattttcttgatccaattgtgacaaaaatcctccatatcgaaaatcagaagctcaacgaatacacgggcgattattcttcctttgaagtgcaacgagccactaaactggctcaacaaacagcgatgtatcgtcagcaacaacaaaagatttcccatttacaaaaatatattgatcgctttaaagccaaagccactaaagccaaacaggcacaaagccgtatgaaagcactagaaagaatggagctgattgcacctgcttatgtggataatccttttacttttgaatttcgtccaccgcaatccttgccgaatcccttagtgatgattgagcaagcgagtgcaggttatggcatcggcgaaagtgcggtagaaattttaagtaaaattaaactgaatttagtgccaggttcgcgcattggtttactcgggaaaaatggtgcaggaaaatcaacactgattaaacttttagcgggagaactgaccgcactttcaggcacggtacaattagctaaaggtgttcaacttggttattttgctcagcatcaattagatactttacgcgcagacgaatctgctctgtggcatatgcaaaaactcgcgcctgagcaaacggagcaacaagttcgggattatttaggcagttttgcgtttcacggcgataaagtaaatcaagcagtgaaatctttttctggaggagaaaaagctcgtttggtgttggctttgattgtttggcaacgcccgaatttgttactacttgatgaaccgactaaccatttggatttggatatgcgtcaagcattaacggaagcattggtggattacgaaggttctttggtggtggtgtcgcacgatcgtcatttattacgcaataccgtggaagaattttatttagttcacgataaaaaagtggaagaatttaaaggcgatttagaagactatcaaaaatggctgagtgaacaaaacagtacgtctgaaaataaagtttcggaaaaagtgggcgataatgaaaattcggttcaaaatcgcaaggaacaaaaacgccgtgaagcagagttacgccaacaaactgcaccattacgtaaaaaaatcacgcaattagaagaaaaaatgaataaattttcttctgagcttgcgaacatagaaaatcaactggcagataccgaattatataatgccgaaaataaagaaaaattgaccgcacttttggctcaacaagtggatgtgaagaaagcattagatgatgtagaaacggaatggatgactgcacaggaagaattggaagaaatgcttcaagcataa

SEQ ID NO: 22072 - DNA, 1002 bp, Haemophilus influenzae
atgaatcgagcattagccattgaattttcacgagtaacagaagccgccgctctagcagcttacacgtggcttggtcgaggagataaaaatgcggcagacgatgcagcggtaaaagcgatgcgttatatgctgaatttaattcatatggacgctgaaatcgttataggagagggcgaaattgatgaagccccaatgctttatgttggcgaaaaagtcggttctggcttaggggaattagtttctatcgcagtagatcctattgatggtacacatatgaccgcaatggggcaatctaatgccatttctgtcttggctgcaggtggcaaaaatacctttttaaaagcacctgatatgtatatggaaaaattagtggtgggttcaaatgtaaaaggcatcattgatttaaatttaccactggaacaaaatcttcgccgcatcgcatctaagctaggaaaatccctttctgaccttaccgtaatggtattagcaaaaccacgtcacgatgctgtaattaaacaaatacataacttgggcgcgaaagtattggcaattcctgatggcgatgtggcaggttctgtgctttgctgcttacctgatgctgaagtcgatcttctttatggaattggtggtgcgccagaaggcgtggcagctgctgcagccattcgagcattaggtggtgatatgcaagctcgtttaatcccacgcaatgaagtaaaaagcgacaccgaagaaaataaaaaaattgcagctaatgagattcaacgctgtgcagcactgggcgtaaaagtgaatgaagtgttaaaacttgaagatctcgtgcgtgatgacaatcttgtatttactgcaacaggcattaccaatggcgatttgcttaaaggtatctcccgcaaaggcaatttagccagtactgaaaccattttaattcgaggaaaatcccgcacaattcgtaaaattcaatccattcattatttggatgacctttataaaattttgaatatttag

SEQ ID NO: 22073 - DNA, 477 bp, Haemophilus influenzae
atgatcagaattggacacggctttgatgttcacgcttttggcgaagatcgtccattaattattggtggtgtagaagtgccttatcatacgggctttattgcgcactcagatggcgatgtggcattacacgcattaactgatgcaatcttaggggctgcggctttaggcgatattggaaaacttttccccgatactgatatgcaatataaaaatgcggatagtcgaggcttactgcgtgaagcgtttcgtcaagtacaagaaaagggatataaaataggtaatgttgatattaccatcatcgctcaagcacctaaaatgcgcccacatattgatgcaatgcgtgccaaaatagctgaagatctccaatgcgatattgagcaagttaatgtaaaagcaacgactaccgaaaaattaggctttacaggaagacaagaggggattgcttgtgaagccgttgctcttttaatccgacaataa

SEQ ID NO: 22074 - DNA, 678 bp, Haemophilus influenzae
atggctcgttcaattattgcggtcttgccagctgctggtgttggttcacgaatgcaagcggataaaccgaaacaatatttaacgctgcttggcaaaacactgcttgaacatacactcgatgtgatgctttcttatcctgccgtatctaaaattatcttggcggtaagcaaagatgatccttatatttctacactatcgctcgatcctaaaattcagttagtggaaggtggcacaacgcgagctgaatcggtcttaaatggtttaaatgcaattgcggaaaaaaatgcctgggtgcttgttcatgatgctgctcgcccttgtttacaacatgctgatattgataaattgttagctattgaagataaacaaggtgcgattttggcaatcccagtaacagatacgattaaacgagcggacaatcagcaatgtattgtaaaaacagaagatcgtagccagctttggcaagcaatgacaccgcagtttttcccagtagatatattaagagatgcgctttccacaggaattcaacaaggtgcgaatataacagatgaagcatcagcaatagaacttgctggatttcgaccgcacttagtggctggacgtagcgataatttaaaagtcactcgtcctgaagatttagcattagcagaattttatttaacaaggaataaattatga

SEQ ID NO: 22075 - DNA, 888 bp, Haemophilus influenzae
atgctaacagcgttaaatcgttattgggattatttgcggattgaacgccaaatgagtcctcacacaatcactaattatcaacatcagcttgatgccaccatcaaaatcttagcgcaacaagatattcattcttggacacaagtgacgcctagcgtggtgcgctttattttagcggaaagcaaaaaacaaggcttaaaagaaaaaagcttggctttgcgtttatctgcattgcgtcgatttctcagttttttagtgcaacaaggcgaattaaaagtaaatcctgccacaggcatttctgcaccgaaacaaggcaggcatttaccgaaaaatatggatggcgagcaagttcaacaattgcttgccaacgatagcaaagagccaattgatattcgtgatcgtgctattttggaattaatgtatagttcaggtttgcgtttatctgaattacaaggcttagatttaaacagcattaatacccgtgtgcgggaagtacgcgttattggaaaaggtaacaaagaacgagttgtgccgtttgggcgttacgcttcgcatgccattcaagaatggttaaaagtgcgggcattatttaacccaaaagatgaggcattatttgttagccagcttggaaatcgcatttctcatcgagctattcaaaaacgtttagaaacttggggtattcgtcaaggcttaaatagccatcttaatccgcacaaattacgtcattcttttgcgacgcatatgttggaagccagttctgatttacgcgccgtgcaagaattgcttgggcatagcaacctttccaccacacaaatttatactcacttaaatttccaacatctggcagaagtgtacgatcaggcgcacccaagagcgaaacgaaaaaaataa

SEQ ID NO: 22076 - DNA, 1479 bp, Haemophilus influenzae
atggctaactatttcaacacattaaatttacgtcaaaaattagaccaattaggtcgttgtcgttttatggatcgcgaagaatttgcagatgaagcaaacttcttaaaaggcaaaaaaatcgttatcgtaggctgtggtgcgcaaggtttaaaccaaggtttgaatatgcgtgattctggcttagatattagctatgccttacgccctgaagcgattgcagaaaaacgtgcgtcattccaacgtgcaaccgaaaatggttttaaagtgggtacttatgaagaattaattccaactgcagatttagtcgtaaacttaacaccagacaaacaacactctaaagtagttgccgatgtcatgcctttaatgaaaaaagactctgcatttggttattcacacggtttcaatattgttgaagttggcgaagaaatccgtaaagatattacggttgtgatggttgcgccaaaatgtccaggtactgaagttcgtgaagaatacaaacgtggtttcggtgtgccaacattaatcgcggttcatcctgaaaatgacccgaaaggcgaaggcatggcgatcgcaaaagcatgggctgctgcaactggcggtcataaagcgggtgttttagaatcttcattcgtggcagaagtaaaatctgacttaatgggtgagcaaactatcctttgcggtatgttacaagcaggttctatcgtatgttatgacaaattagtggcagatggtaaagatccagcatacgcaggtaaattaatccaatacggttgggaaaccattaccgaggcattaaaacaaggcggcatcacattaatgatggatcgcctatcaaacagtgcaaaattacgtgcatttgaactagctgaacaaatcaaagaaagccttggtttcttatattacaaacatatggatgacatcattagcggtcacttctctgcaacaatgatggcagactgggcaaatggcgacaaagatttattcgcatggcgtgaagcaacaggtaaaacagcctttgaaaatgcgccaaaatatgatggcaaaattagcgaacaagaatattttgataacggcgtattaatgatcgcaatggttaaagctggtgtagaattagcctttgatgcgatggttgcaagcggtatttatgaagaatcagcttactacgaatcacttcacgaattgccattaattgcgaacactatcgcacgtaaacgcttatacgaaatgaacgtggtaatttctgataccgcagaatatggtaactacttattctctaacgtagcgaccccaattcttgcaaaagaaattatccctaaccttcaaaaaggcgatttgggcgagccaactccagcagtggaagtcgataacattaccttacgtgatgtaaacgatgcaattcgcaaccaccctgttgaattaatcggtcaagaattacgtggttatatgacagatatgaaacgtatcgcagtcgcaggttaa

SEQ ID NO: 22077 - DNA, 1281 bp, Haemophilus influenzae
atggataataatattcaacgactcattgatagtgcaaaacaatcccttaattcgcctgaaagctataaatatattgatgaaagttttgaaagctgtattaaatgtactgcttgtactgctgtttgtcctgtttcacgtaataatccgctttatccagggccaaaacaatctggcccagatggtgagcgtttacgcttaaaatctgctgaactttatgatgaagcacttaaatattgcaccaactgtaaacgttgtgaagtggcttgtccgtctgatgtgaaaattggcgatttaattgtacgtgcgcgtaataatcacttagcgcagtctaaaaaaccgttaatgaataaattgcgtgatgcgattttaagtaacacagatgtaatggggaaaatcaatactccacttgcccccattgtgaacaccattacgggtctgaaagccaccaaatttatgttggaaaaaacccttaatatcagtaagaaacgtactttacctaaatatgcgtttggtacgttccgtagctggtatatgaaaaatgcgctacaagaccaacaaaaatttgagcgaaaagtagcatatttccacggttgttatgttaattataataatccacagcttggcaaagaattccttaaagtgttcaatgcgatgaatattggggtaatgttattagaaaaagaaaaatgctgtggcttaccattaatggtaaacggttttcctaatcgcgctcgtaatattgcacaattcaataccgattacattggaaaaatggtagatgaaaatggaatagatgtgattagtgaggcatcaagttgttcacttaatctgcgtgacgaataccatcatattttaggtatcgataacgccaaagtccgtccgcatatccatatggtaaccccatttttatatcagcttttcaaagaaggtaaaacattaccgttgaaaccacttaaacttagagtggcttatcacaccgcttgtcacgtagataaggcgggttgggcaccttatactttggaagtgttgaaaaaaattccgagtttagaaatcattatgttacctagccaatgctgtggtattgctgggacttacggttttaaatcagaaaactatgaaatttcacaatctattggtaaaaatctattcgataatattaacgagggtggatttgattacgttatatctgaatgtcaaacctgtaaatggcaaattgatatgtcatctaacgtgacttgtattcatccattaactttactttgtatgtcgatggatgcttaa

SEQ ID NO: 22078 - DNA, 915 bp, Haemophilus influenzae
atgaataatgaaaatatggtaagagttttctatgtcttattaatggggttaggatttcctattatgagatttatgagtattcattttgaaactttaaataataattctgttagatttttatctggaggatcattatttgttattatttgcttaattaaatttagaagtgagttaaagaaaataattggtgaacctaaaattattctttatttatttatttatttatttattttaggtatttttatgactggaaatatgtttttctttattaatggtttgaaatatacctcagcattggcaggaagtatctttggaatacttgctatgcctttagcaataattatagctggaatattctttaaagatgaaagagatcgtataagacaaaaagaattttatattggagaattattagcaattattggttcgctaatattcgtaataaatagttcaaataatgatggaaatacagacttttttcttggggcaatatttctttttacagctatttttattcaatctgtacagaatttaattgtaaaaaaagtagccaaaaagataaatgctgttgtaataagtgcatcgacagcaacaatttcaggagtattatttttatgtttagcttttaatactaaacaaatatatttattacaagatgttggcattggaatgttgataggtttagtttgcgctggcttttatgggatgctaacagggatgttgatggctttttatattgttcaaaaacagggaatcactgtttttaacattttgcaattattaattcctctttcaactgcgataataggttacttaacattagatgaaagaataaatatctatcagggaattagcggtattattgtaattattggttgtgtattggcattaaaaagaaaaaacaaggagtgttga

SEQ ID NO: 22079 - DNA, 795 bp, Haemophilus influenzae
atggataaatcattaaaagcgaactgtattggcgagtttttaggtacagccttattgattttctttggtgtgggctgcgttgcagcactaaaagtagcaggcgctagttttggcttgtgggaaatcagcattatgtgggggatgggcgttgcacttgcagtatatgcaacagcgggtttatctggtgcacatctaaaccctgcagtaaccattgccctttggaaatttgcttgctttgatggcaaaaaagtaattccttacatcatttcacaaatgctcggcgcattctttgctgccgcattagtttatgccttataccgcaatgtttttatcgattatgaaacagtccacaatattgttcgtggtacacaagaaagtttaagccttgcgggtacattctccacttatcctcatccaagtttaagcattggtggcgcctttgctgtggaattcgtgattactgcaattcttatggcattaattatggcattaactgacgatggaaacggagtacctcgtggtccgcttgccccattattaatcggtatcttgatagccgttattggtggtgctatgggaccattaactggttttgccatgaatccagcacgtgacttcggaccaaaattctttgcttatctcgctggctggggcgaactcgctttaactggcggacgcgaaatcccttattttatcgttccaatggttgcacctgttttaggtgcattagctggtgcatggttatacaaaaaagcaattggcggcaatttaccttgtaattgcggctgcgaataa

SEQ ID NO: 22080 - DNA, 1512 bp, Haemophilus influenzae
atgacagacaaaaaatacatcattgcattagaccaaggcacaacaagctctcgcgcagtattattagatcataatgcgaatgtggttgaaattgcacaacgtgaatttacccaaatctaccctcgagctggttgggtagaacataacccaatggaaatttgggcaactcaaagctcaaccttaaacgaagtcgttgcaaaagcgggcattacatctgatgaaatcgctgctatcggtatcaccaaccaacgtgaaaccaccattgtatgggaaaaatcaaccggtacacctgtttacaacgcgatcgtttggcaatgccgccgtactgcagacattaccgataaattaaaagccgatggccatgaagaatatattcgtaataccacaggcttagtggttgacccttacttctctggtacaaaagtaaaatggattttggataacgttgaaggagcacgagaaaaagctgaacgaggcgaattattatttggtaccgttgatacttggcttgtatggaaattgactcaaggccgagtgcacgtaaccgattataccaacgcatctcgtaccatgttatttaacatccatactaaacaatgggatgacaagatgcttgaaatcttgaatattcctcgttcaatgttacctgaagtacgtaattcttctgaaatttacggccaaaccaatatcggtggtaaaggtggtgtgcgtattcctgttgcagggattgctggtgaccaacaagccgctctttacggacatctttgcgtacatgcaggccaagccaaaaacacttacggcacaggttgttttatgttactccacacgggtaacaaagctattacatccaaaaatggactactcacaaccattgcttgtaatgcaaaaggcgaaccagaatatgccttagaaggttctgtatttatcgcgggtgcatcaatccaatggctccgtgatgaactcaaaattgttcacgatagttttgactctgaatactttgcacaaaaagtgactgatagtaatggcgtatatgttgttccagctttcacaggcttaggtgcaccatattgggatccatatgcacgcggtgcgatttttggtctttctcgcggcgcaaaccgtaatcatattgttcgagcaaccttagaatctattgcttaccaaacccgtgatgtcttagaggctatgcaatcagattcgggtgaacgattacaatatctccgtgtagatggtggcgcgacaaacaataacttcttaatgcaattccaagctgacattttagatgtaaatgtagagcgtccagttgtgaaagaagtaacagcgctaggcgcagcttatcttgctggtttagcaacgggcttctggaaagatttagacgagcttcgcgataaagctcgtgtagaacgcaccttcagtccagacagcgacaatgaaaaacgtgaacgtcgctacaaaggctggaaaaaagcagttaaacgctcattagaatgggcaaaagaagatgaagaataa

SEQ ID NO: 22081 - DNA, 3897 bp, Haemophilus influenzae
atgacagaacaaatacaaccatcagaaacttcaccaaaatcacctgagaaacctaataaaaaacattgggtacgcaaggctgtttgtatcggaagtgcggtcattttggtgcctgttttaggtgttgctggggcactttctttcgatgcagggcaaaaaagtttaattcaacttgtcgataaaatgcttgatagtttttccgttgagcaagttgaaggcggattacaaaatggcttggtgttaaagaatgttcgttatcaaaccgctgggattgagacacatattgcacaagcacgtttacagctcgattttggttgtttgttttcacgtgaagtttgtttacgagacttcaccttaaataaaccgacgattgcgattaatactgcattattgcctccatcggcacctgataattcaaagtctggctcaatgaagcgtatttccttgccaattagtatcaatgcagaaaatttggtgatgcaagatttatctgtaaacattgatcagactagtattacgcttggaaattttaaaagtgcggtaagtttaaataatgaaaaaggcttaactattgcgccgactgaaattaacgatatttcagtgattgcaaaaaaattgtctgaagttaaatcagagccgaaagccgaacagccgaataagcctgtagattgggctgcgattgagcaatctttaacgcctgcttttttaggcaatgtatcagaaatcattcttccttttgatttacatattcctgaaatttcaggcaaaaactggcagtatcaagcagtgaatgaaaaaggcgaaacgcttcaatctgttgaaatgtctagtttaattgcacaggcggataccgtcgataaccaactgcaattacaaaaattagcggtagaaagctcgttgggtaatctttcttcacaaggtaaattacaactcgatggcgatatgcctctcgatttaactttaaaatcccatttggagccattgaaatccgatggaaaagaaattctgcccgcgagtgatgtggatcttacgctttcgggatcattgaaaaaatccaccgcactttctttgaaaacaaaaggcgtgttagatgctgaactgaatggcaacgtgcaattagcacaagacaaaatgcccttaaacctcacattaaatgtggcaaaaggacaatacacttttgtaaacacaatgacgccactcaaaattaatgatgtgacgcttaaactcacaggggatttactaaattatcacgctgaacttaagggcgatgtagcaggaatgaattatattcccgcatctcaagtggaacttaatgccgacggcaaactttatgaagtcaccgtcaataaattggggatagattcattagacggtaaaagtgaatttgtgggtaatgcgaattggaaaaatggtgcaaactgggatattcaagccgatttagaaaaaatgaatattgctttttttgttcctgtaatgcctgcaacactatctggtaaattgcattcacgtggttttgcaggctctcaaggatggcaagtagaagtgccagtagccgatttaaacggaatgctttctgcaaaacctatcagtttaaaaggttctgcaacgctcaatcaaaatgtacttctaacagtgcctgatttacagattaaatatggcgaaaattatcttaaagccagtggcgtattagatgatcattctgattttgcgctagatataaatgcgccaaatttacgtggattatggtcagatttaaaagggcgagtaaaaggtcgagtagcgatttctggtcaaattacgacacctaatcttgatcttgatttaacttcatctaatttacatttacagggttttcagttagccaaagcaagtataaaaggtcatataaacaatgcctcactctcgagtggaaaattgaatattaaagcagaacaacttcattatggcggaaatattaaactccatttacttgatcttgatttatcaggcgatgaacaaaatcacaaactaatcctaaaatctcaaggcgagcctgttgctgcaaatttacaaattaacggacattttgaccgcactttggagcagtggaaaggcacaatttcacaggtaaaatttgaaactccgattggcgatgtaaaatccaaccaagcgattgcggtgtcctacgataacaaacaaacacaagccaatattgcctcacattgctggcaaaacaccgatgtagaattatgtttcccacaagcattcaatgcaggcaagcaaggcaatattcctttccaatttaaacgtgttaatttggatttagtgaataaacttatcgaacaaaacagcctcaaaggcaatttacaagtgcaaggaaatgtggcttggtttacggataaaccattccaatttaccgccaacgtagatggcaatcatttagccttctctcaaaaattggattaccgtacatttaaattgtatattccaaaattaacccttaacgccgacattcaaaataataatttggttttaaaaacagacatcaatgtgcataaccaaggcagaattgtaggcgatattcatttaaacgatcttgcgaaaaatcgccaacttggcggaacccttgcgatagaacgattaaacttgtcgatcgcaaatcagctacttactagcggtgaatcagtgaatggtgaggtagtatcgaagttgagtttcggtggaaatttagagaaaccattattaaatggtgacttcaatattcgtaatattcgtaccaaattaaaatctatgccagtcaatattactgatggcgatattgctctacgctttaatgataaccgttcaacattgcaagggaaaatcaaaacagtagatagtcacttaaacttaactggacgtgcaaactgggcgaatattgaacattggacaacagaattaaatgcgcaagcaaataatttcaacgtggatattccttctatggcgaagctacgtttcagtccaaatatcacgataaaagccaatccgaaggaattgaatttaagcggaacagtggatattccttgggcgcgtattaaaattgacagtctgccagatactgctgagccagtgagtgaagatgaagttattttaaatggcccgcacaagagcaaagaagaactgattaaacgtgaatttgccgcaaaaacaaaatcaggaatggaaattcgctctgatttacgcatcaatattggtaaagacgttagccttgatgcctatggcttaaaaaccaatcttgatggtttactttctgtgaaacaagataaaggcaatttaggtttatttggtcagattaatttaaccaaaggtcgctatgcttctttcgggcaagatttactgattcgtaaagggcttattagcttttctgggcaagcgacacaacctacattgaatattgaggctattcgtaatcctgaaacaatggaagacagcaaaattactgctggcgtgagagtgattggcatagctgatagcccagaagtcactattttcagtgaaccaagcaaaccacaagatcaagcactttcttatttattaacaggtcgttcgttagaaagcagcggagaagtgggttcaacgggatcagttggtgcagcattaattggtttaggcatttcaaagagcggtaaattagtgggcagtattggcgaagtttttggtattcaagacttaaaccttggtacatctggcgtgggcgataaatccaaagtgacggtaagtggtaatattaccaatcgcttacaaataaaatatggcgtaggtttatttgatggcttagcagaagttacattacgttatcgcctaatgccacagctttattttcaatccgtttctagcacaaaccaagtgtttgatttgctttataaatttgaattttag

SEQ ID NO: 22082 - DNA, 2586 bp, Haemophilus influenzae
atgatttccgaagaaaatttccaacaacatacgccaatgatgcagcaatatctaaaactcaaagcggagaatccagatattttgttgttttatcgcatgggggatttttacgagttgttttatgacgatgcgaaaaaagcggcggcattgttggatatttctttgacgaaacgaggtcaatctgcaggacagcccattccgatggcaggaatgccttatcatgcagtggaaggttatttagcaaaattagtgcagttaggcgaatctgtggcgatttgcgaacagattggcgatccaacgacgagtaaaggaccagtggaacgtcaaattgtgcgaattgttacacctgggacagtaagcgatgaagcgcttttgcctgaacgccaagacaatctgattgctgcggtatatcaagagaaagaaaaatttggattagccactttagatatgacctctggccgttttcagctttgtgaacctgcggacaaagaaactttgcgtgcggaattgcaacgtattgcacctgtggaattgctttattgtgaagaatttaatgaaatggctgcgattgaacattgtaagggattacgccgtcgcccgatttgggaatttgaacttagcaccgccattacgttattaaatcgtcaatttggcacaaaagatttacgtgcctttggtgtggaaaaatcccctctaggcttaagtgcggctggttgtttattgcaatatgcaaaagaaacgcaacgtaccgcattaccccatattcaaagcattagcttgattcaaaatcaagactgcattcagttagatgccgccacgcgcagaaatcttgaattaacacaaaatcttgcaggtggcacagaaaatacgctagcgtctgtattggataaatgcgtcacgccaatgggcagtcgcttattgaaacgttggattcatcagcctgttcgtgatgtggaaaaattaaaacaacgccaacaatcgattgcggaaattctgaattttgatttagtcgatgaacttcagccttatttgcaattagtcggtgatatggagcgtattttggcacgtgttgcgctacgttcagcacgtcctcgcgatctcactcgcttacgcacggcgttagaacaaattccagcattacgcgcgattgtgcaacaaaaaacaccgccatttttaaccgcacttttcagccaaattgctgatttcagcgagcagtgcgatttattgcaacgtgcattgattgaaacgcctccgcttttaatccgtgatggtggcgtgattgctgaaggatacaatgcagagttagacgaatggcgtatgctctctgatggtgcaactcaatatttggaaaacctagaaaaacgtgagcgtgaaagcacaggcattgatacgctaaaaatcggttttaatgcagtgcatggttattacattcaaattagccaaggccaagcacataaagcacctattcattatgttcgccgtcaaaccttgaaaaatgcagagcgttatattattcccgaactcaaagaatatgaagacaaagtgctgaaatcaaaaggcgcagcgttagcattagaaaagcaactttacgatgaattatttgatttattattaccgcacttaggttcattgcaactggcgagcctcgcactttctgaattggatgtattggtcaatcttgccgagcgcgcagacaccctcaattacgtgatgccaacattctgtgatgaagtgagtgtgaaaattaaaaatggtcgccatcctgttgtggaacaagtattgaaagatcctttcatcgccaacccagtggaactcaatcacaatcgtcatttattagttatcactgggccaaatatgggcggtaaaagcacttatatgcgccagaccgcattaattacattgctggcgtatatcggcagttttgtgccagcagacagcgcgcgaattgggccgattgatcgtattttcactcgaattggtgcgtctgatgatttagcctcggggcgttcaacctttatggtggaaatgacggaaatggcaaatattcttcatcaagctacagcgcaaagtctcgtgcttattgatgaaattggtcgtggtacatccacttatgatggcttatccttagcttgggcttgtgcggaatggttatccaaaaaaatccgctcgcttacattatttgccacccattattttgaattaaccgcattgccagaacagctagaaggcattgccaatattcatttagatgcccttgagcataacaacaccatcgcctttatgcacgccgtacaaaatggcgcagcaagtaaaagttatggtttggcagtcgcggctttggcaggcgtgccacaatccgtcattaaactagcaaagcagaaattgacacaattagaaaaaaactcaagctattcagccgaacagcaaattcaagcgttgcgtgaagccaatcacaatcagggcgaattattctttgaacaagaaacggatgcactaagagaggctattgaaaagctggatcctgatgatttaagccctaaacaagccttggcgtatttgtatcagttaaagaaaatggtggggtaa

SEQ ID NO: 22083 - DNA, 1236 bp, Haemophilus influenzae
atgacagacaaagataaagatttgcactgctctttttgcggaaaggaaaaaggcgaagtagatagattaattgctggcacagacggttatatttgtaatgaatgtattgaactttgtcactcaatgcttgaagaaagtcatgataaaaatttagaggaaagtgcggtagaaaatgaagaaaaattaccaacacctcacgaaattcgcgctcatctagatgattatgttatcggtcaagattatgcgaaaaaagtgctttctgtggcagtttataatcattataaacgcttgcgaactaactatgaaagcaatgatgtagagcttggtaaaagtaatattttacttataggccctacaggtagcggaaaaacgttacttgcgcaaacattagctcgtcgtttaaatgtaccctttgcgatggcggatgcaaccacattaacggaagctggttatgtgggggaagatgtggagaatgtgttacagaaacttttgcaaaattgtgaatacgatactgaaaaagcagagaaaggcattatttatattgatgaaattgataaaattagccgtaaatcggaaggcgcatcaattactcgagatgtttcaggagagggggtgcaacaggctttattaaaacttattgaaggtacaatcgcttccattccacctcaaggcggtcgtaaacatccacaacaagaaatggtaaaattggatacgtctaaaattctctttatttgcggcggtgcatttgcaggattagataaaattattgataaacgcactcaaaccagtacgagtattggttttaatgccaaagttgaaaaagatgaaaaacaacaatctctttctgaattattccgtcaagttgaacctgatgatttaatgaaatttggtttaattccagaatttattggacgcttgccaatgattgctccattaagtgaattagacgaagatgcgctgatacaaattctcacaaaaccaaaaaacgcattaattaaacaatatcaagccttatttggattggaaaaagtagaattggatttcacaccagaagcattaaaagcaatggcgaaaaaagcacttgaaagaaaaacgggtgcgcgtggcttacgttctatcgtagaagcagtgttgttagatacaatgtatgatctaccgtctcttgagaatttacaaaaagttatcgttgatgaatcgacaattgtagataatcttgcaccaaaattagaatattag

SEQ ID NO: 22084 - DNA, 321 bp, Haemophilus influenzae
gtgatcttttttgctgctgcggcaattgggaatatttatttccaacaaatctattctttaccgattcgtgttattggtatggctattgcattagtcattgcatttattttagcggcaattactaatcaaggaacaaaagcacgtgcgttctttaatgactctcgtacagaagcgcgtaaagtcgtatggccaacccgtgctgaagcgcgtcaaacaacattgatcgttatcggggtaacaatgattgcttctctcttcttttgggcagtagattcgattattgtgacagtgattaatttcttaactgatttgagattctaa

SEQ ID NO: 22085 - DNA, 558 bp, Haemophilus influenzae
atgactgaagaaacaacagtatcaaaaaaacgttggtatgtattacaagcgttttctggctttgaaagtcgtgtagctctaactttacgtgaatacatcaaacaacaacaaatggaagatcaatttggtgaagttttagtaccaactgaagaagtagtggaaaatgtagcaggtaaacgtcgcaaaagtgaacgtaaattttttccaggttatgtacttgtagaaatggaaatgaatgatgaaacttggcatttagtaaaaagtgtgccaagagtgatgggttttatcggtggtacaccagataaacctgcacctatttccaaacgtgaagcggatactattttaaatcgtcttgaacaaaatactgataaacctcgtcatcgtaatgaatatcatccgggagaggaagttcgtgtgactgaagggccatttgctgattttaatggtacagtagaagaagtggattatgaaaaaggccgcttaaaagtgtctgtatcaatgtttggccgtgctacaccagttgagcttgaatttggtcaagttgaaaaaatacactaa

SEQ ID NO: 22086 - DNA, 753 bp, Haemophilus influenzae
atgaaaacaaagacaattttgaccgcacttttgagtgccattgcactaacaggttgtgcaaataacaacgacacgaaacaagtgagtgagcgtaatgattcccttgaagacttcaatcgaacaatgtggaaatttaactataatgttatagatcgctatgtgctagaacccgctgcaaaaggttggaataactatgtgcctaagccgatttcttctggtcttgctggcatcgcaaataatcttgatgagccagtcagtttcataaaccgattaattgaaggtgaaccgaaaaaagcatttgttcactttaatcgcttttggattaacactgtatttggactaggtggttttattgattttgcgagcgcaagcaaagaattacgcatagataatcaacgtggatttggggaaactttaggcagttacggcgtagatgctggcacttatattgtgctaccgatttataatgcaacaacaccacgccaattaacgggtgcagtggttgatgcggcttatatgtatccattctggcaatgggttggtggtccgtgggcattagtgaaatatggtgtgcaagcagtggatgcccgtgcgaaaaatctcaataatgcagaattgttacgtcaagctcaagatccatatatcacgttccgagaagcttattaccaaaatttacaatttaaagtaaacgatgggaaattagtcgaaagcaaagaatcacttcccgatgacatactaaaagaaattgattaa

SEQ ID NO: 22087 - DNA, 1860 bp, Haemophilus influenzae
atgctggattctcctttactatcaaaaataatagaaaaaccgaccgcactttctgttttgaaatcggttttcggttatcaatctttccgtaaagggcaggaagaagttattaatgctgctttaaatggacaagatgcgttggtggtaatggcaacggggaatggcaaatcgctttgttaccaaattcccgcactttgttttgatggtttaactttagtgatttctccgctgatttccttgatgaaagatcaagtggatcagctgcaagctaatggaattgaggcggattttcttaattctagtcagactttagaacagcagcaacaagtacaaaataagcttatttctgggcaacttaaactactttatgtgtcgccagaaaaagtgatgacgaacagtttctttcaacttatttcttatagcaaagtctgctttattgcgattgatgaagcacattgtatttctcaatgggggcatgactttcgccctgaatatacccagcttggcggtttaaaagccagtttccctgatgcgccgattatggcacttacggcaacggcagattatgcgactcaacaagatattctgcggcatcttaatctgaaaaatctgcacaaatacattggtagttttgatcgaccaaacattcgttataccttggaagaaaaatacaaacctatggagcaactgacacgttttgttttggctcaaaagggtaagagtgggattatttattgcaacagccgaaacaaggttgaacgaattgcggaaagtttacgcaataaaggtgtctctgctgctgcttaccacgcaggaatggaaacggcaattcgtgaacgtgtgcaacaggattttcagcgtgataatgttcaagtagtagtcgcaaccattgcttttggaatggggattaataaatccaatgtgcgctttgttgcccattttgatttaccacgtagcattgaatcttactatcaagaaacaggtcgagcaggacgcgatgatttacccgcagaggcggttttgttttatgaaccagctgattatgcttggttacaaaaaattctcttagaaaaaccagaaacgccacagcgtcagattgagcaacataaattagaagctattggtgaatttgcagaaagccagacttgtcgccgtttagttcttctcaattattttggcgagcatcgacaaacaccatgcaataactgtgatatttgccttgatcctcctaaaaaatatgatggtttagtcgatgcgcaaaaagtaatgtctactatttatcgagtgggacaatgttttggtgcacattatgtgattgcggtgttgcgtggcatgcacaatcagaaaattattgaacgccaacaccataaactttcagtgtatggcattggaaaagataaaagtaaagagcattggcagtccgtcattcgtcagcttattcatttgggttttgtgcaacaggttattagtgaattaaatccaacgttgcaacttactgaaagtgcgaaagtgattttgaaaggcgaagaaccgttagaattggcaatgcctcgtatttctgcaatcagtaaaattgctcataatccacaacgtcaaggtgttgcaaattacgataaggatttatttgcacgcttgcgtttcttacgcaaacaaattgccgataaagaaaatattccgccgtacattgtctttaatgatgcgactttgcaagaaatggcacaatatatgccaacaagcaatattgaaatgctgcaaattaatggcgtgggctctatcaaattagagcggtttgggcagccgtttatggcattgattcaagaacataaggcaattttggcgaatgcgcaaaataatgactaa

SEQ ID NO: 22088 - DNA, 1719 bp, Haemophilus influenzae
atgcgtacaagtcaatatttattttccaccctaaaagaaacgccaaatgatgctcaggttgtgagccaccaattaatgttgcgtgcaggtatgattcgcccaatggcatcaggtttatataactggctaccgacgggtattcgcgtattgaaaaaagtggaaaaagttgttcgcgaagagatgaacaaaggtggtgccattgaggtattaatgccagttgtgcaacctgcggaattatgggaagagtctggtcgttgggatcaatatggccctgaattgcttcgttttgaagaccgcggaaaccgtaactttgtacttggaccaactcacgaggaagtgattacagatttagtccgccgagaagtttcttcatacaaacaacttccacttaatttatatcaaattcaaacgaaattccgtgatgaagtgcgccctcgttttggtgtaatgcgttcgcgtgaatttattatgaaagatgcgtattctttccacactacccaagaaagtttgcaagcaacctatgatgtgatgtatcaagtatacagtaacatttttaaccgtttaggcttagatttccgtgcggtgcaagcggatacaggttcaatcgggggttcagcttctcacgaattccaagtgttagcttcaagcggggaagatgatgttgtgttctcaacggaatcggattttgccgcgaatattgagcttgcagaagcaattgctataggcgaacgccaagctccaacggctgaaatgtgtttagttgatacaccaaatgcgaaaactattgcggagttggtggagcaattcaatttaccaatcgagaaaaccgtaaaaactttgattgtgaaaggtgcagacgaaaatcaaccgcttgttgcgttgattattcgcggcgaccatgaattaaacgaaatcaaagcacaaaaacacccgttagtggcagatcctcttgagtttgcggacgaaactgaaatcaaagcgaaaattggttcgggcgtgggatcgttaggcgcggtaaatcttaatattcctgcaattattgaccgcactgtggcgttaatgtctgattttagttgtggtgcgaatatcgacggcaaacactacttcaacgtgaactgggagcgtgatgtagcaataccaaaagtatttgatttacgtaacgtagtagaaggcgatcctagtccagatggcaaaggcacgcttcaaatcaaacgtggtattgaagtggggcatattttccaactgggtaaaaaatactctgaagcgatgaaagcgaccgttcaaggcgaagatggtaaaccacttgtgatgacgatgggttgctacggtattggtgtaactcgtgtggtggcttcagccattgagcaacaccatgatgaacgcggtatcatctggccatcagacgaaatcgccccattcactgtggcgattgtgccaatgaacatgcacaaatctgaagccgtgcaaaaatacgctgaagaactttaccgcactttacaatcgcaaggcgtagatgtgatttttgatgatcgtaaagaacgcccaggtgtgatgtttgcagacatggaacttatcggtgtaccgcatatggtggtaatcggtgagaaaaacctagacaacggtgaaattgaatataagaatcgtcgtaccggtgaaaaagaaatgattagtaaagataaattgctcagtgttttaaacgaaaagttaggtaatctctaa

SEQ ID NO: 22089 - DNA, 723 bp, Haemophilus influenzae
atgttaaaactacttcgaattttcctcgtattaatctgctgtattctaatttgtgtactgggtacgatttattcttttatccgctttaaaaatccaagcaacgtaggcattgttgcacgttggtttggacgcttatatccactttttggcttaaaggtagaacatcgtattcctcaagatcagaagcaaattagccgcgccatttatatcggtaatcatcaaaataattatgatatggtaacaatctcttatatggtgcaacctcgtacagtaagcgtgggtaaaaaaagcttaatttggatacccttcttcggaattttatattgggtaacgggtaatattttcttggatagagaaaaccgcacaaaagcacataatacgatgtcacagcttgcacgacgaattaatgaagataatttatcaatttggatgttcccagaaggcactcgcaatcgcggtcgcggtttattaccctttaaaacgggtgcattccatgcagcgatttcagcaggtgtaccaattattccagtggtgtgttcaagcacgcataacaaaattaatttaaatcgttgggataatggcaaagtgatttgcgaaataatggatccaatcgatgtttcaggctataccaaagacaatgttcgcgatcttgcggcttattgtcatgatctaatggaaaaacgcattgccgaacttgatgaagagatagcaaaaggaaactaa

SEQ ID NO: 22090 - DNA, 1839 bp, Haemophilus influenzae
atgcccaaactacgttcagcgaccagcacacaaggtcgtaatatggcaggcgcacgtgccttatggcgtgcaacaggaatgaaagaaaatgactttggtaaaccgattattgcggtggtgaactctttcacgcaattcgtaccagggcatgtgcatttaaaagatatgggacagcttgttgccgcagaaatagaaaaagcgggcggcgtagcaaaagaatttaacaccattgcggtggatgatggtatcgcaatgggtcacggtggaatgctttattctttaccaagccgtgatttaatcgctgatagcgtggaatatatggtcaatgcacactgtgctgatgcgatggtgtgtatttctaactgtgacaaaatcaccccgggaatgttaatggcggcaatgcgcttaaacattccgacaatttttgtttcaggcggcccaatggaagcgggcaaaacaaaactttctgatcaattaatccgcttagatttggttgatgcgatgattgaggcagccgatccgaatgtatcagatgaacgtattgatgccatcgaacgcagtgcgtgtccaacttgtggttcatgttctggtatgtttaccgctaactcaatgaactgcttaactgaagccttaggtttatctttacctggtaatggttctatgttagccactcacgcagaccgtaaagaattattcttaaaagcaggtcgtcaaattgtcgagctttgcaaacgctattatgaacaagatgatgcaagcgtattgcctcgttcaatcggtacttttgatgcctttgaaaatgcaatgagcctcgatatcgcaatgggtggttcaagtaacactgttttacacttattagcggcagcacaagaagcaggcgtggattttaaaatggaagatattgaccgtttatcgcgcaaagtgccttgtttaagcaaaattgcaccaaacaccaataaatatcatatggaagacgtacaccgtgcaggcggtattatgggattgttgggtgaattagatcgtgctggattaattcataaaaatacacacaccgtgcttggaatgagcatgggagagcaactagaccaatacgatattattcgcaatcaagatgaagaattacataaattcttccgtgcaggccctgcaggtatccgcacaactcaagcattctcacaagattgccgctgggataccgttgataatgatcgtgtaaacggttgtattcgcaataaagaaaatgcgatttcacaagaaggtggcttagccgtattattcggtaatctcgctgaagacggatgtatcgttaaaaccgctggtgtagatgaatctatttggaaattcactggcacggcaatcgtatttgaaagccaagaagatgcggttgcaggcattttaggtggcaaagtcaaagaaggtcatgttgttgttatccgttacgaagggcctaaaggcggaccaggtatgcaagaaatgttatacccaaccagttacttaaaatcgatgggcttgggcaaaaaatgcgctttattaacggatggtcgcttctctggcggtacatcaggcttgtctattggacatgtttcaccagaagctgcttctggcggtgcaatcggcttagtacgcaatggcgatattatcaacattgatattccaaaccgtgcaattaacttagaaatcagtaatgaagaactcgcaacacgcagagccgaacaagatcaaaaaggttggcagccagctaaccgtgaacgtgaagtatctttcgctttaaaagtattcggtcactttgcgacctcagcggacaaaggtgcggtacgcgataaaacattattaaaataa

SEQ ID NO: 22091 - DNA, 3480 bp, Haemophilus influenzae
atgtcatcccaacctcgcttcatccatcttcgcacacacacagatttttcgatgattgacagtatcgtcaaagtgaaacctcttgtgaaagcttgtgctgccaatgaaatggttgctatgggattaacggattttactaatttttgtggtgtggttagtttttatagcgaaatgctttcttcgggtatgaagcccattatcggggcagatgtaaaagtaaaaagcccattatgtggcgatgaatactttgatcttactttgctagctaaaaataatgaaggctatagaaatattactttattgttatcaaaggcttatcaacgcggttataacgatttaccttatattgatcaagattggttaattgaacatcgcgacggcgtgattattttatcagggggaacgcaaggcgatgtgggtaaaaaattgttgaaagaaaacgtagccgaaattgaaagtgcggtcgctttttaccaagaattttttgccgatcatttttatttagcattaagtcgtacaggtcgcccaaatgaagaacgttacattcaagcagcgttgaaattagcagaacgttgtgatttaccattggtcgcaactaatgatgtgatgtttttgaatacagaggattttgaagcccacgaaattcgcgtagcgattcacgatggctatactttagacgatcctaaacgtccgaaatgttatacctcacagcaatattttcgtagtgaagaagatatgtgtaagctgtttgcagacattccttccgctctcgaaaataccttattaattgcgcaacgttgtagtgtgactttgcgccttggtcaatatttcttacctcaatttccaactggcgatttaagtacagaagatttcttagtgcaaaaatccaaagagggcttggaagaacgtttagtttttttattccctgatgaaaaagtgcggttagaaaaacgaccaaaatatgatgaacgcttgcaagttgagctagatgtaattaaccaaatggggttcccaggttatttcttgatcgtaatggaatttattcaatggtctaaggataacgatattccagtagggccaggtcgtggttctggtgcgggttcattagtggcttatgcattaaaaatcactgatttagatccgttagagtttgatttgctatttgaacgtttcttaaatccagaacgtgtgtctatgcccgatttcgacgtggatttctgtatggacggtcgcgatcgcgtgattgagcacgttgcagaaacctatggtcgtggcgcggtatcacaaattattacctttggtacaatggcggcgaaagcggttattcgagatgtagggcgagtgctggggcatccttatggtttcgttgatcgtatttctaaattgattccgccagatccaggtatgacgcttgccaaagcgtttgagaccgagccgcaattacagactgcctacgatagcgatgaagaagtgcgagcattgattaacatggcgcgcaagctggaaggtgtgacacgtaatgcaggtaaacatgcaggtggcgtggtcatttcgccaaccttaattactgattttgcaccactctattgtgataatgaaggcttacatccagttactcactttgataaaaatgatgtggaatatgcagggcttgtgaaatttgacttcctaggcttgcgtactcttactatcattaaatgggcattggatataattaatgttcgtatggtgcgtgaaggcaagcctcgagtagatattgccgccattccacttgatgatcctgaatcttttgaattacttaaacgttccgaaaccaccgccgtgttccagttggaatcacgaggtatgaaagatttgatcaaacgcctgcaacctgactgttttgaagatattatcgcattggtagcattgttccgtccggggccgttacaatcgggtatggtagataactttatcgaccgtaaacacgggagagaagaagtatcttaccctgacgcagaatatcaacatgcaagtttgaaacctattcttgagccgacttacggcattattttgtatcaagaacaagtgatgcaaattgcgcaggtgttggctggctatacgctgggtggggctgacttattgcgtcgagcaatgggtaaaaagaaaccagaagaaatggcaaaacagcgtttagtgtttaaagagggggctgagaaaaacggtattgatggcgagctatctatgaagattttcgacttggtggaaaaatttgctggctatggttttaataaatctcactctgctgcttatgccttggtgtcttaccaaactctttggcttaaaactcatttccctgcagaatttatggctgcagtgatgacatcagaaatggataatacggataaaatcgtaggtttatacgacgaatgtttgcgtatgggcttaaaagtgacgccaccagatattaatatcggaaaacaccattttagtgtcaatgaacaaggcgaaattgtgtatgggattggcgcgattaaaggcgtgggggaaggcccgattgaagcacttgtggcggcaagaaatgaaggggggattttcaaagatttattcgatttatgcgctcgtgtagatttgaaaaaaattaaccgccgtacttttgaaagcctaattatgtcgggtgcctttgataaattaggcccacatcgcgccgcactttctaagaatttggaagatgcacttagagcttccgatcagcatgcgaaagatgaagcaatgggacaaacggatatgttcggtgtgctgactgaaacccatgaagacgtggaaaatgcctatgctaatacaccgccttataccgaaaaacaaatccttgatggcgaacgagaaaccttggggctttatttaagtagccatcctgttagccgttatttgaaagaactttcccattacacatcgacgcggttgaaagatctcgcaccaaatcgccgtggacaaattagcactgtggcggggctcgttgtggcatcgagaattgcgatgacgaaaaaaggcaatcgtctaggtattgcaacattggatgaccgttcaggtcgcttagatttaacattatttggtgaaagcctagaacaatttggtgagaaattacaaaaagatacagtgattgttgcttcagggcaggtgagctttgatgatttctctggtggcttgaaaatgacggtgcgcgagttaatgaccttagatgaggctcgttctcgttatgtcaaatccttggctattagtctttctgagcatcaaattacaccaagtttcattaaacaatttaaagcattacttgagccagtgagtggtggaacattgcctattaacgtgtattatcaaagtccgaaaggtcgtgcgttgttacgtttaggcgtgcaatggtcgatcattccaacagatgaaattctgacggaattggtgaatttactcggcgaaagtgcggtggaattagagtttgaataa

SEQ ID NO: 22092 - DNA, 1458 bp, Haemophilus influenzae
atggggatgaaccgagttttagtttctcaagctgctggtggtttagcggaatatttaaaaggttacgataaagaaccctcaatcgtcattggttacgatggtcgtaaaaactctgatgtttttgcccgtgacaccgctgaaattatggcgggtgcaggcgtaaaagcttatttattaccacgcaaattaccgactccagttttagcctatgctatccaatattttgataccactgcaggtgtaatggtaacagcaagccataacccaccagaagataatggctacaaagtgtatttaggtaaagcaaatggtggcggtcaaatcgtttcaccagcagataaagacatcgcagcattaattgataaagttgcggctggcaatatccaagatttaccacgtagcgataattatgtggtgttaaatgatgaagtggtagatgcgtacattacaaaaactgcatcattagctaaagaacccgcttgcgacattaactatgtttataccgctatgcatggtgttggctatgaagttttaagtaaaacactggcaaaagcaggcttaccacaaccccacgtagtcgcagatcaagtttggccagatggcacattcccaacggtgaatttcccaaatccagaagaaaaaggcgcattggatttagcaattaaagtggcaaaagaaaagaacgctgaatttatcattgctaatgacccagatgcagaccgtttagccgttgctgtgcctgatgcgcaaggcaactggaaatcactacacggtaacgtggttggctgtttcttaggttggtacttagcaaaacaatatcaaggtaaacaaggcacattggcttgctcacttgtttcttctcctgcgctcgctgaaattgcgaaaaaatacagtttccaatcagaagaaaccttaactggtttcaaatacatcggtaaagtatctggcttattgttcggttttgaagaggcattgggctatctagtggacccagacaaagtacgcgataaagacggtatttctgcagcaatcgtgttcttagatcttgtgcgtaacttgaaaaaacaaggcaaaactttagcagattatgctgatgaatttaccaaagaatttggtgcttatgtgagtggacaaatctctattcgagtcagcgatctttcagaaattggaaaattaatgaccgcacttcgtaacaatccaccagcagaaatcgctggcgtgaaagtggcacaatttatcgaccacattaaaacagatcgtcaaagcgatatccttgtatttaacttggaaaatggcggacgcttaattgctcgtccttcaggtactgaaccaaaaattaaattctacttagatgcgcgcggtaaagatccaaaagatgcagatcgcgtactagcagaatttgatgaaggtgttcgtcacattcttcgccaagatgcttatggcaaacaagactgctaa

SEQ ID NO: 22093 - DNA, 447 bp, Haemophilus influenzae
atgcaagaatttatctcaatggcaacagagtttgctcaaaaacatacgcttttagcagtttcttggtttgcgattttcgtaatggtaatttatacattctacaaaggcgcaacgagtaaatttaaagtaattacgcacaatgaagttattcggttaataaattccgatgaagccattgtggtagatttacgtagtcttgaagaatttcaacgtggacatatcattaatagtattaatgtgcttccaagcgaaattaaaaatcaaaatatcggaaaattagagtcgcataaagagaacgctcttatattagtcgatacaaatggtacttcagcctctgcttctgcagtatttttaaccaaacaaggttttaattctgtatttgtgttgaaagaaggcctttccgcgtgggtagcagcaaatttacctttagttaaaaaacataaataa

SEQ ID NO: 22094 - DNA, 3963 bp, Haemophilus influenzae
atgcaaacgtttgctttgttcgttataatacgtctgtttttttatttttcttttatacggaactgcaatatgactgtcaaaacctttcgtggctcgcctgctctttctgaatttcgtttaactcaacttcaacaaaaatgccagcaatatcaattgcctattacgtcagtttatgcagagtatttgcattttgttgaacaaaaaacatcgcttgtagaagatgaaatcgttaaattacaagcattattgcattatggatcaatgttttctgaactcaagcctgcaggatattgtttaattgtgactccacgagtggggacaatttcctcttggtcttcaaaagcgacggacatcgctcacaattgtggtttgtcgaaggtaaatcgtattgaacgtggtatagcctattacttcaatattgagcgtgatttaaccgaagcagaattggctacgctgaaagatttattacacgaccgtatgttagaaaccgtgttaaatcacgaaacagaagcagccttgctttttactcaacaagaacccaaagcattaactacaattgatattttaaatggtggccgtcaagcattagaacaggcgaatattgccttgggtttagcgttggcagatgatgagatggattatttagtggaaagttttactgccttaaagcgtaatccacaggatgtggagctttatatgtttgcacaagcgaattcagagcattgtcgccataaaatttttaatgccgattggattattgatggcaaaaaacaggataaatcgctgtttaaaatgatcaaaaatacctttgagcaaacgcctgattttgtgctttctgcttataaagataatgctgcagtaatggaaggttcgaaagtcggccgttggtttcctgatcctgatggacaatatcgtgttcatcaagaagatgtgcacattttaatgaaagtagaaacacataaccatcccacagcaatttcgccatttcctggtgccgcaacaggctctggcggggagattcgtgatgaaggggcaacggggcgtggggcaaaacccaaagcaggtttaacaggtttctcggtgtctaacctcgttattccaaactttgaacaaccttgggaaaatccattgtctaaaccaaatcgcattgcttctgccttagatattatgatagatgcgcctttaggtagtgcggcatttaataatgaatttggtcgcccagcattattaggttatttccgtacttatgaagaaaaagtaaatagttttgctggaaaagaagtgcgcggttatcacaagccgattatgttagcgggaggaatcggtaatattcgtggcgaacaggttcaaaaaggcgaaattccaatcggtgctaaattgatcgttttgggtggggcagcaatgaacatcggtttaggtggtggtgctgcttcttcgatggacagtggtaaatcaaaagaagatttagattttgcttctgttcaacgtgaaaatccggaaatggaacgccgctgccaagaagttattgaccgctgttggcaattaggcgaagaaaatccaatcctgtttattcacgatgtgggtgcgggtggtttatctaatgcaatgcctgaattggtacacgatggcaagcgtggaggaaaattcgatctgcgttctattctttgtgatgaaaaaggtatgtcgccattggaaatttggtgtaatgaatcgcaagaacgttatgtattagccgttgcgccagaaaacctcgaattatttaccgcactttgtgagcgtgaacgtgccccttttgcagtgattggcgaagcaacacaagcagaacatttaatcttgcacgatagtcatttcgataataatccaattgatttaccaatgaatgtgttattaggcaaaacgccgaaaatgacgcgtgaggttttgtcaaaaacagtggaaaatcaatcacttaaaatagaaagtattcaattaaaagaagcattccaccgtgtattacgtttacccgttgttgcagaaaaaactttcttaattactattggtgatcgctcggtaacaggaatggtagcccgagatcaaatggtgggtccttggcaaatccccgtgtctgatgtggctgttactactgcttcactggatagctaccacggcgaagcaatggcaattggcgaacgctctccagttgccttgctagatttctcggcttcggcacgtttagctgtggcggaggcgattactaacattgctggcaccctaattggcgagatgaaacgtattaaactttctgccaactggatgagtgcagcaggtcacacaggcgaagatgctggactttatgaagcagtaaaagctgtgggcgaagaactttgtcctgcgttaggcttaactattcctgtgggtaaagactcaatgtcgatgaaaaccacttggatcgataatggcgaacaaaaatcagtgaccgccccgctttcattagtaatttccgcttttgctcgtgtagaagatgtacgtaaaacgcttacgccacaacttcgtaccgacaaaggtttctcgagtttattgctaattgatttaggcgaagggcataatcgattaggtgcgaccgcacttgctcaagtgtacaaacagttaggagacaagcctgccgatgtggtaaaggttcaacgcttaaaagatttttacaatgcaatgcaaactttagtggcagaagataaattattggcttatcacgaccgttcggacggcggtttaatcacaactcttgcagaaatggcgtttgcagggcattgtggggtagaagttgatatttcagctttaggcgacaacgatttagcggtattatttaacgaagaattgggagcggttatccaagttgccgatagccaattagaaagcgtacgtgaggtgttgaaagctcacaatttgcttggtattatccaccaattaggtacggtaactgctgatgatcgctttgagatcagccgcggcagccataaattattcagcgaaaaacgctctgaattacgtagtatttgggcagaattaacttaccaaatgcaacgcttacgcgataatccagagtgtgctgagcaagagtttgaagctaagaaaaaccctgacgacaaaggcttatccgcatttttgacttacgatgtgaatgaagatattactgcgccatttatcaataaaggtgtaaaaccaaccattgcaattttacgtgaacaaggtgtaaatagtcattatgaaatggcagcagcgtttgatcgagcaggctttaatgcaattgacgtgcatatgtctgatttaatgattggtcgtcgtaatttagccgaattcaatgcaatggttgcttgtggcggtttctcttacggcgatgtgcttggcgcagggggcggttgggcaaaatccatcttatttaacccgaaattacacgagcaattcagccagttttttatcaatccaaacacactgaccttaggcgtatgtaacggttgtcaaatgatctctaacttggcggaaattatcccaggtacagaaaactggccgcattttgtacgcaacaaatctgaacgctttgaagcgcgtgtgagtttagtgaaaattaatgaagtggattcagtttggtttgcaggaatggctggctcacatatgcccattgcggtttctcacggggaaggacaagttaagtttaaatcagttgaacagtttgcaggcttaaaagcacaaggcatcattgccgcacaatatattgacaacaacggtagccccaccgaactatatcctgccaatccgaatggttcttcggagggcattactgcaattacaaatcttgatgggcgagttgctattatgatgccacaccctgaacgtgtgttccgtgctgtgagtaactcttggcacccagaaaactggacagaagacggtgcgtggatgagattattcagaaatgcaagaatggtattttag

SEQ ID NO: 22095 - DNA, 912 bp, Haemophilus influenzae
atgaatgacattatattaaaaagtttatccacattaattacggaacaaagaaatccgaattcagttgatattgatcgtcaaagtacattagaaattgttcgattaatgaatgaagaagataaacttgtgccacttgcgattgaaagctgtttaccgcagatttcgttggcggtagagcaaattgtgcaggcttttcaacaaggcgggcgtttaatttatattggtgcaggcaccagtggtcgtcttggtgtattggatgcgtcagaatgccctccaacatttggcgtgtctacggaaatggttaaaggaataattgcaggtggtgagtgtgctattcgtcatcctgttgagggtgctgaagataatacgaaagcggtgcttaatgatttacaaagcatacatttttcaaaaaatgatgtattagttggtatcgctgcaagtggtcgcacaccttatgttattgcaggtcttcagtatgcaaaatcgcttggtgcattgacaatttctattgcgagtaatccaaaatctgagatggctgagatagccgatattgcgatagagactattgttggccctgaaatattgacgggttctagccgcttaaaatctggcacagcacaaaaaatggtgctgaatatgctgactacggcaagtatgattttattgggtaaatgttacgaaaatttgatggtcgatgtacaagccagtaatgaaaagcttaaagcccgtgcggtgcggattgtgatgcaagcgaccgattgcaataaaacattagcagaacagacattacttgaagcagatcaaaatgccaaactggcgattatgatgattttaagcactttatcaaaatcagaagcgaaagtattgttagaaagacatcaaggtaaattgagaaatgcgctttctaaataa

SEQ ID NO: 22096 - DNA, 696 bp, Haemophilus influenzae
atgccacgtgaaatttccgtagcaattattcctgcagcgccctatgctcgagcacgtaatcaagaagcaaaatctcaaggtagagatattttaatccatatgccgatgcaaccagtaagtgcagtgaaaatagaagacggtgggctgcatttaggaatgtctgcggcacaagtaaatgatcgcgttaatacggctaaaaatattgtgcgtgatgccatcggtatgaacaatcatatggggagtgcagctacggcagatccccaattaatgacttatttaatgaccgcacttcaagaaaaacacttgttctttttagatagtcgaacaataggaaaatctgtagctgggaaaatagcaaaagaacaaggcgtgcgttcattagatcgccatatatttttagatgatagtaacgaattcgcagacgttcaacgtcaatttaaagcagcaattcactatgctagaaaacacggctccgccattgcaataggtcatcctcgtccaaatacgattgctgttttacaagcaggtcttcgtaatttacccgaagatattcaattagtcggaatgggcaacttatggcgtaatgaaaaagtaatcccgcccaagccatttattttattattcagcgaagtgcctgcaccaacttctatagaaccttttgagcctgtaggattattgcgtggaattccaaaataa

SEQ ID NO: 22097 - DNA, 213 bp, Haemophilus influenzae
atgaaacaaggtattcatccagaatataaagaaattactgcgacttgttcttgcggtaatgtgatcaaaacacgttcaactttaggcaaagacatcaatcttgatgtgtgtggtaactgccacccattctatactggtaaacaacgtgttgttgatactggtggtcgtgtcgagcgtttcaacagccgtttcaaaattccaagcacaaaataa

SEQ ID NO: 22098 - DNA, 483 bp, Haemophilus influenzae
atgttagatatcgttttatatgaaccagaaatcccacaaaatactggtaacattattcgactttgtgccaacacaggatttcgcttgcacttaattgaaccactaggtttcacttgggatgataaacgcttacgccgctcaggtttggattatcacgaatttgcggaaatcaaacgccacaaaacctttgaagcctttttagaaagcgaaaaacccaaacgcctttttgcacttacaacaaaaggctgtccagcacatagccaagtgaaatttaaacttggggattatttaatgtttggcccagaaactcgtggcattccgatgtcaattttaaatgaaatgccgatggaacaaaaaatccgcattccaatgactgccaatagccgcagtatgaacttgtctaattctgttgcagtaacggtttatgaagcgtggcgacaattaggctataaaggtgcggtaaatttaccagaagtaaaataa

SEQ ID NO: 22099 - DNA, 1245 bp, Haemophilus influenzae
atgaacgacatttttatcggattacagttaagagagcattttatggctgaagaaaataaaaaaggcggattttgggcatcgttatttgggcgtaataaaaagcaagatgaacctaaaattgagccgataattgaagaagaaaagataaaagatatcgagccgtctattgaaaaatttgaagctaatgatttagtcgaagaagaaaaaatacaggaaatttcaaccgcacttgagccgattgaagaaatcatcgaagcgaaaaatttagaagatgagtttcagcctgttgttgaaattgaaactcgcgaaaaaccaagtgaagggggcttttttagtcgtttagttaagggattactgaaaactaaacaaaatattggcgcgggttttcgtggttttttcttaggaaagaaaattgatgatgagttgtttgaagaattagaagaacaacttttaattgcggatattggtgtgccgacaacaagtaaaatcatcaaaaatttgactgaacacgcaagccgcaaagaattacaagatgccgagcttttatatcaacaattaaaagtagaaatggcggatattcttgagccagtagcacaaccgttagagattgatagcacgaaaaaaccttatgtgattttaatggtgggcgtaaatggcgtgggtaaaacaacgacaattggtaagctcgcacgtaaatttcaggctgaaggaaaatcagtgatgcttgcagcgggcgatactttccgagcggcggctgttgagcagcttcaagtttggggagaacgcaatcatattccagttgttgcgcaaagcacgggttctgattctgcgtctgtgatttttgatgcgatgcaatcagcggctgcacgcaatattgatattcttattgcggatacggcgggtcgtttacaaaataaaaataacttaatggacgaactgaaaaaaattgttcgtgttatgaaaaaatatgatgaaactgcgccacatgaaattatgcttacgctggatgctggcacgggacaaaatgctattagccaagcgaagttatttaatgaggctgtgggtttaacaggaatctctctaactaaattagatggcacggcaaaaggcggcgtgatttttgccatagccgatcagtttaagttgcctattcgctatatcggtgtaggcgagaaaattgaagatttacgtgagtttaatgcgaaagaatttattgaggcattattcgttcatgaagaagaataa

SEQ ID NO: 22100 - DNA, 1182 bp, Haemophilus influenzae
atggaaaatgttgttattgttagtgcagttagaacaccgatcggcagctttaatggtgcattatcttccgtaagtgcggttgatttaggtgcaattgtgatacaagaagccatcaaacgtgccaacattgaaagtgcattagttaatgaagtcatcatggggaacgtattacaagcaggactagggcaaaatccagcccgtcaagcagcattaaaagcaggaatagagaaagaaatcccttctttaacaatcaataaagtatgtggatctggtctaaaaagtgtcgcattaggtgcacagtctattatcagtggtgatgctgatattgttgttgtgggtggcatggaaaatatgagccaagcaccttatcttttagatagcaaagtacgacaaggcgtcaaaatgggtaatctcacattaagggacacaatgattgaagacggactaacttgcgctagcaatcactatcatatggggattactgccgaaaatattgcagaacaatatggtattagccgccaagcacaagatgaactcgcattacgttcacaaaccttagcatctcaagccgtgcaattaggtgtatttgataaggaaattgtccctgttatggtaaaaactcgcaaaggtgacattattgtttcacgagacgagtatcctaaagcagatactacagctgaaggtttagctaaattaaaacctgctttcaaaaaagagggtactgtcaccgcaggtaacgcttctggcattaatgatggtgctgcagcacttattttagttagcgaaagcaaagctcatgcacttggattaaaagccattgcaaaaattagaagctatgccagcggtggggtagatccatctgttatgggattaggtccagttccagcaacgcaaaaagcattgaaaaaagcaggaataaatcttgatgatatcgatctgatagaagcaaatgaagcctttgcctcacagttcttaggtgttggcaaagatctcaatttggatatgaataaaaccaatattcatggtggagcgatcgcacttgggcatccaatcggcgcgagtggtgcaaggattttagtaacgttattgcacaatcttatcgaaaaagataaaaaacttggacttgctacactttgtattggcggtggtcaagggatttctatgattgtagaacgcttataa

SEQ ID NO: 22101 - DNA, 357 bp, Haemophilus influenzae
gtgttagtttttttattagctaaattttattggagctctggtctaatgcagaaccaaagaatccgtatccgcttaaaagctttcgatcaccgtttgatcgatcaatctactgcggagatcgtagaaacagctaaacgtactggcgcacaagttcgtggtccaattcctttaccaactcgtaaagagcgtttcaccgtgttgatttctccacacgtaaacaaagacgcacgtgaccaatacgaaattcgtactcacaaacgtttagtagatatcgtagagccaacagaaaaaactgttgatgcattaatgcgtttagatttggctgccggcgtggacgtgcagatcagcctaggttaa

SEQ ID NO: 22102 - DNA, 627 bp, Haemophilus influenzae
atgattggtttagtcggtcgtaaagttggtatgacccgtatcttcaatgaagacggcgtgtcagtaccagttaccgttatcgaaattgaagccaaccgcgtaactcaagttaaaactcttgaaaacgatggctatactgcagttcaagttactactggttctaaaaaagcgaatcgtgtaactaaacctgaagcaggtcatttcgtgaaagcaggtgttgaagctggtcgcggtttatgggaatttcgtactgaaggtgaagaattcactttaggtcaagaaatcaatgtagacatctttgcagatgttaaaaaagtagatgttactggtacttctaaaggtaaaggtttccaaggtggtgttaaacgttggaacttccgtactcaagatgctacacacggtaactctttatcacatcgtgtacttggttctattggtcaaaaccaaacaccaggtcgtgtgtttaaaggtaaaaaaatggcaggacatttaggtgctgaacgtgtaactgttcaatcacttgaagttgttcgtgtagatgctgagcgtaaattgctattagtaaaaggttctgtacctggtgctatcaatggcgatgttatcgttaagccggcagttaaagcataa

SEQ ID NO: 22103 - DNA, 603 bp, Haemophilus influenzae
atggaattacaagttgtaggtgcaaacgcactcactgtttctgaaactaccttcggacgtgagtttaacgaagcgttgatccaccaagttgttgttgcttatgcagcaggtgcgcgtcaaggtactcgtgcacaaaaaactcgtgctgaagtgtctggttcaggtaaaaaaccttggcgtcaaaaaggtacaggtcgtgctcgtgctggtgatatcaaatcaccaatctggcgttctggtggtacaaccttcgcggctaaaccacaagatcacagccaaaaagtgaacaagaaaatgtaccgtggtgctatcaaaagcattctttctgaattagttcgtcaagaccgtttggttgtggtggaaaaatttgaattagatgcaccaaagactaaagttttagtacaaaaattaaaagatttagccgttgaagatgcgttaattatcacagcaagtttagatgaaaatctattcttagcagcacgtaacttatataaagttgatgtccgtgatgttcaaggtatcgatccagttagcttgatcgctttcgataaggtgattgttactgttgatgctgtgaaacaaattgaggagatcctagcatga

SEQ ID NO: 22104 - DNA, 300 bp, Haemophilus influenzae
atgagtcaagaacgtttgctaagtgtgctacgtgcaccgcacatctctgaaaaagcaactaacaatgctgaaaaatctaacactgttgtacttaaagttgctttagatgcgaacaaagctgaaattgctgctgcggttgctcaattatttgaagtaaaagtagattcagttcgtactgtggttgttaaaggtaaaactaaacgccgtggtaacaaaatgggtcgtcgcagcgactggaaaaaagcttatgtaactttagccgaaggccaaaacttggacttcgtggacagtgcagagtaa

SEQ ID NO: 22105 - DNA, 822 bp, Haemophilus influenzae
atggctatcgttaaatgtaagccgacctccgctggtcgtcgtcacgttgttaaaatcgtgaaccctgaattacacaagggtaaaccttacgcacctcttctagatactaaatctaaaactggtggtcgtaacaactatggtcgtattactactcgtcacattggtggcggtcacaaacaacactaccgtttaatagatttcaaacgtaacaagttagacattccagcggttgttgagcgtttagaatatgatccaaaccgttctgctaacattgctttagtgctttataaagacggtgaacgccgttatattttagcacctaaaggtttgtcagtaggcgatcaaatccaagctggcataaactcaccaattaaagtgggtaactcattaccaatgcgtaatatcccagttggttcaacagtacataacgttgaattaaaaccaggtaaaggcggtcaaatcgctcgttctgctggtgcttatgtacaaatcatcgcacgtgaaggcaactatgtaactttacgtttacgttctggtgaaatgcgtaaagtattagctgaatgtgttgctacaatcggtgaagttggtaactcagaacatatgcttcgcgtattgggtaaagctggtgctaaccgctggagaggtattcgccctacagttcgtggtactgcaatgaacccagtagatcacccacacggtggtggtgaaggtcgtaactttggtaaacacccagtaactccttggggcgttcaaactaaaggtaagaaaactcgtcacaacaaacgtactgataaatatatcgtacgtcgtcgtggcaaataa

SEQ ID NO: 22106 - DNA, 276 bp, Haemophilus influenzae
atgccacgttctctcaagaagggtcctttccttgacctacacttgttgaagaaggtagagaaggcggtggaaagcggggataaaaaaccaattaaaacttggtcccgtcgttcaatgatcattccatcaatgatcggattgaccatcgcagtccataatggtcgtcagcacgttcctgtttatgtatctgatgaaatgatcggtcataagcttggtgaatttgcaccgactcgtacataccgcggtcacgcggcagataagaaagctaagaaataa

SEQ ID NO: 22107 - DNA, 333 bp, Haemophilus influenzae
atggaaactatcgcaaaacatcgttacgctcgcacttctgcccaaaaagctcgcttagttgccgatttaattcgtggtaaaaaagttgcgcaagcattagaaattttaactttcactaacaaaaaagcagcagctttagtgaagaaagttttagaatcagctattgcaaatgcagagcacaatgacggtgcagatattgatgatcttaaagttgctaaaatcttcgttgatgaaggtcctagcatgaaacgtgttatgccacgtgctaaaggtcgtgcagatcgtattttaaaacgtactagccacattactgtggttgtgtcagatcgttaa

SEQ ID NO: 22108 - DNA, 708 bp, Haemophilus influenzae
atgggtcaaaaagtacatccacatggtattcgcctaggtattgttaaaccttggagctctacttggttcgcgaatacacaagacttcgctgacaatcttgaaggcgatttcaaagtacgcaaattcttaaataaagaattagcaagtgcttcagtttcacgtattactattgagcgtccagctaaaagtattcgtgtaactattcacacagctcgtcctggtatcgtaatcggtaaaaaaggcgaagatgttgaaaaattacgtaacgcagtgtctaaaatcgctggcgttcctgctcaaatcaacattgctgaagtgaaaaaacctgaattagatgcgaaattagttgcagatagcatcgcttctcaattagaacgtcgtgtaatgttccgtcgtgcaatgaaacgtgcggtacaaagtgctatgcgtttaggtgctaaaggtatcaaagttgaggttagcggtcgtttaggtggtgcagaaatcgcacgttcagaatggtatcgtgaaggtcgcgtacctctacatactcttcgtgcggacatcgattataacactgcagaagctcacacaacttacggcgtaatcggcgttaaagtgtggatcttcaaaggtgaaattcttggtggaatggctgccgttgcgcaatcagaacaacaacctgccgacaagcctaaaaaggctcctcgcggtaaaggtcgtaagtaa

SEQ ID NO: 22109 - DNA, 411 bp, Haemophilus influenzae
atgttgcaaccaaaacgtacaaaattccgtaaagttcacaaaggccgcaaccgtggtatcgcgagcggtactgaagttagtttcggtacttacggtttaaaagcagttggtcgttgtcgtttaaccgctcgtcaaatcgaagcggcacgtcgtgcaatgtcacgtgcagtaaaacgtcaaggtaaaatctggattcgtgtattcccagataaaccaattactgaaaaaccattagaagtccgtatgggtaaaggtaaaggtaacgttgagtactgggtagccttaatccaaccgggtaaagtgctttatgaaatggatggtgtgtctgaagaagtagcaagaaacgcatttgcattagcagctgctaaattgccagttaagaccactttcgtaactaagacggtgatgtaa

SEQ ID NO: 22110 - DNA, 192 bp, Haemophilus influenzae
atgaaagctcaagatttacgtacaaaaagtgttgaagagctgaatgctgaattagtaaaccttttaggtgaacaattcaagttgcgtatgcagacagccaccggtcagcttcaacaaacccatcaggctaagcaagtgcgtcgtgatattgcacgtgtaaaaactgtattaaccgaaaaggcgggtgagtaa

SEQ ID NO: 22111 - DNA, 258 bp, Haemophilus influenzae
atgactgataaaattcgtagcgtacaaggtaaagttgttagcgacaaaatggaaaaatctttcgttgttgctattgaacgtaaggtaaaacaccctttatatggtaaatttatccgtcgtacaactaaattacacgtacacgatgagaacaatgaagccaaagttggtgataccgtagagattcgcgaatgtcgccctctatcaaaaaccaaatcttggactttagttcgtgttgttgagaaagcagttattgcttaa

SEQ ID NO: 22112 - DNA, 372 bp, Haemophilus influenzae
atgatccaagaacagactatgctggatgttgctgataattcaggcgctcgcagcgtaatgtgtatcaaggttctaggtggatcgcaccgtcgttatgctgcgattggcgacatcatcaaaattactgtaaaagaagcaattccacgcggtaaagtaaaaaaaggtgatgtattaaaagcagttgttgtgcgcaccaagaagggtgttcgtcgcccagatggctcagttattcgtttcgatggtaacgcttgtgtaattttaaataataacactgagcaaccaatcggtactcgtatttttggaccagtgactcgtgaacttcgttctgagaaattcatgaagatcatttctttagctccagaagtactgtaa

SEQ ID NO: 22113 - DNA, 312 bp, Haemophilus influenzae
atgcctgctaaaatccgtcaaaatgatgaagtaattgtccttactggtaaagataagggcaagcgtggcaaggtaactaaagtgttaccaaacggtaaagtgtttgttgaaggtatcaacatcattactaaacatgaaaaaccagttcctgcattaggaaaggctggtggtttggtgaaaaaagaagctgcaattgacgcttcaaatgttgcgattttcaatcctaaaacaaataaagctgaccgtgtaggttttagattcgaagacggcaaaaaagtacgtttcttcaaatctaacaatgaaattatctaa

SEQ ID NO: 22114 - DNA, 540 bp, Haemophilus influenzae
atggcgaaactgcatgattactacagagatcaagtagtaagcgaattaaaaaataaattcggctacaaatctgtcatgcaagtcccacgaatcgaaaagattaccctgaatatgggtgtgggtgaagcattgaccgacaaaaaattgctagacaacgcagtagcggacttagcagcaatcagcggtcaaaaacctttagtaactaaagctcgtaaatctgttgctggctttaaaatccgtcagggatatccaatcggttgtaaagtaacactacgcggtgagcgtatgtgggagttctttgaacgtttaattacaattgctgttccacgtattcgtgacttccgcggtttaagtgcgaaatcattcgatggtcgtggtaactatagcatgggtgtgcgtgaacaaatcatcttccctgaaattgattacgataaagtagatcgtgtacgtggtttagatatcactatcacaactactgctaagaatgatgaagaaggtcaagcactacttgctgcctttaatttcccattccgtaaataa

SEQ ID NO: 22115 - DNA, 306 bp, Haemophilus influenzae
atggctaaacaatcaatgaaagcacgcgatgtaaaacgcgttaaattggctgaaaaattctacgcaaaacgtgttgaattaaagaaaatcatttctgatgtcaatgcctctgatgaagatcgttgggatgcagtgttaaagttacaaactttaccacgtgattctagcccatctcgtcaacgtaaccgttgccgccaaactggacgtcctcatggcgttttacgtaagtttggtttaagccgaattaaggttcgtgaagctgcaatgcgcggtgaaatcccaggccttaaaaaagcgagctggtaa

SEQ ID NO: 22116 - DNA, 393 bp, Haemophilus influenzae
atgagtatgcaagatccaatcgcagatatgctgacccgtattcgtaacggtcaagctgcgaacaaagttgcaatcaatatgccttcttccaagctaaaagtggcaattgccaacgtattagctgctgaaggttatatcgaaagcgtaaaagttttagaaggtgctaaacctgaattggaaattactttaaaatatttccaaggcaaaccagttgtagaaagcatccaacgtgtaagtcgtcctggtcttcgtatttacaaacgtaaagatgaattaccaaaagttatgggcggtttaggtgttgcagttatttctacatctaaaggtgttatgactgaccgcgctgctcgtcaagcaggtttaggcggtgagatcatctgttatgtagcttaa

SEQ ID NO: 22117 - DNA, 534 bp, Haemophilus influenzae
atgtctcgtgttgcaaaggcacctgttaatattcctgccggcgttgaagttaaactcgacggtcagctattaacagtaaaaggtaaaaatggcgagttatctcgcaaaattcatgaatcagttgaagtaaaacaagataacggacaatttacgttcactccacgtgaaggttttgttgaagcaaatgctcaatcgggtactgcacgtgcattagttaatgcaatggttatcggtgttactgaaggtttcactaaaaaattagtattggtgggtgtaggttacagagctcaacttaaaggtaacgcaattgcattaagtttaggctattctcacccagtagagcacactttgccggtaggtattactgcagaatgtccatctcaaaccgaaatcgtgttgaaaggtgcagacaaacagttgatcggtcaagttgcagcagatattcgtgcttatcgccgtcctgaaccttataaaggtaaaggggtacgttacgctgatgaagtggtacgtatcaaagaggctaagaagaaataa

SEQ ID NO: 22118 - DNA, 354 bp, Haemophilus influenzae
atggataagaaatcagctcgtatccgtcgtgcagctcgtgcacgtcatatgatgagagagcaaggtgtaactcgtttagttattcaccgcactccacgtcatatttatgcacaagttattgcaccaaacggttcagaagtgcttgccgctgcttcaactgttgagaaagcaattcgtgagcaagtaaaatacaccggtaataaagatgctgctgcagcagtaggtaaagctgttgcagaacgcgcattagcaaaaggcgttcaagctgttgcttttgatcgttccggttttaaatatcatggacgtgtccaaactttagcggacgctgcacgtgaagctggtctacagttctaa

SEQ ID NO: 22119 - DNA, 501 bp, Haemophilus influenzae
atgtcaaacatcgaaaaacaagttggtgaactgcaagagaagctaatcgcagtaaaccgtgtatcaaaaactgtaaaaggtggtcgtattatgagtttcactgcattaacagtggtgggcgatggtaatggccgagtaggttttggttatggtaaagctcgcgaagttccagcagcgatccaaaaagcgatggaaaaagcacgtcgcaatatgattaatgtcgctttaaatgaaggtacattacaacatccagttaaaggtgttcatactggttcacgtgtatttatgcagccagcaagtgaaggtacaggtatcatcgctggtggtgcaatgcgtgcggtattggaagttgcaggtgtacgtaacgttctttctaaagcgtatggttctaccaacccaattaacgttgttcgtgcaactattgatgcattagcaaatatgaaatcaccagaaatggttgctgcaaaacgcggtaaaactgttgatgaaatcttggggtaa

SEQ ID NO: 22120 - DNA, 180 bp, Haemophilus influenzae
atggctaaaactattaaagtaacacaagttcgtagctcaattgctcgtttaccgaagcataaagctaccttgcgtggtcttggtcttcgccatatacaccacactgttgagttaattgatacgcctgcagtacgtggtatgattaaccaagtttcatacatggttaaagtggaggagtaa

SEQ ID NO: 22121 - DNA, 435 bp, Haemophilus influenzae
atgcgtttaaatactctatctccggctgaaggtgcaaagcatagtgctaaacgcctcggtcgtggtattggttcaggtttaggcaagactggtggccgcggtcataaaggtcaaaaatctcgtactggtggcggtgttcgtcgcggtttcgaaggtggtcaaatgccgttataccgtcgtttaccaaaatttggttttacttcaatgaaatctgcagtgactgcagaagttcgtttaaatgaattaaccaaagttgaaggtaatgtagtaactttagaaacattaaaagcagcaaatatcttaactaaagatatccaattcgctaaagtaattttagctggagaagtgaaatctgcagtaacggtacgcggtttacgtgtaactaaaggtgcaaaagcagcaattgaagctgctggcggttcaattgaggaataa

SEQ ID NO: 22122 - DNA, 1326 bp, Haemophilus influenzae
atggctaaacaaccaggttatcaagcaagaagtactaatagcggtaaaggtgaattaaaaagccgattacttttcgttttaggtgcacttatcgtttatcgaattggttcattcattccggttcctggtattgatgcggctgttctagctcaattagttgaacaacaaaaaggcactatcattgacatgtttaacatgttctctggtggtgctctaagccgtgcatccattttagcattaggaatcatgccatatatatcggcatctattgtaattcaattgcttgcaacggtttctcctgctttagcagaattaaagaaagaaggtgctgctggtcagcgtaaaatttctaaatatactcgttatgcgacagttgtttttgcaacgattcaggcagtagctatttcaacaggcttaccaaatatgttgtctggcttagtgccaaatgttggatttagtttttacttcacttcagttgttagtttagtcactgggacaatgttccttatgtggttgggtgagcaaataactgaaagaggtattggtaacggtatttcaattcttgtttttggcggtattgtagctggtttaccatcggctattcttcaaactattgagcaggctcgtcaaggacagatgcatccattagttcttcttctgatcgcagctattgtatttgcagtaacttattttgttgtttttgttgaaagaggacaacgtagaattcgcgttgaatatgcgaagcgtcagcaaggtcgtcaaattttaggtggtcattcaacacatttaccattgaaagtgaatatggcaaatgtaatgccagcaatttttgcttcaagtattattttattcccagctacattaacacaatggtttgggcaaaatgataaatttgaatggttaaataatttatcaatgttattgaatcctggtcaaccactttatttgcttgtttatgctgttgcaattattttcttcagctttttctatacagcaatgcaatataatcctcgtgatacagcagataatctaaaaaaatctggtgcatttattccaggaattagacccggtgaacaaacatcacgttatattgataaagtgatgactcgtcttacattaattggcggtctctatgtaacgtttgtatgtttagttccttatattatgacatcggcttgggatgttaaattttacttcggtggaacatctcttttaattgtagtcgttgtaattatggatttcatcgttcaggttcaaagtcatttaatgtcttctcaatatgaatctgcgttgaaaaaagcaaaccttaaaggttttggacaataa

SEQ ID NO: 22123 - DNA, 114 bp, Haemophilus influenzae
atgaaagttcgtgcttccgtaaagaaaatgtgtcgtaactgtaagattgttaaacgtgagggtgttgtacgcgtattgtgtagcgaccctaaacacaaacaacgtcaaggttaa

SEQ ID NO: 22124 - DNA, 369 bp, Haemophilus influenzae
gtggcccgtattgcaggcattaacattcctgatcataaacacgctgtaatcgctttaactgccatttacggtattggtaaaactcgttcacaagctatttgtgcagcagcgggtattgctgaagatgttaagatcagagaattgtctgaagagcagattgacaaactgcgtgacgaagttggtaaatttaccgttgaaggtgacttacgtcgtgaagtaacactaaacatcaaacgtcttttagacttaggatgctatcgtggtttacgtcatcgtcgtagtttaccagtacgtggtcaacgtactaaaactaatgcgcgtacccgtaaggtccacgtaagccgatcaaaaaatagtcggggtaaataa

SEQ ID NO: 22125 - DNA, 390 bp, Haemophilus influenzae
atggctaaaacaccagttcgtgcacgtaaacgtgtaaaaaaacaagttgtagatggcgtacgacatattcacgcatctttcaataatacaatcgttactattactgaccgtcaaggtaatgctctagcttgggcaactgcaggtggttcaggtttccgtggttctcgtaaatcaactccgttcgcagcgcaagttgcggcagagcgttgtgctgaaatcgttaaagaatttggcttaaagaacttggaagttatggttaaaggtccgggtccaggtcgtgaatctacaattcgtgcgttaaacgcagcgggtttccgtatcacgaatattactgatgtgactccgattcctcataacggttgtcgtccaccgaaaaaacgtcgtgtttaa

SEQ ID NO: 22126 - DNA, 621 bp, Haemophilus influenzae
atggcaagatatttgggtcctaaactcaagctcagccgtcgtgaaggcactgatttattccttaaatcaggcgtgcgtgcgattgattcaaaatgtaaaattgatacagcaccaggtcagcacggtgctcgtaaaccgcgtttgtctgactatggtagtcagttacgtgaaaaacaaaaagttcgtcgtatctatggtattttagaacgtcaattccgtaactactataaagaagcaaaccgtttgaaaggtaacactggtgaaaatttattagtgttattagaaggtagattggataacgttgtttatcgcatgggatttgctacaactcgcgcagaggctcgtcaattagtgagtcataaagcaattgttgtgaatggtcgtgttgttaatattccatctttccaagtttctgtaaatgatgtagttgctattcgtgaaaaatcgaaaaaacaagctcgtattaaagcatcattagaattagcagagcaaagagaaaaaccaacatggttagaagttgattctgcaaaaatggaaggtgtattcaaacgtgttcctgaacgttctgatttatcagcagacattaacgaacatctgatcgttgagctttactctaaataa

SEQ ID NO: 22127 - DNA, 987 bp, Haemophilus influenzae
atgcagggttctgttacagaatttttaaaaccacgtttagtagatattgaacaaattagttcaacacatgctaaagtgatcttagaaccgttagagcgtggttttggtcatactctaggtaatgcattgcgtcgtatccttctgtcttcaatgccaggttgtgctgtaactgaagtagaaattgatggcgtattgcatgaatatagtagtaaggaaggtgttcaagaagatattcttgaagtacttttgaaccttaaaggtctagcggttaaagtacagaataaagatgacgttattctgacattaaataaatctggaattggccctgttgttgcagcggacattacctatgatggtgatgttgaaattgtaaatccagatcatgtgatttgtcatttaactgatgaaaacgcttcaattagtatgcgtatacgtgttcagcgtggtagaggatatgttcctgcttcatctcgtacacatacgcaagaagaacgtccaattggtcgtttgcttgttgatgcttgttatagtccggttgaacgaattgcgtataatgtagaggcagctcgtgttgagcagcgtacagatttggataagctcgttattgagttagaaactaatggtgcacttgagccagaagaagcaattcgtcgtgcagcaacaatcttggcggagcaacttgatgcattcgttgatttacgtgatgttcgtcagcctgagattaaggaagaaaaaccggaatttgawccgattttattacgtcctgtagatgatttagagctgacagttcgttctgctaactgtttgaaagcagaaacaattcattatatcggtgatttagtgcaacgtactgaagtagaattattaaaaacccctaatcttggtaagaaatctcttactgaaattaaggatgttcttgcttctcgtggcttgtcacttggtatgcgccttgaaaattggccgccagcaagtattgctgaagactag

SEQ ID NO: 22128 - DNA, 387 bp, Haemophilus influenzae
atgcgccatcgtaagagtggtcgtcaactaaaccgtaatagtagtcatcgtcaagcgatgttccgtaacttagcaagtgctttagttagtcatgaaatcattaagactactttgcctaaagctaaagaattacgccgtgtagttgaaccgttaattacattagcaaaagtagatagcgttgctaaccgtcgtttagcattcgctcgtactcgcaacgttgaaactgttgcaaaattatttaatgaattaggtccacgttttgctcaacgtgcaggtggttacactcgcattttgaaatgtggttttcgtgcaggcgataatgcaccaatggcatacattgagttagttgatcgtccagaagttgctgaggcaacaactgaggaataa

SEQ ID NO: 22129 - DNA, 558 bp, Haemophilus influenzae
atgcttaaccaaattaaaaaagatgctcaagatcgtatggaaaaaagccttgaagcattaaaaggtcatatttcaaaaattcgtactggtcgtgctcaaccgagtttacttgatgcaattcaagttgaatattacggtgcggcgaccccacttcgccaattagcaaacgtagtggcagaagatgcgcgtactttagccgtaactgtgtttgatcgttctttaatctctgcggtagaaaaagcaattttaacctcagatttaggtttaaacccatcttcagcgggtaccacaatccgtgttccgcttccgccattaacagaagaacgtcgtcgcgatttaatcaaaattgtaaaaggcgaaggtgaacaaggtaaagttgcggttcgtaatgtgcgtcgtgatgcgaatgataaaatcaaagcattattaaaagacaaagaaatcagcgaaaacgaacaacataaagcagaagaagaaatccaaaaaatcacagatatttacattaaaaaagtagatgaagtattagcggataaagaaaaagaattaatggatttctaa

SEQ ID NO: 22130 - DNA, 1617 bp, Haemophilus influenzae
atgacagacttaaataaagtggtaaaagaacttgaagctcttggcatttatgacgtaaaagaagttgtttacaatccaagctacgagcaattgttcgaagaagaaactaaaccaggcttagaaggctttgaaaaaggtactttaactacgactggtgcagtggcagtagatacaggtatcttcacaggtcgttctccaaaagataaatatatcgtgttagatgaaaaaacaaaagatactgtttggtggacatctgaaacagcaaaaaacgacaacaagccaatgaaccaagctacatggcaaagcttaaaagacttggtgactaaccaactttctcgtaaacgcttatttgtagttgatggtttctgtggtgcgagcgaacacgaccgtattgcagtacgtattgtcactgaagtagcgtggcaagcacattttgtaaaaaatatgtttattcgcccaactgaagaacaactcaaaaattttgaaccagatttcgttgtaatgaacggttctaaagtaaccaatccaaactggaaagaacaaggtttaaattcagaaaactttgttgctttcaacttgactgaacgcattcaattaatcggcggtacttggtacggcggcgaaatgaaaaaaggtatgtcctcaatgatgaactacttcctacctctcaaaggtgttggtgcaatgcactgctcagctaacgttggtaaagatggtgatgtagcaatcttcttcggcttatctggcacaggtaaaacaaccctttcaacggatccaaaacgtgaattaatcggtgacgatgaacacggctgggatgatgtgggtatctttaactttgaaggtggttgttatgcgaaaaccattcatctttcagaagaaaatgaaccagatatttaccgcgctatccgtcgcgacgcattattagaaaacgtggttgttcgttcagatggttctgttgatttcgatgatggttcaaaaacagaaaatactcgcgtgtcttacccaatttatcacatcgataacattgtaaaaccagtttctcgtgcaggtcacgcaactaaagtgattttcttaactgcagatgcatttggcgtattaccaccagtatctaaattgacaccagaacaaactaaatactacttcttatctggtttcactgcaaaattagcagggactgaacgtggtattactgaaccaactccaactttctcagcatgtttcggtgctgcgttcttaacccttcacccaactcaatatgctgaagtgttagtaaaacgtatgcaagcagcgggtgctgaagcttacttagtaaatactggttggaatggcacaggcaaacgtatctcaatcaaagatactcgtggaatcattgatgcaatcttagatggctcaattgaaaaagctgaaatgggcgaattgccaatcttcaacttagcaattcctaaagcattaccaggtgtagattctgcaatcttagatcctcgcgatacttacgcagataaagcacaatggcaatcaaaagctgaagacttagcaggtcgttttgtgaaaaactttgttaaatatgcaactaacgaagaaggcaaagctttaattgcagctggtcctaaagcttaa

SEQ ID NO: 22131 - DNA, 882 bp, Haemophilus influenzae
atgaccaatcaacaagactatactcaagacaatgacaaactttaccgttatcttttccaacatcgtgcagttcgtggagaatgggttcgcttaaataaaacatttactgatacattaaatacccatcagtatcctaaagcagtacaggatttattgggagaaatgatggtagcgactaatttactcactgccacactaaaatttgccggcaatattaccgtacaaattcaaggcgatggcccattacgcttagcattagtaaatggtaatgatcaacaacaaatccgcgcccttgctcgagtggatggcaacatcactgaaaatatgagtctgcataatatgattggtaaaggcgtattggtcattactattgcaccaaaagaaggcgaacgctatcaaggtgtaattagcttggataaacccacgatcacagaatgcttagaagattattttgtacgctcagaacagcttcaaactcaattaattattcgtactggagaatatgaaggcaagccagtggcagcaggtatgttattacaaattatgcctgatggttctggtacaccagaagattttgagcatttaactacgctcgcagcaacagtaaaagatgaagaattatttggtctccctgcagaagagttactctatcgtttatatcacgaagaaaccgttaatctttatccagcacaagatgtacaatttttctgtggctgctctgctgagcgttctagttctgcattactgctcatctctgatgaagaaattgacgaaatattagccgaacataaaggccgtattgatatgcaatgtgagtgttgtggcacacactacttctttaataaagaagcgattgaaaaattaaaatcaacaagagtttaa

SEQ ID NO: 22132 - DNA, 1374 bp, Haemophilus influenzae
atggcactttggggtgggcgttttacacaagccgcagataagcgttttaaagattttaatgattcattacggtttgattaccgtttggcagaacaggatattcaaggctcgattggttggtccaaagccttggtgaaagtcaatgtattaactatcgaagaacagcatcaacttgagcaagcactaaatgaattacttgttgaagtgcggtcaaatccgcaagcaattttacaagatgatgctgaagatattcatagttgggttgaaagtaagctaattgataaagtaggcaaccttggtaaaaaattacatactggtcgtagccgtaacgatcaagtggcagtcgatataaaactgtggtgcaaacagcgtgtgattgaattacaagaatcagtacgtaatttgcaacgacacttagttcaaaccgcagaaaacacacaacaagcagtaatgcctggctatacccatttacaacgagctcaaccaataacttttgcccattggtgtatggcatatgtggaaatgttcgaccgcgactattcacgtttaacagatgcgtataatcgtatgaatacttgtccacttggtagtggtgcgctggctggtacggcttatgctgtagatcgtgattcacttgcgcacgatcttagttttgctttcgcaactagaaatagcttagatagcgtctctgatcgcgatcatatcgtagaattactttccatcgcctctcttagtatggcacatctttcccgctttgctgaagatatgattatctttaacagcggagaagcaaatttcgtggaactatccgatcgtgtgacttctggttcatcattaatgccacaaaagaaaaatcccgatgcttgtgagttaattcgaggcaaaacggggagagtaattggttcattaacatctatgttaatcaccttaaaaggcttgccacttgcgtataataaagatatgcaagaagacaaagagggtatttttgatgccttagatacttggcaaaactgtgtagatatggcaacgttcgtcttagatgaattgaaagtaaatgttgaacgtactcgtgaagctgcgttaaaaggctattcaaacgcaactgaattagcggattatttagtctctaaaggcgtacctttccgagattcccatcatatcgtaggcgaaacagtggtttatgcaatcgagaaaggcaaaggattagaagatctgactatccctgaattccgccaatttagtgaagtagtgggagatgacgtttacgagattctttctctccaatcttgcttagacaaacgttgtgcaaaaggtggcgtatcgccattgcgtgttgccgaagctattgcagaagccaaaacaagatttgcttaa

SEQ ID NO: 22133 - DNA, 888 bp, Haemophilus influenzae
atgaaagcagttattcctgtcgccggtcttggcacacgtatgttgcccgccacgaaggcgattccgaaggaaatgctcactttggtggataaaccgttaattcaatacgtggtaaatgaatgtgtagctgctggcataaaagaaattgtgctggtaacacattcatcaaaaaatgctatcgaaaaccattttgatacatcttttgaattagaaacgatgctggaaaaacgtgtgaagcgtcagcttctagaagaagttcgttctatctgtccaaaaaatgtaaccattatgcacgttcgtcaaggtaatgcgaaaggtttaggtcacgccgtgttatgcggtcgtcctttagtaggaaatgaatcttttgccgttatgttaccagatgtattattagctgaatttagtgcagatcagaaaaaagaaaatcttgctgcaatgattcaacgctttaatgaaactggcgcaagccaaattatggtaaccccagttccgcaagaaaatgtgagtagctatggtgttgcagattgtggtggcattgagcttaatggcggcgaaagtgcaaaaattaatagtattgttgaaaaaccttctattgaagacgcaccatcaaatcttgctgtggttgggcgttatgttttttcagcagcaatttgggatttgttagaaaaaacaccaattggtgttggcgatgaaatccaattaaccgatgctattgatatgctaattgaaaaagaaaccgttgaagcatttcatatgacaggggaaacttttgattgcggcgataaaattggttatatggaagctttcgtagaatatggtattcgtcacgaaaaattaggtaaagaatttaaatcctttatcaaaaatttggcaaaaacgctataa

SEQ ID NO: 22134 - DNA, 192 bp, Haemophilus influenzae
atgttaatcttaactcgtaaagttggcgaaagtgtacttattggagatgatatttctatcacggttttgagtgtacgtggaaaccaagttaaactcggtgttgaagcgcctaaagaagtatccgttcaccgagaagaaatttaccaacgaattaaacaaacgaaagatgaaccctatttaggttcctcttag

SEQ ID NO: 22135 - DNA, 2625 bp, Haemophilus influenzae
atgaaaacaacagcagaaataagacaatcattccttgattttttccatagcaaaggtcaccaagtagttgagagtagctcacttgtgccggaaaatgatccgactttgcttttcacgaacgctgggatgaaccaatttaaggatgtgttccttggaatggataaacgcccttattctcgagccaccaccgcgcaacgttgcgtacgtcctggtggtaagcataacgacttagaaaatgttggttataccgcacgtcaccatactttctttgaaatgctcggtaacttcagttttggtgattactttaaacaggatgccattaattttgcttgggaatatttaacttctccacaatggcttggtttacctaaagaaaaactctgggtaaccgtgtatgaaactgacgacgaagcctataatatttggaataaagatgttggtgttcctgctgaacgcattattcgcattggtgacaataaaggctcaccttacgcatcagacaacttctgggcaatgggcgacacaggtccttgcggtccttgtactgaaattttctacgatcacggcgatcatatttggggcgggcctccaggctcaccagaagaagatggcgaccgttatattgaaatctggaacgttgtgtttatgcagttcaaccgtttagcagatggcacaatggaaaaattacctcgtccgtctgttgatacaggtatgggtttagagcgtatttctgctgtgttgcaacatgtgaactcaaactacgagattgatattttcaaaacattaatcgcaaaaacggcggaaattgtaggcgcaacagatttaactaacaaatcactacgtgttattgctgaccatattcgttcttgtgcatatttaatcgccgatggcgttatcccatcaaatgaagggcgtggttatgtcttacgtcgtattattcgccgcgcagttcgtcacggtcacctattaggtgctaaagaatcttttttctataaactcgtgccaactctaattgatgtaatggctgaagctggaaaagatgtaaaagcaaaacaaacaaatgttgaaaaactattacgtctagaagaagaacaatttgctcgcactctagaacgtgggttgagcttattagatgaagccctttctcaagtgaaagatggcattctttcaggtgaagttgcattcaaactttatgatacttatggtttcccattggatttaacggctgatgtatgtcgtgagcgcaatattactattgatgaacaagcgtttgaccgtaaaatggaagcgcaacgtactcgtgctcaagcagcgagccagtttggtgtggactacaacagcgttattcgtgtagatggcgaaactaagtttgaaggctatactgaagtagaatctcaggcaaaaattaccgcacttttctatgatggtaaatcagtggaaagtatcgaagcaggtcaaagtgcggtcgttattttagaaaatacgccattttatgcagaatcaggtggtcagattggcgatagcggatatttaagcacacaaagtgtaacctttaatgtgaaagatacccaaaaatatgggcaagtatttggacacattggagaattaacgcaaggaagtttgaaagttggacaatcagtgaatgcgattgtggatgctaaacgtcgccacaacacatcactcaatcactcagcgacacacttattgcacgctgccttacgtcaaattctaggtttacacgttgtgcaaaaaggttcgcttgtttcagataaagccttacgttttgactttgcgcaaccagaagccattaccaaagagcaattgagtgaaattgaaacattagtaaaccaaaaaatccgcgctaactttccagttcaaacagatattatggatattgattccgcaaaagcgaaaggagcaatggctctctttggcgaaaaatatggcgataaggttcgtgtattaaccatgggcgatttctcaattgagctgtgtggcggtattcacgcaaaacgcacaggcgatattggtttatttaaaattattactgaaaacgcagtggctgcaggcattcgtcgtattgaagctgtaacaggtcaaaatgccattgactggttacataatcaacaacgcattctgacccaaagcgcagacttattaaaatcagacgtaaataccttagcggaaaaaatccagcaacttcaagacaaagcgaagaaagtggaaaaagaattgcaaggtctaaaagaaaaagccgcaatgcaggcaggttcttattttgtaaaaagtgcggtaaaaatcaatggtgtttctgttatcgcacaacaattagatggtatagaaacaaaatcattacgcgtaatggtcgatgatttaaaaaatcaactcggatcaggcgtaattgcatttgcatcaatattagatgaaaaagttaatctcgtcgttggagtgacaaatgatctaaccgccaaaataaaagctggagaacttgttaatttaatggctcaacaagttggaggaaaaggcggtggtcgtccagatatggcaatggcaggaggttcccaactagaaaatgtgacacaagcaattaaagtagcacaagactggttaaacaaaaatctgtag

SEQ ID NO: 22136 - DNA, 1521 bp, Haemophilus influenzae
atgacagctcaaactcaatgtcaagacagccaagtgctgctcacaatgaccaatgtctgcaagtcctttccgggcgtaaaagccttagataacgccaacttaacggttcgatcacattctgttcatgccttaatgggcgagaacggcgcgggcaaatctacattactaaaatgtttattcggtatttatgccaaagatgaaggcgaaattcttttcttaggcgaacccgtcaatttcaaaacatctaaagaagcccttgaaaatggtatttcaatggtgcaccaagaactcaacctcgtgcgtcaaactagcgtaatggataatttatggcttggacgctatccacttaaaggtccttttgttgatcacgccaaaatgtaccgtgatactaaagcgatttttgatgaattggatattgatgtagatccgaaagaaaaagtcgccaaactttcagtttctcaaatgcagatgatcgaaattgcgaaggcgttctcgtataacgctaaaatcgtaatcatggatgaaccaacatcctcgctttctgaaaaagaagttgagcatctgtttaaaattatcgacaaattaaaacaacgcggttgcggcattatttatatttctcacaaaatggatgaaatcttcaaaatctgtgatgaaattactattttacgcgacggtaaatggatcaacacggtaaacgtgaaagaatccacaatggaacaaattgttggaatgatggtagggcgtgaattaacacagcgtttccctgaaaaaaccaacgtgccaaaagaagttattttgcaggtggaaaatcttaccgctaaaaatcaaccatccattcaagacgtatcttttgaattacgcaaaggtgaaattctcggtattgcagggcttgtgggggctaaacgtaccgatatcgttgaagctatttttggcgtacgtgaattaatcgaaggaacgattaagttacacggaaaaactgtgaaaaatcataccgcacttgaagcgattaataatggctttgcattggttactgaagagcgtcgttcaacggggatttattctaatttaagtattgagtttaattcattgatttcaaatatgaaatcttatctcactccgtggaaattacttagcacgaagaagatgaaaagtgatacccagtgggtaattgattcaatgaatgttaaaacaccatcacacagaactacaattggttctctttctggtggtaaccaacaaaaagtcattattggtcgttggcttttaactcaacctgaaattttgatgctagatgagccgactcgtggtatcgatattggggcaaaatttgaaatttaccaacttattcaagaactcgctaaaaaagataaaggcattattatgatttcatcagaaatgccagaattactgggtgtgactgatcgcattttagtaatgagtaacggtaaattagcaggtatcgttgaaagcgcaaaaacatcgcaagaagaaattttgcaactcgcggcaaaatatttataa

SEQ ID NO: 22137 - DNA, 558 bp, Haemophilus influenzae
atgaaacaactccttgactttatccctttaattttattttttatcacttacaaactcggtggtgtacgtgaagcagccatcgtattagtggttgcaacaattttgcagatcgtgattttaaaatggaaatacggaatggttgaaaaacaacaaaaaattatggcaagtgcggtcgttttttttggacttttaaccgcttactttaatgaaatccgctatttgcaatggaaagtgacaattatcaatggcttatttgctattgttttgctcgtcgcacaatttcaatttaaaaccccattaatcaaaaagttacttggtaaagagctacaattgcccgaaaaggcttggaatacattgaattttggttgggcaatattctttattatttgtatgttggtaaatatttatatcagccataatatgtcggaagaggcttgggttgatttcaaatctttcggaattattggtatgacagtgattgcaaccattatttcgggagtttatatttatcgttatttgcctaaagatggctcaaattcaaaagacggagagaaataa

SEQ ID NO: 22138 - DNA, 465 bp, Haemophilus influenzae
atgtctgccaattttactgataaaaatggtcgccaatcaaaaggagttcttttactacgaactttggcgatgccttctgacaccaatgctaacggagatatttttggtggctggattatgtctcaaatggatatgggcggcgcgattttagcgaaagaaatcgcacacggacgcgtggttactgtcgccgttgaaagtatgaattttatcaaaccaatctctgtgggcgatgtggtttgttgctacggtcaatgtctcaaagttgggcgttcttccattaaaattaaagtagaagtatgggtaaaaaaagtggcgagtgagccaattggcgaacgttattgtgtcaccgatgcggtatttacttttgttgcagttgataataatggtcgctctcgcacgattccccgtgaaaataaccaagagttagaaaaagcattagccttaatttcagaacaacccttgtaa

SEQ ID NO: 22139 - DNA, 585 bp, Haemophilus influenzae
atggtacaacaaaaaatcgctaatcttttacaaggtgattttcgatatcaaatccaatataactgggttagcctagaaaatatctctccaaacattcaattagctgtgatttcatcagaagatcagcgttttcttgaacatttaggctttgattttgaggctatccaacgagcaattcggtataacgaaaaatctaacaaaggaatccgaggggcatcaactatttcccagcaaactgctaaaaacttaatgctttggcacggacaaaattggctacgaaaaggtttagaagttccagcgactatgttgcttgagctgacttggtcgaaaaaacgtattttagaagtgtatttaaatattgcggaatttggaaacggcatttttggtgtggaagcggcaagtcgctattactttaaaaaatcagctaaaaatttatctcaaaatgaagccgcacttttagctgctgtgttgcccaatccaatcatttataaagtaaataagccaagcttattagttcgtaaaaaacaaacttggattttgagacaaatgggaaatttaggcactgaatacttgagccatttataa

SEQ ID NO: 22140 - DNA, 1002 bp, Haemophilus influenzae
atgtgcaaaatttttaaaacaggattaaaaatgaccgcacttaatcattggcaaccttctgctgatataaaaaatcatcttaaacgggcaaaaattattgctaaaattcgtcaattttttacagaacgcggtttgcttgaagtagagacccctgttctaagtgaatttggcgtcactgatttacatctttccacctttagcacggaatttctcgcgcctttcggtgaacaatccaaaacactttggctttctacaagccctgaatatcatatgaaacgcttgcttgctgcaggcagtgggccgatattccaaatcagtaaagtgtttcgcaacgaagaggctggaaatcgccataatccagaattcactatgttggaatggtatcgaccgcactttcatatgcatcgtttaattaatgaagtagatgatttgctccaacaaattttagattgtccacctgcagaaagtttaagctatcagtttgttttccaagaatatgtaggcttagatcccttgtcagcagaacgttcagaattaattgaagcagcacgtaaacataattttatggctgaagataatgaagatcgcgatacgttattacagtttttatttagtgaagtcgttgagcctcaaattggaaaagaacgacctattgccgtgtatcatttcccttcaacacaagcagctctagcacaagtaagcccagaagatcagcgggtagcagaacgctttgagttctattataaaggtttagaattagccaatggttttcacgaacttgccgatgcgcaagaacaacgtcatcgctttgaattagataatcaacaaagacaaaaatgtgaattgcctactcgagaaattgatgaacgctttcttgctgccttagaagcgggtatgccagatgcttcaggtgtcgcattaggaatagatcgtttaatgatgatcgctttagattgtgaaaaaattaatgacgttatttcttttgctgtggacaatgcttaa

SEQ ID NO: 22141 - DNA, 684 bp, Haemophilus influenzae
atgtcaaaactcttactcgttgatgatgatattgaattaactgaactactttctacacttttagaacttgagggttttgacgttgaaactgcaaataatggattagaagcattacaaaaactcaatgaaagctataaactggttttacttgatgtaatgatgccaaagttaaatggtatcgaaacattaaaagaaattcgtaaagtctctaacgtgccagtgatgatgctaacagcaagaggcgaagacattgatcgcgtattaggcttagaattgggagcggatgattgtttacccaagccttttaacgatcgtgaacttattgcaagaattaaggcgattttgcgtcgtagtgcatctccttcaaataatatatcaaatgtagaaatcctttcttttgacggaattactctccacttttctcacggaattgcaacctataatgaagaaaatctaaatttaacggattatgaatttaagattctttgtttattgcttaaatctaagggaaatgtggtaagtcgagaagaattaagtttagaagtaatggaaaaaccgctcactccatttgaccgttctcttgatatgcacatctctaatttaagacgcaaattaccaaaacgaaaaaacaagccctcttggtttaaaactttacgcggaaaaggatacgctttagttacctaa

SEQ ID NO: 22142 - DNA, 1650 bp, Haemophilus influenzae
atgcttatgaaactaaaagcaacattaactctcgccgctgcaactcttgttttggcagcttgtgatcaatctagctcggcaaataaatctaccgctcaaactgaagcaaaatcctcgtcaaataatactttcgtttattgcacagcgaaagctccattgggatttagccctgcgttaataattgaaggtacttcttataatgcaagctcacaacaagtgtataaccgcttagttgaatttaaaaaaggctcaacggatattgaaccagctttagctgaaagttgggaaattagcgatgatggtttaagttatacttttcatttaagaaagggtgttaaattccatacaacaaaagaatttaccccgacacgtgattttaatgcagatgatgttgtattttcattccagcgtcagttagatccaaatcatccatatcacaatgtatctaaggggacttatccatattttaaagcaatgaaattccctgaattgttgaaatcagtggagaaagtagacgataacacaattcgtattaccttaaacaagacagatgcgactttcttggctagtcttggtatggattttatttctatttattctgcagaatatgctgattcaatgctgaaagcgggtaaaccagaaacacttgatagtcgcccagtggggacaggcccttttgtttttgtggattataaaacagatcaagccatacaatatgttgcgcatgaaaattattggaaaggtagaacacctttagatcgtttagtcattagcattgtgcctgatgcaacaacacgttatgcaaaattacaggcgggtacttgcgatttaattttattcccaaatgtagcggatttagccaaaatgaaaaccgatccaaaagtacaacttttggaacaaaaaggtttgaacgtagcgtatatcgcattcaataccgaaaaagcaccgtttgataatgtcaaagtgcgccaagcgttgaattacgcagtggataaaaaagcgattattgaagcggtttatcaaggcgcaggaacatcagctaaaaacccacttcctccaacaatttggagttataatgatgaaatccaagattatccgtacgatccagaaaaagcaaaacaacttttagcagaagcgggttatccaaatggttttgaaactgatttctggattcaacctgttattcgtgcttctaatccaaatccaaaacgtatggctgaattaattatggcggattgggcgaaaattggtgtaaaaactaacccagtgacttatgaatgggctgattatagaaaacgagcaaaagagggagaattaactgcgggtatctttggttggtctggcgacaatggcgatcctgataatttcttatccccattattaggtagctcaaatataggtaattctaatatggcacgtttcaataattcagaatttgatgctttactcaatgaggctattggattaaccaataaggaagaacgtgcgaaactttataaacaagctcaagttattgtccataatcaagcaccttggattccagttgcccactctgttggttttgcaccacttagtcctcgtgtaaaaggttatgtacaaagcccatttggctatgacgctttttatggtgtgagtgttgatggtaaataa

SEQ ID NO: 22143 - DNA, 2793 bp, Haemophilus influenzae
atggcccaaattgcaacaaatccgcttgtgctagtggatggttcttcttatttatatcgtgcatttcatgcctttccttctttaactaatgccgcaggtgagccaacaagcgcgatgtacggcgtgttaaatatgttaaaaagcctcatctcacaagtacagcccactcatatagccgttgtttttgatgcaaaagggaaaacatttcgtgatgaaatgtttgaacaatataaatctcaccgaccaccaatgcctgatgatttacgcaaacaaattcagcctttgcacgatatgattcgtgcattgggcattccgcttttagtggtggaagggattgaggcagatgatgtgatcggcacgctcgcactacaagcatcaagtttgggtaaaaaagtactcattagtactggcgataaagatatggcacagttggtggatgacaatattatgctcatcaacaccatgaataatagcttattagatcgcaagggcgtgattgaaaaatacggtattccacctgaactcattattgattatctagcactcatgggcgatagtgcagataacattcctggcgttgctggcgtgggcgaaaaaaccgcacttggtttactacaaggcataggaagcatggctgaaatttatgccaatcttgaaaaagtagcggaactgccaattcgtggagcgaaaaaattaggtgaaaaattattggcagaaaaaaacaatgccgatctttcttatacattagcaaccatcaaaaccgatgttgaacttaacgtgacaacagatcaattgttgcttggagaaagccaaaaggatcaacttattgaatattttgctcgctacgaatttaaacgctggcttaatgaagtgatgaatggggcagattctattacccaaaccactgaacagccagtgaaaatgaaccagtataaagcgacctcacaagatcaaagtgcggtggaaaatacgcctaaaattcaaatcgatcgtacaaaatatgaaaccttgctcactcaagcggatttaacccgctggattgaaaagctcaatgcagcaaaactcattgcagtcgatactgaaacagacagccttgattatatgtctgcgaatttagtgggtatctcttttgctcttgaaaatggcgaagctgcttatttaccattgcaattggattatttggatgcaccaaaaacactcgaaaaatcgaccgcacttgccgctatcaaaccaatcttagaaaatcctaatattcacaaaattggacaaaacattaaatttgatgaaagtatttttgcccgtcatggcattgaattacaaggtgttgaatttgatacgatgttgctttcctatacgctaaatagtacgggtcgtcataatatggacgatttagccaaacgttatttaggtcatgaaactatcgcatttgaaagccttgcaggaaaagggaaaagtcagcttacgtttaatcaaattccattagaacaagccacagaatacgcggcagaagatgctgatgtgacaatgaaattacaacaagcactgtggttgaaactgcaagaagaaccaacgcttgttgaattgtataaaacaatggaattaccattgcttcatgtgctttctcgtatggaacgtacaggcgttttgattgatagtgatgctctctttatgcaatctaacgaaattgcctcaagattaaccgcacttgaaaaacaagcttacgcattagcgggtcagccattcaatttagcctccaccaaacaattacaagaaattttgttcgataaacttgagctacctgttttacaaaaaacgccaaaaggtgcgccatcaacgaatgaagaagtattggaagaattatcctatagccacgaattacccaaaattttggttaaacatcgtgggttgagcaaacttaaatccacttacacggataaactgcctcaaatggtcaattcacaaacaggccgagtgcatacctcttatcatcaagcggtgacggcgacagggcgtttatcatcaagtgatccaaacctacaaaatattccaattcggaatgaagaaggtcgtcatattcgacaagcatttatcgcgcgtgaaggttattctattgtcgccgctgactattctcaaattgagttacgcattatggcgcatctttcaggcgatcaaggcttaattaatgcgttctcgcaaggcaaggatattcatcgctccaccgcagctgaaattttcggtgtatcattagatgaagtcaccagcgagcaacgtcgcaatgctaaagcgattaatttcggcttaatttatggaatgtccgcctttggactttcacgccaacttggtatttcccgtgctgatgcacaaaaatatatggatttatatttccaacgctatcctagcgtacaacaatttatgactgatattcgtgaaaaagcgaaagcacaaggctatgtggaaacgctatttggtcgccgtttatatttaccagatattaattctagcaatgcaatgcgtcgtaaaggagcagaacgtgtggcaatcaatgcaccgatgcaaggcacggctgcggatattattaaacgagcgatgattaaacttgatgaagtaatccgtcacgatccagatattgaaatgattatgcaagtacatgatgaattagtgtttgaagtgcggtcagaaaaagtcgcgtttttccgtgagcaaattaaacaacacatggaagccgctgctgaattagttgtcccattgattgtggaagtaggtgttggacaaaattgggatgaagcgcattaa

SEQ ID NO: 22144 - DNA, 564 bp, Haemophilus influenzae
atgaatactcaaaaacgccagcaaatccgcactgaaatccgaaaaatacgtgcaaatttaaccgcacttcaacagcaccaagctgaacaatcggttactcaacacgcgttaaatcttatcgagcaacgacaagccaaaaatattgcattatatttttcttttgatggtgaaatttccacaaaagccttaatccaatccctgtggatgcaaaataaaaatgtgtatttgcctgttttacatccttttactaaacactatttattgtttttacgctatttacctgatacgccaatgaaacaaaatcagtttggcatttgggagccaaagctaaatgttcaaaatgttttgccattaaatgaactggatattttatttacgccattggtggcttttgataaaaaaggaaatcgccttggtatgggcggtggattttatgatcgcacgttgcagaattggcaaaataaatcttttattccagtggggttagcgtaccaatgtcagcaagtagaaaatcttcccactgagcattgggatgtgccactattcgatattttggtaggttga

SEQ ID NO: 22145 - DNA, 2571 bp, Haemophilus influenzae
atgaacattgaaaaatttacgacaaaattccaagaagcgttaagcgaacgacaatcacttgctatcggaaaagacaatcaatttattgaacctgtgcatttattgaccgcacttttaaatcaacagggcggctctattgcgccaattttgacagcaagtggcgtaaatgtggctttattgcgtaatgaattaaagacagaactaaataaattgccgcaagtgattggcaatggcggtgatgtacaactttcacgccagcttattaatctacttaatttatgcgataaattcgcacagcaaaaccaagataaatttatttcgagcgaattgtttttgtttgcagctttagaagaacgaggaacgatcagcgatattttgaaaaagtgcggtgcgaaaaaagaacaaatttcgcaagctattcagcacattagagggggacaaaacgtgaacgatcaaaatgcagaagaaagcagacaagcgcttgaaaaatatacgattgatttaaccgctcgtgcagaaagtggcaaacttgatcctgtaattgggcgtgatgaagaaattcgtcgagccattcaagtattacaacgtcgtaccaaaaataaccctgtgttaattggtgaaccaggtgtagggaaaacggcgattgtcgaaggcttggcacagcgcatcgtaaacggcgaagtgccagaaggtttgaaaaataaacgtgtgctttcattagatatgggggcgttgattgctggtgcgaaatatcgtggtgaatttgaagaacgtttaaaagcagtactcaatgaactttcgaaagaagaaggtcgcgttatcctctttattgacgaaattcatactatggtcggcgcgggtaaaaccgatggtgcgatggatgcgggtaatttgttaaaaccaagtttggcacgaggcgaattacattgcgtgggtgcaactactttagatgaatatcgtcaatatatcgaaaaagatgccgcacttgaacgccgtttccaaaaagtctttgtggacgaaccaagtgtagaagataccattgcgatcttacgtggtttgaaagaacgttatgaaattcatcatcacgtggatattactgacccagcaattgtcgctgcagcaacgctttcacatcgttatatttccgatcgtcagttaccagataaagccattgatttgatcgatgaagcagcgtctagcattcgtatggaaatagattctaaacctgaaccgcttgatcgtcttgaacgtcgtattatccaattaaaattggaacaacaagcgttacaaaaagaagaagacgaagcaagtcgcaaacgtttagaaatgttagagaaagaattggctgaaaaagaacgtgaatacgccgaacttgaagaagtatggaaatctgaaaaagcaacgctttctggctctcaacatattaaacaagagttagatactgcaaaaaccgaactagaacaagctcgtcgcgcgggtgatttagcgaaaatgtctgagttgcaatatggccgcatccctgatcttgaaaagcaacttgagcaagctgaaaccagcgaaggaaaagaaatgacgcttttacgctatcgcgtcacagatgaagaaatcgcagaagtgctttctaaagccacaggcattcctgtatcaaaaatgatggaaggcgagaaagaaaaactcttgcgtatggaagatgaactacataaacgagtgattggtcaagaagaagcggttgatgcggtagcaaacgcgattcgtcgtagtcgtgcaggtctttccgatcctaatcgcccaattggttctttcttgttcctagggccaacaggtgttgggaaaacagagctttgcaaaactttggctaaattcttgtttgatagtgaagatgcgatggtgcgtattgatatgtcagagtttatggaaaaacacagtgtttctcgtttagttggtgcgcctccaggctatgtcggctatgaagaaggcggttatttaactgaagctgttcgtcgtcgtccatattcagtgatcttattagatgaagttgaaaaagcacacgcagatgtattcaatatcttattacaagtgttggatgatggtcgtttaactgatggtcaaggtcgtactgtggacttccgtaacactgtggttattatgacctctaacttgggttctgatttaatccaaggtaataaagacgaaagctatagcgaaatgaaagccttagtgatgtcagtggtaagccaacatttccgcccagaattcatcaaccgtattgacgaaaccgtggtattccatccacttggtaaagaaaatatccgtgcgattgcaagtatccaattagaacgcttagcaaaacgtatggaaactcgtggatacgaattggtgtttaccgatgctttattagacttcattggcgaagtgggatacgacccaatttatggtgcacgtccattgaaacgtgctattcaacaagaaattgaaaacagcttggcacaacaaattctatctggtgcgttattacctggtaaggttgttaccattgattatgccaacgcagaagttcaagcgagacaatag

SEQ ID NO: 22146 - DNA, 708 bp, Haemophilus influenzae
atgaaattaacctctccgatctttaatgatcaacaaaaacgtcgtgcaatcatctggctcagctttttccacatattcatcattgcagcgagcaattactttgtacaaatcccttttgaaatcacgctaaaattgaccgcacttggtgcagcaaatgatttttctttccacagcacttggggaacgctcacattcccatttatctttttagctactgatttaaccgtacgaattttcggtgcggaagatgcgagaaaaatcatcttcgtagtgatgtttcctgcacttattgtaagttacgtcatatctgttttattctctgaaagcaaattccaaggtttcgaatcattaacgcattttgatctgtttgtattccgtattgctattgcaagttttgcagcttacgttgtaggacaattgcttgatgtgatcgtatttaaccgcttacgccagttaaaaacatggtgggtggcgccaactagctcaatgacattcggttcaatggcggatacgtttgttttcttcagtatcgccttctaccaaagtgcagatccgttcatggctgaacactgggcacaactcggctttgtagattatctatttaaattatttataggaattatcttgttcgtcccagcctatggcgtagtattaaatgttattttacgaaaactacaaatgctcgtaacagaacgcgttcctgcataa

SEQ ID NO: 22147 - DNA, 1851 bp, Haemophilus influenzae
atgaaaaacgaaattgatattaaaaaactccgtaacatcgccattattgcgcacgtagaccatggtaaaaccactcttgtagataaacttcttcaacaatctggtacttttgaatctgctcgtggtgatgtggatgaacgcgttatggactcaaacgatcttgaaaaagaacgtggcattaccattcttgcaaaaaataccgcgattaactggaatgactaccgcattaacatcgtggatactccagggcacgcagacttcggtggcgaagttgaacgtgtactttctatggtggattctgttctattagttgttgatgcgtttgatggcccaatgccacaaacgcgtttcgttacacaaaaagcattcgctcacggcttaaaaccaatcgtcgtaattaataaagttgatcgccctggtgcacgtcctgactgggttgtggatcaagtgtttgacttatttgtcaatcttggtgcaagcgatgaacaattagacttccctattatctatgcttcagcattaaatggtgttgctggtcttgaacacgaagatttagcggaagatatgaccccattatttgaagccattgtgaaacatgtagaaccgccaaaagtagaacttgatgcgccattccaaatgcaaatttcacaattagactacaacaactatgtaggcgttattggtattggtcgtattaagcgcggttcgattaaaccaaaccaacctgttactatcatcaatagtgaaggaaaaactcgtcaaggtcgtatcggtcaagtacttggacatcttggtttacaacgttatgaagaagacgttgcttatgctggcgatattgttgctatcactggtttaggagaattaaatatttctgatacgatttgtgatatcaacacagttgaagcactgccatcattaacggttgatgaaccaaccgtaaccatgttcttctgtgtaaatacctctccatttgcgggacaagaaggtaaatacgtcacatcgcgtcaaattcttgaacgcttaaataaagaattggttcacaacgtggcattacgcgtagaagaaaccccaaacccagatgaattccgtgtatctggtcgtggcgaattacatctttccgtgttaatcgaaaatatgcgtcgtgaaggttatgagcttgcggtttctcgtccaaaagtaatttatcgtgatattgacggtaaaaaacaagaaccatacgaacaagtaactatcgatgtggaagaacaacatcaaggttctgtgatggaagcattgggtatccgtaaaggtgaagttcgtgatatgttgcctgacggtaaaggtcgtgtgcgtttggaatacattatccctagtcgtggattgattggcttccgtggtgattttatgaccatgacttctggtacaggcttactttactcaagctttagccactatgatgaaatcaaaggcggcgaaattggtcagcgcaaaaatggtgtgttgatttctaatgcaacaggtaaagcacttggctatgcattatttggcttacaagaacgtggtaagttaatgattgatgcaaacatagaagtttatgaaggtcaaattatcggtattcatagccgctcaaatgacttaaccgtaaactgcttgcaaggtaaaaaactaactaatatgcgtgcgtcaggtaaagacgatgcgattgtgctaactacacctgtaaaattcagtcttgaacaagcgattgaatttatcgatgatgatgaactagtggaagtaacacctgagtcgattcgtatccgtaaaaaacttttaacggaaaacgatcgcaaacgtgcaaatcgtacaacaacaagtactagcacgcattaa

SEQ ID NO: 22148 - DNA, 1419 bp, Haemophilus influenzae
atgccaaacgcaaatgcaattgccaatgtatttaagctaattgaagaaaataatgtgaaatttgtacttcttcgatttaccgatattaaaggtaaagaacatggtgtttctatcccagttagccttgttgatgaagatatgtttgaagacggcaagatgtttgatggttcctctgttgaaggatggaaaaccattaataaagccgatatgttgcttatgccaatggctgaaacggcaattgttgatccattcgcgcaaattccaacgctttctattcgttgtagtgtttatgaaccaacgacaatgcaaagctatgatcgcgatccgcgctctattgcaattcgtgcagaaaattatatgcgttcaacaggtattgctgatcaagctttttttggtccagagcctgaattcttcttatttgatgatgtgcgttttaatgtatcaatgaacaaagcatctttttctattgatgatatagaagctgcttggaacacgaataaaaaatatgaagaaggcaataacgcttatcgcccattgaaaaaaggtggatattgtgccgttgcaccgattgatagtgcgcacgatattcgttctgaaatgtgcttgattttagaagaaatgggattagtcattgaagcccatcatcatgaagtggcgactgcagggcaaaacgaaattgcgactaaatttaatacgctaactttaaaagcggatgaaactcaaatttataaacatgtcgtacaaaacgttgcattagagcacggtaaaacggcgtgttttatgcccaaaccaattactggagataatggttcgggtatgcactgtaatatgtcgttaagtaaagacggaaaaaatattttccaaggcgataaatatgcaggcctttctgaaaccgcactttactacatcggcggtatcattaagcacgctaaagccttaaatgcgttcactaatccaagtactaattcatataaacgtttagtgcctggttatgaagcaccagtattgttggcttactctgcaagcaatcgttcagcctcaattcgtatccctgctgtaaccaatccaaaagcgattcgcgtagaagcacgtttcccagatccattggcaaacccatatttagcatttgctgcattattaatggcaggtcttgatggcgtggtaaacaaaatccacccaggcgatgcgatggataaaaatctttacgatcttcctccagaagaattaaaagatattcctgcagtagcaagctcgttagaagaagcgttaaattcattagaaaaagactatgaattcttaactcaaggtggcgtatttgctaaagattttattgatgcgtttatcagtatcaaacgtaaagaagtggaacgtttaaatatggcaccacatccagttgaatttgaaatgtattatgcataa

SEQ ID NO: 22149 - DNA, 624 bp, Haemophilus influenzae
ttggataaaatagctttaaaaattaccttttcagcagaaactccaaaatatgcacaatctgtattgacagagtatgtaaattttgtaagtcaatatagtcttaaccaaacaaaccaagagtttaaacagggatttaacctccgtttagatgagctgagatttagtaaagaacaaattgaagagaatctaacagaagaaaaaaaggttcaagttgaaaacttaacaaatgcgttagatattgctaaaaaagcgggtattaaagatttttcaagaggaaataatatctctgattctaaattagcagatggtacatatttatttatactcgctgaaaaatatttacaggcgcaactagatattgctaaaaacacacctgttgtttacccagctaattattatattacagatagacagttatttaaattaaataaattagcttcacaattggaattagttgaggatgtaaaaacgtattattatttaagctctcctgattatcctgtggttaaagataatcctaagagatcgttgattcttgctatcgggtttattatcggtattctgttacctactttctttattttattaggttcggttatacaaactaataaaaagcagtcatga

SEQ ID NO: 22150 - DNA, 753 bp, Haemophilus influenzae
atgaatatgccactcattagtataataatgcctgtttataatgcagaatgttaccttaatcaaggtattttatcttgcttaaatcaatcttatcaaaacattgaattaattttaattgatgatggttcaacagataaaagtattgaaataataaataacatcattgataaagataagcgggttaaacttttctttaccccaactaatcaagggcctgcagcggcaagaaatatagggttagaaaaagcacaaggtgactatattacattcttagatagtgatgattttattgcaaatgataaattagaaaaacaacttaattttatgttgcaaaatcatcttgtaatgacgcatggcaactatgctttctgtgatttggaaggaaatcagataaaattagttacgactagtaaaaaaattgattatttaaccttattacaaggtaaccaatttaaaataatgactgtacttgttgaaagagaatctattaaattacttaggtttcctaatattaaacacgaagattacgccttctttttggattgtttaaaagaagttaaacaatctatactatatagccatcaggcaagttcatttgtaagaatcggtaaagtcagcgtttcatcaaataaatttaaaagtgcaatctggacatttaatatctattttaaaagagagaaactaggtgtagtaaaatcaatttattattttatcctctatgcctataatggatttattaaatacaagaaataa

SEQ ID NO: 22151 - DNA, 1416 bp, Haemophilus influenzae
atgaatagattatttttttctaaaattgcgttatggttattggattttttaacatttaatatttcttttttattatccttatttgttatttcttattatcataatggttatgaaaaatatttacctatttatgaaattgatgacagaacatatattcatgctgttttagctggaatatgtgttggatggtttgctattaggctaagacattatacttatagaaaacctttttggtttgagttaaaagagatttttagaacacttattatctttgcgatttttgaacttgcaattgttgcatttcctaaattgtatttctctcgctacttatgggcgcttacatgggggattacctttctactttttccattggcgagagttttagtaaagaaatttcttataaaatcaggttggtttcttagagatacaattatgattggttctggggataatgcttttgatgtttataatgcattaagagatgaaccttatttggggtttcaggtcacgcattttatttcagtttctaatattagtaataatgtaaaggaattaaatattcctatattaaatagtatgtcttcttggacatcagtaactaaaaaaacagatcaatttattattgcattggaagatgatgaagaggtagatagaaataattggttacgttatttttccacaaatggctatcgttcagtttctgtgattcctacattgagaggcttacctttatataatacggacatgtcttttatgtttagccatgaaatcatgttattacaaatgaataataatctggctaaactatcttctcgtattttgaaacgaaccatggatattgttgttggctccttagctattattatattttccccagtgttgctttatctgtattttgcagtaaaaaaagatggtggtaatgctatttatgggcatcctagaattggtcgtaatggaaaaacatttaactgtttgaaatttagaacaatggctgtgaattctaaagaagtgctagatgaattgctaagaacagatcctgaagcaagagctgaatgggaaaaagattttaaattaaagaatgatcctagaattactaaaatcggtgcttttattcgcaaaacaagtttagatgaattacctcaattatttaatgttttaaaaggtgaaatgagtttagttgggcctcgcccaattgtaattgatgagctagagcgttatgaagaaaacgtagattattacttaatggcaagacccggtatgacagggctttggcaagtcagcggacgtaataatatcgattataatactcgcgtttattttgattcttggtatgtaaaaaattggtcactttggaatgatattgcgattttatttaaaacaatgaatgtggttttaaatcgtgatggagcttattaa

SEQ ID NO: 22152 - DNA, 1200 bp, Haemophilus influenzae
atgattcaagaaaaacatctaacgtttacaattaacctcttagtttctctatttttcttaaccattttaatcattccaaagggttataactatgcgccaataatattaagcgcaattggattgatttatttcataccattaaagaaaaaactatcttttagctctgaagataaaaaactgattttttcttttttattttattttttcacattcttattatctatcattatcaataaagatggaattagagaaatagataatccaagccgacttcttttattcattcctctactacttttattcaaaaattttccaataaaaaggaaaacaattttatacgcaattccttctagtgcattaattacaggatgtgttgcgttatttcagaaatttgcattaggatatgaaaaaccgtttcctgaaacaatgcatatacaaatgggcaacattgcgatctctttagccacattcagcattgttatcactcttcacttcttcatcaaaaaacaatataaatctacattatttgggtttgtagccattatacttgctatcatgactagtgcattatctggggctagaggtggatggattggcttacccgttgtagttggtataattttatttctatacaaagaattcattaataagaaacttattataactttaatcgccattattaccattggattaaccgcactaattaccagtcctaaattcggaattgaaaaacgatataacgcagcaaaatcagatattgttagctatttagaaaaaaacaatagaaatacctcattaggtgccagatttgacatgtgggaaaatgccttaattgctataaaggaagcgcctatctttggccatgggagtgatggatacgatgagtttagacataaacaagtaaaatctaaacaaatggctaaaaccactttaaattttggaagtttacataatcaatatttagaatcttgggtgaaacgtggtttagttggatttatagcattaatcctgattattctaactccaatattttactttattaaaaatttaaacacccataatttagaaacaaaatgtatttgtattttaggaattatacatattgtttcccatatattttatttcacaagccagtcattcttggctcataactcaggcaatattttttatttttcagctatgttgtgttttattgtctaa

SEQ ID NO: 22153 - DNA, 1173 bp, Haemophilus influenzae
atgaaatttattgatgaatcccttattcgaattgaggctggggatggtggtaacggttgcgtaagtttccgtcgagagaaatttattccgaaaggcggccctgatggtggcgacggtggcgatggtggcgatgtctatttacaagccgatgaaaacctcaataccttaatcgattatcgctttaataaacgctttgccgcagagcgtggagagaatggacggagttcagattgtacaggacgtcgcggtaaagatattattttacctgttcccgtgggaactcgtgctattgataacgacaccaaagaaaccttgggggatttaacccaacatggtcaaaaaatgttggtagccaaaggtggttatcacggtttagggaatactcgtttcaaatcatcagtaaaccgtgcaccgcgtcaaaaaacaatgggtacgccgggcgaaaaacgcgatttattattggaattaatgctacttgctgatgtgggaatgctcggtttacctaatgctggtaaatccacttttattcgtgccgtttcagcagccaaaccaaaagttgcagattatccatttactaccttagtaccaagtctcggtgttgtaaaagtggatgactcacacagtttcgtagtcgctgatattcccggattaattgagggcgcagcagatggtgctgggttaggaattcgttttttaaaacatctagaacgttgtagagtgcttattcatttagtcgatattgcgccaattgatggctctaatccagcagataatatggctattattgaatctgaacttttccaatacagtgaaaaattatcagaaaagccacgttggttagtattcaataaaattgatacgatgagcgatgaagaagctgaagagcgagccagagaaattgctgaacaattaggttgggaagaagattattacttcatttcagcggcaacagggaaaaatgtttctccactttgtcgtgatattatggactttatcatcgcaaatcctcgcgaagctgaaacacaacaagttgcacctgaagaagtaaaattcaaatgggaagattatcatcaagaacgactagcagagcatcaatttgatgatgacgaagattgggatgatgattggagcgaagaagacgatgaaggaattgagttcatctataaaccttaa

SEQ ID NO: 22154 - DNA, 258 bp, Haemophilus influenzae
atggcaactaaaaaagctggtggttcaactcgtaacggtcgcgattctgaagctaaacgccttggtgttaaacgtttcggtggcgaatctgtattagcaggtagcattatcgttcgccaacgtggtactaaattccacgcaggtaacaacgtaggaatgggaagagatcacaccttattcgcaaccgcagatggtaaagttaaatttgaagtaaaaggcgagaaaagccgtaaatacgtagttattgttactgaataa

SEQ ID NO: 22155 - DNA, 312 bp, Haemophilus influenzae
atgtacgcagttttccaaagtggcggtaaacaacaccgtgtgagcgaaggtcaagttgttcgtttagaaaaacttgaacttgcaactggcgcaacagttgagttcgattctktgttgatggtcgttaatggtgaagatgttaaaattggtgcgccagtagttgctggtgcaaaagtagtggctgaagttgttgcacaaggtcgtggcgagaaagttaaaatcgttaaattccgtcgtcgcaaacacagccgtaaacaacaaggtcatcgtcagtggttcacagaagtgaaaatcactgggattcaagcataa

SEQ ID NO: 22156 - DNA, 990 bp, Haemophilus influenzae
atgaagaaacaagatcttatgagcatagacgagatccagaaacttgcagatccagatatgcaaaaagttaatcaaaatattcttgctcagcttaattcagatgtaccgctaataggacagttaggtttttatattgttcaaggtggtggtaagcggatccgtccgttgatcgcagttctcgcagcacgatctttagggtttgaaggatctaattcaattacttgtgctacttttgttgaatttattcataccgcttctttgttacacgatgatgtcgtagatgaatctgatatgcgtcgtgggcgtgctacggcgaatgctgaatttggtaatgcagcgagtgtgttggtaggcgattttatttatacgcgtgcatttcaattagttgcacagttagaatcattgaaaattttaagtattatggctgatgcgactaatgttttagcggaaggcgaagttcagcagttaatgaatgttaatgatcctgaaacgagcgaagctaattatatgcgtgtaatttatagcaaaactgcccgtttgtttgaagtggctggtcaggctgcggcaattgtcgccggtggaacagaagctcaagaaaaggctttacaagattatgggcgttatcttggcactgcatttcagctcgtggatgatgtattggattatagtgcaaatacgcaagctctaggtaaaaatgtaggcgatgatttagctgaaggaaaaccaacccttcctctactacacgctatgcgtcatggaaatgctcaacaggcagctttaattcgcgaagcgattgagcaaggtggtaaacgtgaagcaattgatgaagtattagctattatgactgagcataagtctttagattatgcaatgaatcgtgcaaaagaagaggctcaaaaagcagtggatgcaatcgaaattttgccagaaagtgaatataaacaagcgttgatttcattggcatatttgtctgtagatagaaattattag

SEQ ID NO: 22157 - DNA, 711 bp, Haemophilus influenzae
atgactactccaaaaattctcgttgttgaagatgaaattgtcactcgaaatacgcttaaagggatttttgaagcggaaggatatgatgtgtttgaagcagaaaatggtgttgaaatgcatcatatattggcaaatcataatattaatttggttgtgatggatattaatttaccaggcaaaaacggcttattattggcaagagaactccgtgaagaattaagcttacctcttatttttttaactggtcgagataatgaagtggataaaattttaggtttggaaattggtgccgatgactatttgactaagccttttaaccctagagaactgactatccgcgcacgtaatctattgcatcgtgcaatgccgcatcaagaaaaagaaaatacatttggtcgagaattctatcgttttaatggttggaaattagacctaaatagccacagtttaattacaccagaaggacaagaattcaaacttcctcgcagtgaatttcgtgcaatgttacatttctgtgaaaatccaggaaaattgcaaacgcgcgaagaattgctgaaaaaaatgaccggacgagagttaaaacctcaggatcgtaccgtagatgtcacaattcgacgtatcagaaaacattttgaagatcatcccaatactccaaatatcattatgactatacatggagaaggctatcgtttttgtggagatattgaataa

SEQ ID NO: 22158 - DNA, 1266 bp, Haemophilus influenzae
atgtttacaagaaatatgactatcgctgattacgatccagtattgtggcaagcgattcaagatgaaaatcgtcgtcaagaagaacatatcgaactcattgcatctgaaaactatgcgagtccacgtgtgatggaagcgcaaggttcacaattcactaataaatatgcggaaggctatccaggtaaacgttattacggtggttgtgagtatgctgacattgtggaacagttagcaattgaccgtgcgaaagaattatttggtgcagattacgtgaatgttcaaccgcactctggatcacaagcgaatgctgcggtgtatggtgcattgattaatgcaggcgatactattttaggtatggatttggctcacggtggtcatttaactcacggtgcaaaagtcagtttctctggcaaaatttataactccgtactttatggaattactgcggatggcttaattgattatgaagatgttcgtcaaaaagcattagaatgtaaaccaaaacttatcgttgctggtttctcggcttattcacaagttgtggattgggcgaaaatgcgtgaaatcgcagatgaagttggtgcgtatttatttgtggatatggcgcatgtagcgggattaattgcagcgggtttatatccaaatccactaccgcatgcacatgttgtgacaacaacaactcacaaaacattgggcggtccgcgtggtggtttaattctttcatcttgtggcgatgaagaaatctacaaaaaattacaatcatccgtattccctgcaaaccaagggggtccattagttcatattattgcggcaaaagcagtttgctttaaaggagcattagagcctcaatataaagaataccaagcaaatgtaatcaaaaatgcaaaagcaatggttgaagtatttaaacaacgtggttatgacgttgtgtcaaatggtactgaaaaccacttgttcttagtaagtttcatcaaacaaggattaacaggtaaagcagcagatgcggcattgggcaaagcaaatattaccgtgaataaaaatgctgtaccaaacgatccgcaaaaaccattcgtcacttctggcatccgtgtaggtacaccatctgtgactcgtcgtggtttcaatgaaaatgatgtgcgtgaattagctggctggatgtgtgatgttttagatgctttaggcaaagaaaatgaagaacaagtgattgctgaaactaaagaaaaagtattagcaatttgtaaacgtcttccagtttatccgaaatga

SEQ ID NO: 22159 - DNA, 1149 bp, Haemophilus influenzae
atgaaaataattttagtggtatttgtcttaatttttgtcggtgtcatcggttttaatatgataaaaggcgtaatgataagccgagccattgcaggaatgccagaatcttcaagcccagtaaccgcacttgaagttcaaccgcgtgaatggacgccagttattaacacaacaggtcttgtgcgtccaaatcaaggcgcaatgctcagtacacaaaatgcgggcgcggtttcacaagtacttgttcaaaatggacaaaatgtgaaaaaaggtgaggtgcttgtggagcttgatagttctgttgaacgagctaatctacaagctgctcaggcacaattatcagcacttcgtcaaacttaccaacgttatgtgggtttattaaatagcaatgctgtatcacgtcaagaaatggataacgcaaaagcggcttatgatgctcaagtagctagtattgaatctctaaaagcagcaattgaacgtcgtaaaattgttgcgccatttgatggcaaagcaggtattgtgaaaatcaatgttggacaatatgtgaatgttggaacagaaattgtgcgtgtagaagatactagctcaatgaaagtggattttgctctttcacaaaatgatttagataaattacatatcggtcagcgcgttacagcgacaacagatgctcgcttgggcgaaacattttcagctcgaatcactgcgattgaacctgccattaattcatcaacaggtttagttgatgttcaggctacttttgatcctgaagatgggcataaattgctttcaggtatgttctctcgcttacgcattgcacttccaactgaaacaaatcaagttgtcgttccacaagtagctattagctacaatatgtatggcgaaattgcctatttacttgaaccattatctgaagaagaaaaaggaaaaatgtcaggtaatgaaaaattggatcgtctctatcgtgcgaaacagatcaccgtatttactaaagatcgtcaaggtgtttatgctcaattacagggaaatgaagttaaagtgggagataaaattattacaggcggtcagcaaggtattggtaatggaagtcttgtggaatggattaaaaaagacattgtgggtgcaatagagcctgcacataaaacaccactttaa

SEQ ID NO: 22160 - DNA, 3099 bp, Haemophilus influenzae
atgtatgaggaaatccgaatgaaatttaccgatatatttattcgtcgtcctgttttagcagtttcaattagtttgttaatgattattttagggttgcaagcaatctcgaaattggcagtgcgtgaataccctaaaatgactactacagtcattacagtgagtaccgcatatccaggggcagatgcgaatttaatccaagcatttgttacgtcaaaattggaagaatctatcgcgcaagccgataatattgattatatgtcttcgactagtgcgcctagtagttcgactattacaataaaaatgaaattaaataccgatcctgcaggcgcgttagcagatgtgttagccaaagtgaatgcagtaaagtcagcattaccaaatggtattgaagatcctagtgtatcctcttcttcaggtgggagcggtattatgtatatcagtttccgatctaaaaaactagattctagtcaggtaactgattacatcaatcgtgtagtcaaaccacagttttttaccattgagggtgttgccgaagtacaggtatttggtgcagctgaatatgcattacgtatttggctagatccacaaaaaatggcagctcaaaatctttctgtgccaacagtgatgtctgccctttctgcaaataatgtacaaacggctgcggggaacgataatggctattatgtgagttatcgtaataaagtagagactacaacgaaatcagtggaacaactcagcaacttaattatttcatcaaatggcgatgatttagtgcgtttgcgtgatattgcaaccgttgaattaaataaagaaaatgataattcgcgtgctacggcaaatggtgcagagtccgttgtgttagccatcaatccaacctcgacagcaaaccctttgactgtcgcagaaaaaattcgccctttatatgaaagtataaaaacacaactgccagacagtatggaaagcgatattctttatgaccgcactattgccattaatagctctattcacgaggtcataaaaactattggtgaagctactttgatcgttttagtggtaattttaatgtttatcggttcgttccgtgctattttaattccaatattggctattccaatttctcttattggcgtattaatgctgctacaaagtttcaacttttctattaatttaatgactttgcttgctttaattcttgccataggtttagttgtagatgatgctattgtggtgctggagaatattgatcgtcatattaaagcgggagaaacgccattccgagcagcaattattggtacgcgtgaaattgcagtccctgttatttctatgactatcgcattgatcgcagtttactcaccaatggctttaatggggggcattactggcacattgtttaaagagtttgctttaacccttgctggtgcagtatttatttctggtgttgtggcattaacgttatcgccaatgatgagtagtaagttactcaaatccaatgctaaaccaacatggatggaagaacgcgtagaacataccttaggtaaagtaaatcgtgtttacgaatacatgcttgatctcgttatgctcaatcgtaaatcaatgctggcttttgcggtcgtgattttctcaacgctcccatttttgtttaattcactttctagtgaattaacgccaaatgaagataaaggcgcatttattgcaattggtaacgcgccatctagcgtaaatgtggattacattcaaaatgcaatgcaaccatatatgaaaaatgtaatggaaacacccgaagtttcttttggtatgagcattgctggtgcgccaacttctaatagctcgttaaatatcatcacattgaaagattggaaagaacgttcacgtaaacaatccgcaataatgaatgaaattaatgaaaaagcaaaatcaattccagaagtgtcagtatcagcatttaacattcctgaaattgatacaggggaacaaggccctccagtctctattgtattgaaaactgcacaagattataaatctttggcaaacaccgcagagaaattcctcagtgcgatgaaagcctctggcaaatttatttatacaaatttagatttgacctatgacactgcacaaatgactatttctgtggataaagaaaaagcgggaacttacggtattacaatgcaacaaatcagtaatactttagggagtttcttatctggtgcgacagttacgcgtgtggatgtggatggacgcgcttataaagtcatttcgcaggtaaaacgagatgatcgcttatcgccagaaagtttccaaaattattatttaactgcatctaatggtcaatcagtgccattaagtagtgttattagtatgaaattagaaactcagccaacatcattaccgcgtttcagtcagttaaattcggctgaaatcagtgctgtaccaatgccgggtatatcaagtggtgatgccattgcttggcttcaacaacaggcaacagacaatttaccgcaaggctatacgtttgattttaaatctgaagcacgtcaattagtccaagaaggcaacgcattagccgtcacttttgcattggctgttatcatcatattcttggtacttgccattcagtttgaatctatacgtgacccaatggtaattatgatttctgtaccattagccgtaagtggtgcattggtgagcttaaatattttatccttctttagcatcgcaggaacaacattaaatatctactctcaagttgggttgattactctcgtgggattaatcaccaaacacggtatcttaatgtgcgaagtggcaaaagaagaacagcttaaccatggtaaaactcgaattgaggcaatcactcatgctgcaaaagtacgtttacgcccaatcctaatgacaacggcggcaatggtagctggcttaattccattactctatgcaacgggtgcaggagcggtatctcgctttagtattgggatagtgattgtagcgggattatccattggtactattttcaccttgttcgtcttgcctgtagtatatagctatgtcgcaactgaacacaaaccattaccggtttttgatgaaaataaaacaacccactaa

SEQ ID NO: 22161 - DNA, 483 bp, Haemophilus influenzae
atgacatttagtttaattgtggcgacaacattaaataatgtgattggtaaagataaccaaatgccttggcacttgcctgcagatttagcttggtttcgtcagaacaccactggtaaacctgtcattatggggcgtaaaacctttgaaagtattggtcgtccactacctaaacgtaccaatatcgtactttctcgccagctttttgaacacgaaggtgtgatatggaaagatagctttgaaagtgcggtcaattttgtcagagattttgatgaaattatgttgattggtgggggagagttattcaaacaatatttacccaaagcagataagttataccttactcaaattcaaacagaactagatggcgatacttttttccctcaattgaattgggaggagtgggaaattgaatttgatgaatatcgtaaggcggatgaacaaaatcgctatgattgtcgatttttgattcttacacgaaaataa

SEQ ID NO: 22162 - DNA, 852 bp, Haemophilus influenzae
atgaagcaatatcttgagctttgtcgccgcattgttagtgaaggggaatgggttgctaatgaacgtacaggtaagcattgcctcacggtcattaatgcagatttagaatatgatgtggcgaataatcaatttccgctgattactacccgtaaaagttattggaaagcggcgattgctgaatttttaggttatattcgtggatatgacaatgccgctgatttccgcgcacttggcacgaaaacttgggatgctaatgcgaatgaaaatgcagcttggcttgcaaatccgcatcgtagaggcgttgatgatatggggcgcgtatatggtgtgcaaggcagagcatggcgtaagcctaatggagaaactatcgatcagctacgtaaaattgttaataacttaacgaaaggtattgatgatagaggagagattttaactttttttaaccctggggaatttgatcttggttgtcttcgtccttgtatgcatacgcatactttttctcttgtgggcgatactttacatcttactagctatcagcgttcctgtgatgttccgcttggattgaatttcaatcaaattcaggtgtttaccttcttagcacttatggctcagatcacgggcaaaaaagccggcaaggcatatcataaaattgtgaatgcgcatatttatgaagatcagcttgagttaatgcgtgacgtacaacttaaacgcgagcctttcccattaccaaaattagaaattaatccagatataaaaacgcttgaagatttggaaacttgggtcacgatggatgattttaaagtcgttggctatcaatcccacgaaccaattaaatatcctttttccgtctaa

SEQ ID NO: 22163 - DNA, 2706 bp, Haemophilus influenzae
atgagcattttaacaagaatttttggtagtcgtaatgaacgcgttttacgtaaattaaaaaaacaagtcgtaaaaattaataaaatggagcctgcttttgaggcattaagtgatgatgaattaaaagcaaaaacacaagagtttcgtgatcgtttaagtggtggcgaaactttgcaacaaattttaccagaagcattcgcaacggtacgcgaagcaagtaagcgtgtgcttggtatgcgccattttgatgttcagcttatcggtgggatggtattgactaaccgctgtatcgcagaaatgcgtactggtgaaggtaaaacattaacggcgactttgccttgttatttaatcgcacttgaaggtaaaggcgttcacgtggtaaccgtgaatgattatcttgctcgccgagatgcagaaacaaaccgtccgttatttgaatttttaggcatgagtgtaggcgtcaatattcctggtttatcgccagaagaaaaacgtgcagcttatgcggcagatattacttatgcaaccaatagtgaacttggttttgattatttacgtgacaacttagcccactcaaaagaagagcgtttccaacgtactttaggctatgcgttggtggatgaagtggattctatcttaatcgatgaagcgcgtacgccattgattatttctggtcaggcagaaaacagttcagagctttatattgcggtaaataaattgatcccaagtttaattaaacaagaaaaagaagatacggaagaatatcaaggagagggcgatttcactttagatttgaaatctaaacaagcgcatttaaccgaacgtggtcaagaaaaagtagaagattggttaattgcacaaggtttaatgcctgagggggactctttgtattctcctagtcgaattgtattgcttcatcacgttatggctgcattgcgtgcgcacacattgtttgaaaaagatgtcgattacattgtgaaggacggtgaaatcgtgattgttgatgaacacactggtcgtacaatggcggggcgtcgttggtcagatggtttgcaccaagccattgaggcaaaagaaggggtggatgttaagagcgaaaaccaaactgttgcatcaatttcttaccaaaactacttccgtttatatgaacgtcttgcgggtatgacggggactgcggataccgaagcatttgagttccaacaaatttatggcttggaaactgttgtaattccaacaaatcgtccaatgattcgtgatgatcgcactgatgtgatgtttgaaaatgaacaatataaatttaatgcgattattgaagacattaaagattgtgtagaacgccagcaaccagtattagtggggacgatttcagtcgaaaaatcagaagaattatctaaagcgttagataaagcaggtataaaacacaatgtgttgaatgcgaaattccaccaacaagaagcggaaatcgtggcagaagcaggatttcctagcgcagtgactatcgcaacgaatatggcgggtcgaggtacggatattattcttggcggtaactggaaagcgcaggctgccaaattagaaaatccaactcaagaacaaattgaagcccttaaagcagagtgggagaaaaaccacgaaattgtaatgaaagcgggtgggttgcatattatcggtacagagcgtcacgaatctcgccgtattgataaccagttgcgcggtcgttctgggcgtcaaggtgaccccggttcttctcgtttctatctttctttggaagatggtttaatgcgcatttatttgaatgagggtaagctcaatttaatgcgtaaagcgttcacggtagcaggcgaggcaatggagtcgaaaatgttggcgaaagtgattgcatctgctcaagcaaaagttgaggcgttccattttgatggccgtaaaaacctacttgaatatgatgatgtggcaaatgaccaacgtcacgcgatttatgagcaacgcaatcatttgcttgataatgatgatatttctgaaactatcaacgctattcgccacgatgtgtttaatggtgtgattgatcaatatattccaccacaatctttggaagaacaatgggatattaaagggcttgaagaacgtttatctcaagagtttggtatggaattaccgatttctaattggttggaagaagataataatcttcacgaagaaagtttgcgcgaacgcattgtggaaattgcagaaaaggaatacaaagaaaaagaggctttggttggcgaagacgctatgcgccattttgaaaaaggtgttatgttgcaaaccttagatgaactttggaaagaacacttagcttcgatggattatttacgccaaggtattcatttacgtggctatgcccaaaaagatccaaaacaagagtataaaaaagaatctttccgtatgtttacggaaatgttggattctttaaaacaccaggttatcacggctttaacccgtgtacgtgtgcgtactcaagaagaaatggaagaagctgaacgtgctcgtcaagaaatggcagcacgtatcaatcaaaataatttacctgtggatgaaaatagtcagacaactcaaaattcagagactgaagattattcagatcgtcgcattggtcgcaacgagccttgtccttgtgggtcgggtaaaaaatataagcattgtcacggcagtcgtgtggcacgccagtaa

SEQ ID NO: 22164 - DNA, 756 bp, Haemophilus influenzae
gtggaggctcaaccccaacaaaaggaaaatattatggcacaagtttcaatgcgcgatatgatcaacgcaggcgtacacttcggacaccaaactcgttactggaacccacaaatgaaacctttcatttttggtgctcgtaacggtgttcacatcatcaatcttgaaaaaactttacctttattcaacgaagctttagcggaattaactcgcattgctagcaacaacggtaaagtattattcgttggtacaaaacgtgcagcgtctgaagcagttcaagcagcagcattagattgtcagcaatattacgtaaaccaccgttggttaggtggtatgttgactaactggaaaaccgttcgtcaatcaattaaacgtttaaaagatttagaaacccaatctcaagacggtacttttgataaattaaccaaaaaagaagcgttaatgcgtagccgtgagatggaaaaacttgaattaagccttggcggtatcaaagatatgggcggcttaccagatgcgttattcgttatcggtgcggaccacgaacatatcgcagttaaagaagcaaacaacctaggtattcctgtatttgctatcgttgatactaactcaacaccagctggcgtagatttcgttatccctggtaacgatgatgcgactcgtgctatccaactttacgtttctgcagctgcagcagcggttaaagaaggtcgtggtaacgaagctcaagttgctgaagaattagcagctgacgcagaataa

SEQ ID NO: 22165 - DNA, 852 bp, Haemophilus influenzae
atggctgaaatcacagcatcattagtaaaagaacttcgtgaccgtactggcgcaggtatgatggaatgtaaaaaagcattagttgaagcaaacggtgatattgagttagcaatcgacaatatgcgtaaatctggtcaagctaaagcagctaaaaaagcaggccgtgttgcagctgaaggtgttatccttgctcgtgtagaaaatggtttcggtgtattagttgaaatgaactgtgaaactgacttcgtagcaaaagatgcaggtttcttaggtttagcaaatgaagtaactgatttcgcagcagcaaacaaaggtaccactatcgaagcattacaagcgcaatttgaagaaaaacgtgctgcattagttgctaaaatcggtgagaacatgaatattcgtcgtgttgcttacctagatggtcaagtaattgcacaatacttacacggtgcaaaaattggcgtattagttgcgggcgaaggttctgctgatgaactgaaaaaagtagcaatgcacgtagctgcatctaaacctgaattcgtgaacccagaagatgtatctgctgaagtggttgaacacgaacgccaaatccaaatcgatattgcgatcaactctggtaaaccaaaagaaatcgcagagaaaatggttgaaggtcgtatgaagaaattcactggtgaagtttcattaacaggtcaagcatttgtaatggatccttctgtatctgtaggggatttcttaaaatcagtaaatacttctgtttctaacttcattcgtttagaagtaggcgaaggtattgagaaaaaagaagaagattttgctgctgaagttgcaaaaatcactggcggtaatgcgtaa

SEQ ID NO: 22166 - DNA, 1026 bp, Haemophilus influenzae
atgcaaaaatcctattctttacaagaattggcaactcaaatcggcgctaccgttcgcggtaacaccgatgttgttgttgagaatatcgcgcctctcgataaagcccaatcaaatcaactcacttttatttctaacgtaaaatttcgtgtattattgaaagattctaaagcagggattttgattgtttctgaagaggatgttgaacactgttctccagaaagcaatttacttattgttaaagatccttatgtggcttacgcaattttagcgcaatatatggatagcacgccaaaagcggcacaaggaatcgcaaaaagtgcggtcatttttgatggtgttttattgggcgaaaatgtatctattggtgcgaacgcagtgattgaagaaggtgttgtactaggtgataacgtgatcattggtgcaaattgctttgttggtaaaaataccaagataggttcaggcactcaactctgggctaatgtcactgtttaccataacgttgagattggagctaattgcttaattcaatcaggaacagttatcggtagtgatggttttggttatgcaaatgatcgtggtcgttggattaaaattccacaagtagggcaagtaataattggtaataacgttgagattggtgcgaatacctgtattgatagaggcgcattagatgccacgattattgaagataacgttattatcgataacctttgtcaaattgcacataatgttcatattggcactggtacagcggttgcgggtggcgttattatggcaggtagcttaactgttggtcgctattgcttaattggtggtgcaagtgtgattaatggtcatatggaaatttgtgataaagtaaccattactggaatgggaatggttatgcgcccaattacagagcctggcgtatattcctctggtattccattgcaaacgaataaagaatggcgtaaaacagcagcactaacgttaggtattgatggaataaataaacgtttaaaagcgttagaaaagaaaatttcttaa

SEQ ID NO: 22167 - DNA, 867 bp, Haemophilus influenzae
atgcttaaacaacgagttttatctgctattgtgttaattgctgcagttttatgtgcgctatttttattcacacctttttattttgccctcgctttaggggcagtagcgattttaggcatttgggaatggactcaatttgctcgcctaaaacaacctttgatacgtttttttgtgactacctttttaggcgtatttatcttcttatggctctatactgagggcaactatttagatgcagggcgtgtgtttgaacaacatcttcagcttttattgataaatgctgttagctggtggggtttagctttgttacttgtgatcagttaccctaaatcagctaaattttggtctaaaaatccacttttacaacttttatttgccttttctacgttgattccatttgtcgcaggtgtattacgtttacgtttagaacactatacccatgatccttatcacggcttatttttattactttacgtatttatacttgtttgggcggctgattctggtgcttattttagcggacgcgcctttggcaaacgtaaacttgcccctaaagtatcgccaggtaaaagttgggaaggggtcattggtggcttaattacagcattagtgcttgcttttatctttattcatttctctaacaatactttagtaggcgatcgaaatattactggatttatcattctttctgtagccacagttgcaatttcagtattgggcgatttaactgaaagtatgtttaaacgtgagtcaggagttaaagacagcagtcaattaattccaggtcacggcggcgtattagatcgcattgacagcttgactgccgcggtaccttttttcagctatttctatttctttgtcttataa

SEQ ID NO: 22168 - DNA, 720 bp, Haemophilus influenzae
atgatagagttggatcaaacaaatataccaaaacacgttgccattattatggatggtaatggccgttgggcaaaacagaaaaataaaatgcgaattttcggacacaccaatggcgttactgcggtacgcaaagcagtggcttatgcacgacaaatcggtgtggaagtactcacactttatgcctttagtagcgaaaattggagtcgcccagaacaagaaatcagcgcgttaatgtcgctttttatgcaagccttggatcgcgaagtgaaaaaattacataaaaataatatttgtctgaaaattataggcgatgtatctcgttttagtgaaactttacaagaaaaaatcaaaaaagcggaaaatttaacagaaaaaaataccgcacttacactcaatattgcggcaaattacggcggttgttgggatattattcaagccgctaaacaaattgcagaaaaagttaaaaaagaagaaatgtcagtttcagatattaataactcgacttttcaacatcatcttgcaacccaaaatgcaccacctgtggatttattaattcgcaccagtggagaacagcgcataagcaactttttattatggcaaattgcctatgcggaattatatttttccgatgtgctttggcctgattttaatcaattagaatttaatcgcgcgattgcaagttatcaacaacgtcatcgccgttttggcgggactgaatag

SEQ ID NO: 22169 - DNA, 2586 bp, Haemophilus influenzae
atgcaagaacaatatcgccccgatatgatcgaaccaaaggttcaacaatattgggcagaaaataaagttttcaaagcaatcaaagacgaatctaaagaaaaatattactgtctttctatgttcccatatccttctggccgcctgcatatgggacatgtacgtaactatactattggtgatgtcatttctcgttatcaacgcatgttaggtaaaaacgtgttgcaaccctttggttgggatgctttcggcttaccagcagaaggtgccgcaatcaaaaacaaaactgcgcctgctaaatggacgtacgaaaacattgcctacatgaaaaaacaacttcagcttttaggctttggtttcgactgggatcgcgaaatcgcaacctgtaaaccagaatactacaaatgggaacaatggttcttcacggagctttataaaaaaggcttagtgtacaaaaaaacctcaaccgtaaactggtgcccgaatgatgaaacagtactcgcaaacgagcaagtacacgaaggttgttgctggcgttgtgatacaccagtggaacaaaaagaaatcccacaatggtttatcaaaattactgactatgcagagcaattattaggtggtttagatacccttccacaatggcctgacatggtaaaaaccatgcaacgtaactggattggtcgctctgaaggggtagaaattacctttgatgttgcaaataccaacgaaaaagtggcggtttacaccacgcgtccagataccttttacggcgtgagttatttaggtattgcagcggcacatccattagcaagtttagcagctcaaaacaattccgaattagccgcctttatccaagaagcgaaaaacgccaaagtggcagaagctgatcttgcgacaatggagaaaaaaggaatggcaacgggattatttgctattcatccattgacgggggataaattaccgatttgggttgcgaatttcgtattaatgcactacggcactggcgcagtaatggcggttcctgctcatgaccaacgtgactttgaatttgctcaaaaatacagtttgccaattaaacaagtgatcgcaccgcttgcagatgaagaaattgatttaaccaaacaagctttcgttgaacacggtaaattagtgaactcagacgagtttgatggtaaaaattttgatggtgctttcaacggcattgcagataaattagaaaaattaggtgttggaaaacgtcaagttaattaccgtttacgtgactggggcgtttctcgccaacgttattggggtgcaccaattccgatgctaacccttgaaaatggcgatgtagtacctgcaccaatggaagatttacctattattctacctgaagatgtggtaatggatggcgtaaaaagtccaattaacgctgatcctaattgggcaaaaacaacctttaacgacgcaccagcgttaaaagaaacggatacctttgatacctttatggaatcctcttggtattacgcgcgctacacttgtccacaatatcaaaatggcatgcttgatgcggaagaagcaaactattggttacctgtggatcaatatatcggtggtattgaacatgctacgatgcatttactctacttccgcttcttccacaaattattgcgtgatgcaggatttgtaactagtgaggaaccagccgataaattattatgtcaaggtatggtgcttgcagatgccttctactacacaagtccaaccaatgagcgtatttgggtaagtccaacacaggtaactcttgaacgtgatgaaaaaggcagaattattaaagcgaccgatcctgaagggcgtgaattagtccacagtggcatgaccaaaatgtcgaaatccaaaaataacggtattgacccacaagaaatggtagaaaaatatggtgccgatactgttcgcctctttatgatgtttgcctctccagcagaaatgaccttggaatggcaagaatcaggcgtagaaggtgcgaaacgtttcttaggacgcgtttggaatttggtatatcaatatcaacaaaatccagcaaaaactagcctagatttgaccgcactttccgcagaacagaaagtgcttcgtcgtgaagttcataaaaccattgcgaaagtgagcgatgatattggtcgtcgtcaaacatttaatactgcgattgctgcagtgatggaattgatgaataaactgactaaggcatcgcttgatagcgagcaagatcgtgcagttatggcggaggcattaagtgcagttgttcgtatgctttatccaattacgccacatatctgttttgaattatggcaagctcttggcaatgaaagtgctattgatactgcagaatgggtaaaagccgatgaagccgcaatggtagaagatgaaaaactgattgttgtgcaagtaaatggcaaggttcgtggcaaagttactgttgcgacagatgcagatgaagacacagtcaaaacgattgcttttgcggatgaaaatgtgaagaaatttattgataatcaacacattgtcaaagtgatttatgtcgtaggtaaattattaaacgtggtagtgaaaccataa

SEQ ID NO: 22170 - DNA, 2067 bp, Haemophilus influenzae
atgacaacccaaaacttccttgtagaaatcggcacggaagagctgccaccaaaagctctcaaaacattagcaacctcttttgcggataacgttgaggcggaattgaatcaagcaggtttatcattcgacaaaatcgaatggtttgcggcgccgcgtcgtttggcggtgaaagtgttgaacttagccacacagcaaccgagcaaagaaatcgaaaaacgcgggcctgcagtgtcagcagcctttgatgcggaaggtaaaccaacaaaagcggctgaaggctgggcacgtggttgtggtattaccgttgagcaagcagaacgcattgcaactgataaaggcgaatggctcattcatcgtgcgaaaattgaaggtcagccgaccaaaaacttacttaacgatattgtggcaaatgcgttagcgaaattgccaattccaaaaccaatgcgttgggcagataaaaccgtgcagtttattcgcccagttcacactgtgactatgttgttaggcgatgagttaattgaaggcgaaattttaggtgtggcaagtgctcgcaccattcgcggtcaccgtttcttaggcgagaaagaattttacattcaacatgcagaccaatatccgcaattattgcgtgaaaaaggttctgtggtggcggacttcaacgagcgtaaagcagaaattcttgcaaaatctcaagcaaaagcgaccgcacttggcggcgtagctgatattgaagaaagcttgcttgaagaagtcacttccttggtggaatatccaaatgttttagcagcaaaatttgaagaacatttcttagcagtgcctgcggaagccttggtttacaccatgaaaggagaccaaaaatatttcccaatttatgacaaagacggcaaattattaccgcactttatttttgtctcgaacatcaacccagaagatccaaccgcgattatcgaagggaatgaaaaagtggttcgtccacgtttaaccgatgcggaattcttcttcaaaaccgacttaaaacaaaaactggttgatcgtttaccacgtttagaaaccgtgttgttccagcaacaattgggtacattgaaagataaaactgatcgcattgagcaacttgcaggcgaaattgcaaaacaaatcggcgcagacgaagcgaaagcaaaacgtgcgggtttactgtcaaaatgtgatttgatgaccaacatggtatttgaattcactgatacgcaaggcgtaatgggtatgcactacgctcgtcatgacggtgaagatgaagaagtagcggtggcgttaaacgaacaatatatgccacgctttgctggtgatgaattaccaaaatctctcgttgcaagtgcggtcgctttagcggataaatttgacactttaacgggtatcttcggcatcggccaagcaccaaaaggtagcgcagacccatttgcattacgtcgtgcggcattaggtgcgttacgtattatcgtagagaaaaacttaccacttgatttagaagatttagtgaaaaaatcagccgcacttttcggtgataaactcacgaatcaaaatgtggttgctgatgtggtggacttcatgctcggtcgtttccgtgcatggtatcaagatgaaggcattgcggtggatgtgattcaagcggtattggcacgtcgtccaactcgcccagcagactttgatgcgcgcgtgcgtgcggtttcacacttccgtactttagattcagcggaagcgttagcagcagcaaacaaacgtgtcagcaacatcttagcgaaagcaggtgcggcaattggcgagatcaatttaaccgcttgcgtagagccagcagaaaaagcccttgctgaagcggtgcttgcattacgcactgaagtacaaccgcttatcgcacaaggcgattacacgacagtattggataaattagcaaacttacgtgcgccagtagacagtttctttgataacgtgatggtaaatgctgaagatccagcactacgtcaaaaccgattagcgattttaaatacgttacaagggttattcttacaagtagctgatatttcagtgcttcaataa

SEQ ID NO: 22171 - DNA, 909 bp, Haemophilus influenzae
atgagtacaaaatttaacgtaaaaacattccaaggtatgattttagccctgcaagaatattgggcaaaccaaggctgcaccattgtgcaaccttttgatatggaagtgggcgcaggtacttctcacccaatgaccgcattgcgcgcattaggcccagagccaatggcatttgcttatgtgcaaccttcacgtcgtccgaccgatggtcgttatggtgaaaacccaaaccgtttacaacactactaccaattccaagtggtaatcaaaccttctccagataatattcaagaactttatttaggctcgcttgaaatgctcggcttcgatccgaccaaaaacgacattcgtttcgtagaagataactgggaaaacccaaccttaggtgcatggggcttgggctgggaagtatggttaaacggtatggaagtgacccagtttacctatttccaacaagtgggtggcttagaatgtaaacctgtaacaggcgaagtaacttatggtttagagcgtttagccatgtacattcaaggcgtagattctgtatatgacttagtttggtctgatggcccgcttggtaaaaccacttacggtgatgtattccatcaaaacgaagtcgagcaatcaacctataactttgaacacgcaaacacagatttcttattctactgcttcgatcaatacgaaaaagaagcacaagagttattagctttagaaaaaccgttaccattgccagcttatgaacgtattttgaaagcagcacacagcttcaacttattagatgcacgtaaagcaatttcagtgaccgaacgccaacgctatattttacgcattcgagccttaactaaaggcgtggcggaagcttattatgcaagccgtgaagccttaggtttcccaggttgtaaaaaataa

SEQ ID NO: 22172 - DNA, 1527 bp, Haemophilus influenzae
atgagttctcaatgtcctttctcgcacttagctgcgacaaacttaacaatgggtaacggtgcacccgttgctgataaccaaaacagcttaacagctggtccgcgtggtccattacttgcacaagatttatggcttaacgaaaaattagctgatttcgtacgtgaagtgatcccagagcgtcgtatgcacgctaaaggttctggcgcatttggtacttttactgtgacacacgacattactaaatatactcgtgcaaaaatttttagtgaagtgggtaaaaaaacggaaatgttcgcacgttttaccaccgtggcaggcgaacgtggtgcagcagatgctgagcgtgatattcgtggttttgcattaaaattctatactgaagaaggtaactgggatttagtaggtaacaatacgccagtattcttcttacgtgatccacgtaaattcccagatttaaataaagcagtaaaacgtgatcctcgcactaatatgcgttcagcaactaataactgggatttctggacattattaccagaagcattacaccaagtcactgttgtaatgagtgatcgtggtattccagcaagttatcgtcatatgcacggtttcggttctcacacttatagtttctggaacgaagcgggcgaacgtttttgggtaaaattccacttccgtactcaacaaggcattaaaaatttaacagatgctgaagcagccgaaattattgcaaatgaccgtgaaagccatcaacgtgatttatatgaagcgattgaacgtggcgatttccctaaatggacattatttgtacaaattatgccggaagcagatgcggaaaaagtgccttatcacccattcgacttaactaaagtatggtcgaaaaaagactatccattaattgaagtcggcgagtttgaattaaaccgtaacccagaaaacttcttcgctgatgtagaacaatctgcgtttgcaccaagtaacttggttccgggtattggcgcaagccctgacagaatgttacaagcccgtttatttaactatgcggatgcacaacgttaccgtttaggtgtgaactaccgtcaaattccagtaaaccgtccacgttgccctgttcatagcaaccaacgtgatggtcaaggtcgtgtagatggtaactacggtagcttgccacactacgagccaaacagcttcagccaatggcaacaacaaccagactttgctgaaccaccacttcgtatcaacggagatgcagcacactgggattatcgtaacgatgataacgattacttcagccaacctcgtgcattatttaacttaatgaatgcagagcaaaaacaatcattattcaacaacacggcagcagcaatgggcgatgcacctgatttcatcaaatatcgtcatattcgtaactgccactggtgtgatgccgcatacggtgaaggcgttgcgaaagcattaggtttaaccgttgaagatgcattaaaagctcgtgatactgatcctgcattaggtcaaggtggattgttataa

SEQ ID NO: 22173 - DNA, 1311 bp, Haemophilus influenzae
  misc_feature (96)..(96): n=g, a, t or c
atggcaaaaatcgttaaagtgattggtcgcgaaatcatcgactcacgcggtaatccaactgttgaagctgaagttcatcttgamggtggttttgtnggtttagcagcagctccatctggtgcatcaactggttctcgtgaagcattagaattacgtgacggcgacaaatctcgtttcttaggtaaaggcgtattaaaagctgtggcggcagtgaacaacgaaattgcacaagctatcgttggtaaagatgcaacaaaccaagctgaaatcgaccaaatcatgatcgatttagacggaaccgaaaacaaatctaactttggtgcaaatgcaatcttggcggtatctttagcaaacgcaaaagcagctgcagcatctaaaggtttaccactttacgcttacattgcagaattaaatggcactgctggtgtttattctatgccattaccaatgatgaacatcattaacggtggcgaacatgcagataacaacgttgatatccaagaattcatgattcaaccagttggtgcgaaaacattacgtgaagcacttcgtatcggtgctgaagtattccacaacttggcgaaagtattaaaagctaaaggcatgagcactgcagttggtgacgaaggtggtttcgcaccaaacttagcctctaacgcagacgctttagcctgtatcaaagaagcagtagaaaaagcaggttacgtattaggtaaagacgttactttagcgatggactgcgcatcttctgagttctataacaaagaaaatggtatgtacgaaatgaaaggtgaaggtaaatcattcacttctcaagaattcactcactacttagaagaattatgcaaagagtacccaatcgtgtctatcgaagatggtcaagatgagtcagactgggaaggttttgcataccaaactaaagtgttaggcgaccgcgttcaattagtgggcgatgatttattcgtcactaacaccaaaatcttaaaagaaggtatcgaaaaaggtatcgcaaactctatcttaatcaaattcaatcaaatcggttctttaactgaaactttagcagcaattaaaatggcgaaagatgcaggttacaccgctgtaatctctcaccgttcaggcgaaactgaagatgcaactatcgctgatttagcggtgggtacagcagcaggtcaaatcaaaactggttctatgagccgttctgaccgtattgcgaaatacaaccaattaatccgtatcgaagaagcattagaacgcgctggtactccagcagcattcccaggcttaaaagcggttaaaggtcaagcgtaa

SEQ ID NO: 22174 - DNA, 1206 bp, Haemophilus influenzae
gtgagccaatattctgaaaatattattattggtgcgggtgcggcaggattattttgtgccgcacaattggctaagctaggcaagtcggtaacagttttcgacaacggcaaaaaaatcggacgtaagattttgatgtcgggcggtgggttttgtaatttcaccaatttagaggttacgccagctcattatctttcgcaaaatcctcatttcgtcaaatcggcactagctcgttataccaactgggattttatttctttagtggcggagcaagggattacttatcacgaaaaggaattggggcaattattttgcgatgagggtgcagaacaaatcgttgaaatgctgaaatctgaatgcgataaatatggtgctaagattttattgcgtagcgaagtttctcaagttgaacggattcaaaatgatgaaaaagtgcggtttgttttacaggtaaattcaacccaatggcaatgtaaaaatttgattgttgcgacaggtgggctttctatgcctgggcttggcgcaacgccatttggttatcaaattgcggaacaatttggcattcctgttattccgcctcgtgcgagtttagtgccttttacttatcgagaaacagataaatttttaaccgcactttcaggtattagcttgcctgtcactatcacggcactgtgcggaaaatctttttacaaccagcttttgtttactcatcgtggtatttcaggccctgcggtgttacaaatttctaattattggcagcccactgagtcagtggaaatcgatttattaccgaaccacaatgtggaagaggaaattaatcaagcaaaacaatcttctccaaaacaaatgttgaaaaccatcttggttcgattattgccgaaaaaattggtcgaactttggattgaacaaggcattgtgcaagatgaagttatcgctaacatcagcaaagtgcgggtaaaaaatctggtggattttattcatcactgggaatttactccaaatggcacagagggctatcgtacggctgaagtcacaatgggcggagtggatactaaagtaatttcttctaaaacaatggaaagcaaccaagtcagcggtttatattttattggtgaagtattggatgtgacgggctggctcggtggttataacttccaatgggcgtggagctcggcttatgcttgtgctctaagtatctcaagacaataa

SEQ ID NO: 22175 - DNA, 1119 bp, Haemophilus influenzae
atgcttgaattttcctcacaagattgcgtatttatgcaacgtgccttagatttggcagccaaaggtcaatataccactacaccgaacccatcggtgggatgcgtattggttaaaaatggtgaaattgtgggggagggctttcattttaaggcaggacaacctcatgctgaacgcgttgccttagctcaagctggtgaaaatgctaaaggagcaaccgcttacgtcaccttagagccttgcgctcattatggtcgcacaccaccttgtgcattaggattaattgaggcgggcgtagtgaaagtcattgcggctatgcaagatccaaatcctcaagtcgcaggaaaaggtttgaaaatgttgtctgatgccggtatcgaaagtacggtgaatttattgaacgatcaagcggaaaaaataaataaaggttttttaaaacgaatgcgtcaaggtatgccttttgttcaactaaaacttgccatgagtttagatggacgaactgcaatggcaagtggagaaagtaaatggattacgggcccagatgctcgttcggacgtacaaaaaatgcgagcaaaatcatccgcacttttatctacttccacaacagtcattgcagatgatccaagccttaatgtacgctgggacgaatttcctgaaaatcttaaaacagaatataaaaaagaatggcttcgccagcctgtgcgagtcattttagattcacaacatcgcattcagccgactcataaactttttttaacccattctcccgtttggttagtctctagtgagccacgagatttaacaggctttcctgatttttgtgaacaaattatttttccgaaagaaaatttactaaaagaattaatgcgagaactgggaaaacgacaaatcaataccctttgggtagaagctggagcaaatttatcgggcagtttaattgatgcgaaattagtggatgaattgattatttacattgcgccaaaattacttggagacaatgctcgtggtctatgccaattaccgaatttaactaaacttgctgatgcaccattatggcaactcaatgaattagaacaaatcggtgacgatataaaattaacttacacaccgaaaggagtctaa

SEQ ID NO: 22176 - DNA, 816 bp, Haemophilus influenzae
atgccagaacttcctgaagtcgaaactgcactacgtggtattagcccttatcttaagaattttacgattgagaaagttgtcgtgcgccagcctaaattgcgctgggctgtatcagaggaattgataacgctaaaaaatgtaaaaattgtcgatctcactcgtcgagcaaaatatttgattattcacacggaaaaaggctatatcatcgggcatttgggcatgtcaggttcggtgcgaattgtgccacaggatagtgcaatagataaacatgatcatattgatattgtagtgaataatggcaagttattacgctataacgatcctcgccgtttcggtgcatggttgtggacggagaatctagatgactttcatcttttcttaaagttaggccctgaaccactttctgatgaatttaatgcagaatatttattcaaaaaatctcgtcaaaaatcaaccgcacttaaaactttcttgatggataacgctgtggtagtgggcgttggaaatatttatacgaatgaaagtttgtttatttgtggcattcatccccttaaactcgctaaaaatttgactcgcaatcaatgtttctctttagtgaacacgattaaagatgttttgagaaaagccattattcaaggtggaacaacacttaaagattttttacagcccgatggtcgcccaggttattttgcacaagaattattggtatatggcaataaagataaaccttgtccaaagtgcggtggaaaaattgaaagtttaattattggacagcgtaatagtttcttttgcccgaaatgtcagaaaaggggttag

SEQ ID NO: 22177 - DNA, 171 bp, Haemophilus influenzae
atggcagctaaaggcgctcgtgagaaaatccgtttagtttctactgcagagacaggtcacttctacacaactgataaaaacaaacgtaatatgcctgaaaaaatggaaatcaaaaaatttgatccagtagtgcgtaaacacgttatctataaagaagcaaaaatcaaataa

SEQ ID NO: 22178 - DNA, 237 bp, Haemophilus influenzae
atgtctagagtttgtcaagtaacaggcaagcgtccagctgtgggtaataaccgctcacacgcaatgaatgcgacacgtcgtcgttttcttccaaaccttcacactcaccgtttttgggttgaaagtgaaaaccgtttcgtaaccttacgtttaactgcgaaaggtatgcgtattattgataaaaaaggcattgatgcagtattagctgaaatccgtgctcgtggcgaaaaaatctaa

SEQ ID NO: 22179 - DNA, 705 bp, Haemophilus influenzae
gtgcggtcaaaatctttcttatttttcttttataaatatatggaaaacaatgatgaattaatgccacgggaaaaattgctggcatttggagcaaaagcattaagtgattatgaactacttgcgatttttttacgtactggtatcaaaggttgtcctgttatgtcactttctaaaaatgtattaacgcattttggccccttgcacgctttactttctgcagataaaaaagctttctgttctgtaaaaggcttaggtattacgcaatttattcaactgcaagcgattacggaaatgaccaagcgttatttaaagcaagatatgttaagtacgccgattattaatgatcctgaaacagtaaaactttttttactcactgaattgcaacacgaggaaagagaagtatttatggttttatttttagataatcaacatcgtttgattaaaaaagagcggttatttttaggtacaatttatgtatcagcggtctatccgcgagaaattattaaagaagcactctattgtaatgcggcagctttaattttggcacataatcatccttcaggtataacggagccgagttattcggatcagcttattactaaaaaaattcaagatgcggctgaactaatggaaattcgcgtgcttgatcatttaattgtagggaaaagcgattgttattctttcgcggagaattgtttattataa

SEQ ID NO: 22180 - DNA, 1056 bp, Haemophilus influenzae
atgagctcgttgttaattgatttaaaaggaaaagagttggaacaagaggaagttgagttactttctcaccctcttgttgcaggattaattttatttactcgaaattttgaaaacagagaacaaattcaagaattaattcgttctgttcgccaacgagtgaaaaagcctttattaattacggtggatcaagaaggtggacgagttcaacgtttccgtgatggatttacaatgttgccttcaatgcaggcttttcaagaaacactgtcagcaactgaacaagtgagttttgctaaagaagcaggttggcaaatggcagcagaaatgattgccttggatattgacttgagttttgctcctgtgttggatttggggcatgaatgtcgagcgattggtgatcgcagtttttcatctgatgtaaaaagtgcggtaaatttagccaccgcttttattgatggtatgcatcaagcaggtatggcatctacaggtaaacattttcccggtcatggtcatgtattagccgattctcatttagaaacgccttatgatgatcgtacaaaagaagaaatttttagtggcgatctccaacctttccaacagttgatttcacagaataaactcgatgcgattatgcctgctcacgtgatttattcgcaatgtgatagtcagcctgcaagtggttcaaaatattggttgaaagaaattttacgcaagaaattaaatttccaaggtacaattttttccgatgatctaggaatgaaaggcgcgggagtaatggggaattttgtagagcgtagtaaaaaagcactcaatgcaggttgcgatcttttattactgtgtaatgaacgtgaaggtgtcattcaagtattagataatctaaaacttactgaaaatcaaccgcactttatggctcgtcaagctcgcttacaaagtttatttaaacgtagagtgattaattggaacgacttaatttcagatcaacgttggagacttaattatcaaaaattagctgatattcaaagccgttggttagacattcaggcagcaaaaaatgattga

SEQ ID NO: 22181 - DNA, 939 bp, Haemophilus influenzae
atggataaggacatgcaattaattcgcgggcttcacaatgcaaatcgtgttttacaaggttgtgcgctaacgatcggcaactttgatggcgtgcatttagggcatcaaaccgtccttcgccatttgcgtcaaaaagctgacgaattaaatttacccatggcggtattgttatttgaatcacagcctcgtgaatattttatggggaaaaatgcaccagcccgtttaatgcgtttgcgtgacaaaatttattatctcgaaaaggctaaggtcgatgtcgtaattgtggcgaaatttgaccgcacttttgccgagcaactagccgatgtttttattgaacaaacgcttgttaatcatctacatgtgaaatttttaagcattggcgatgatttcaaattcggctcaaaacgccaaggtaattttgccatgttgcaagcagctagtaagcgttttggttttattgttgaagataaccgtagtttttgtctagatgcacagcgaattagtagcacggcaattcgcgaagcgttagcgaatgatgacttacaacttgcagaaaatttactcggtaaaccttatcgtattttcgggcgtgtgattcatgggaataaattaggcagaacaataggatttccaacggcaaatattcgtttgcatagacaagtaaatccaatcaaaggcgtttatgccgtaaaagtgcggttaaaatcgggggagatttttaacggcgtggcaaacatgggaaaacgcccaactataaatggattaatgcaattattagaagtccatttatttgatttttctcagaatatttatggccaaatggtggaagtggaattctgccacaagattagaaacgagattaaattcccctcttttgatgatttgaaagtgcaaattgagaaagatgtagaaactgcgaaagcgttttttaacagttaa

SEQ ID NO: 22182 - DNA, 1533 bp, Haemophilus influenzae
atgactttattatcaagagtgttaggtcttgtgcgagatgtagttatcgctcatctcattggggcaggcgccgcagcggacgtctttttatttgctaatcgtatcccaaattttcttcgccgtttatttgctgaaggggctttttcacaggcttttgtccctgttctcgcagaatatcaacaatctggcgatatgaataaaacccgtgaatttattggaaaagtttctggtacccttgggggattggtgagtattgttacgattttggcgatggttggatcgccacacgttgccgctttatttgggatgggctggttcaccgattggatgaatgatggccctgatgcacataagtttgaacaagcctctcttcttcttaaaataacttttccttatttatggtttgttacttttgtggcattttctggcgctgtgcttaacacgattggaaaattcggtgtgatgtccttttcacccgtgttattaaatatagcgatgattgccaccgcacttttcctcgcaccacaaatggataacccagatcttgcgctcgctatcggaatttttcttggcggcttattacagttcttattccaaattccatttatgaaacaagcaggtttgctggtgaaaccaaaatgggcgtggagggatgaaggcgtaaccaaaattcgtaaattaatgatccctgcgttatttggtgtatcggtaagtcaaattaatcttttgctggatacagtgattgcgagcttcttaatgacgggctctattagctggttgtattattccgaccgcttactggaatttcctcttggtttatttggcattgcgatttctaccgtaattttaccaacgcttgctcgccaccacgttaatcgtgaaggcgattcagctaaaagtgcggttgattttcgtaatacaatggattggggcgtgcgaatgattttcttacttggcgttcctgcagccattggtattgctgtattggctcaaccgatgttacttacgctctttatgcgtggaaattttatgctaaatgatgtttatgccgcctcttattctttacgggcgtttaatgcgggtttgcttagctttatgttgattaaaatcctcgccaatggctattacgctcgccaagataccaaaacgccagtaaaaattggcattattgccatggtgagtaatatgggctttaatctattggcgattcctttcagctatgtaggattagctattgcttcagcgatgtccgcaacccttaatgcttatttactctatcgcggcttagccaaagcggatgtgtaccatttttcacgtaaaagtgcggtcttttttgtcaaagttttattggcggcaatcgcaatgggtgcggcagtttggtattacgtgcctgaaatcaaccaatgggcgaaaatggatttctttatgcgtgtttattggcttgtttggttgattgtattagccgcaatagtttatggtgcaacgttgattttattaggcgttcgcaagcaccatttgctgacaaaaaactaa

SEQ ID NO: 22183 - DNA, 270 bp, Haemophilus influenzae
ttgaccttggctaatatcaagtcagcaaaaaaacgcgcggttcaatctgaaaaacgtcgccaacacaacgcaagccaacgctctatgatgcgtacttatatcaaaaaagtatatgctcaagtagcagcaggcgaaaaatcagcagctgaagcagcattcgttgaaatgcaaaaagttgtagaccgtatggcttctaaaggcttaatccacgctaacaaagcagcaaaccacaaatctaaattagctgcacaaatcaaaaaattagcgtaa

SEQ ID NO: 22184 - DNA, 468 bp, Haemophilus influenzae
atggacattcgtaaaattaaaaaattaatcgaattagtagaagaatcgggcattactgaattagaagtgcaagaagaagagggtacagtacgtattagccgtgctgcaccagtaattgctccagcagccgttcaatatgctgcagcaccagtagtagcaccgactcctgccgctgcaccagctcaagttccagcagctgcgacaaccgcaccagccgcatcggatgagttatcaggccatcttgtacgttctccaatggtgggaacgttctatcgcagcccaagcccagaagcaaaagcattcgttgaagtggggcagtctgtgaaagttggcgatgcgctttgtatcgttgaagcaatgaaaatgatgaaccgcattgaagcggacaaagctggcgtagtaaaagcaattcttatcaacgacggtaacgccgttgaatttgacgaaccattaatcgttattgaataa

SEQ ID NO: 22185 - DNA, 1347 bp, Haemophilus influenzae
atgttagaaaaagttgtgattgctaaccgcggtgaaattgcactacgcattttacgtgcttgtaaagaattaggtattaaaactgtggcggttcactccactgctgatcgtgatttaaaacacgttttactcgctgatgaaaccatttgtatcggtccagcaccttccgcaaaaagttatttaaatattccagctatcattgctgccgccgaagtaacaggtgcggatgcaattcatcctggatacggtttcttatctgaaaacgctgactttgctgaacaagttgaacgttcaggtttcactttcatcggcccaacagcagatgttattcgtttaatgggcgataaagtttcagctattaaagcgatgaaaaaagcaggcgtgccttgtgtaccaggttcggatggccctgtaagtaatgatattgctaaaaataaagaaatcgccaaacgtattggttatccaatcatcatcaaagcatcaggcggcggcggtggccgaggaatgcgtgttgttcgtagcgaagacgcattagaagaatctattgcgatgaccaaagcagaagcgaaagccgcattcaacaatgatatggtttatatggaaaaatacttagaaaatccacgtcacgtggaaattcaagtattagcagatacccatggaaatgcggtttatttggctgaacgtgactgctcaatgcagcgtcgtcaccaaaaagttgtggaagaagcaccagctccaggtattacagaagaagttcgccgcgatattggctctcgctgtgcaaatgcttgtgtagaaatcggctatcgcggagcgggaacctttgaattcttatatgaaaatggcgaattctactttattgaaatgaatacccgtatccaagtagaacacccagtaacagaaatgattacaggtgtagatttagtgaaagagcaattgcgtattgcagcaggcttgccaatttcctttaaacaagaggacattaaagttaaaggccatgcaatggaatgccgtattaacgcagaagatcccaaaacattcttaccgtctccgggcaaagtaaatcacttacattcgcctggcggtttgggcgttcgttgggattctcatgtttatggtggctatactgtgcctccacattacgactccatgatcgcaaaacttatcacttacggcgatacacgtgaagtggcaatccgtcgtatgcaaaatgccttatctgaaacaattattgatggtatcaaaaccaatatcccacttcatgaattaattcttgaagatgaaaatttccaaaaaggcggaacaaacatccattatttggagaaaaaattaggtatgaatgaataa

SEQ ID NO: 22186 - DNA, 1455 bp, Haemophilus influenzae
atgaatttaggtattattcttcctttaattatttatctcacttttgtttttggtgcagcaatttttgcctatgtaaaacgtacaaaaggcgattttttaacagaatattatgtgggaaatcgatcgatgactggttttgtgctcgcaatgacaactgcatcaacttatgccagtgcaagttcttttgtcggagggcctggagctgcttataaatacggattaggttgggtattacttgcgatgattcaagtgccagtcgtatggcttgcattaggtgcattaggtaaaaaattcgcgctattatcaagagaaaccaatgctttaactattaatgatcttttcttttatcgctataaaaacaaatatttagtttggctatcaagccttgctcttcttctcgcattttttgcggctatgaccgtgcaatttattggtggtgcgcgtttattagaaacaaccatcggcatttcttatactcaagcattactcttatttgctttaacggtaggtatctatacttttatcgggggcttccgtgccgtcgtactgacggataccattcaaggtaccgtcatgatttttgggactataattctccttattggcacgatttatgccctcggtggtgtagaaagtgcggttaataaattaactgaaattgatcctgacttagtcacgccttacgggccaaatggaatgttagatttccaatttatggcttctttctggatacttgtctgtttcggggtggttggtcttccacataccgcagttcgatgtatggcatttaaagacagtaaagccttacatcgcggtatgctgattggaaccattgtactttcaattattatgttgggtatgcacttagctggtgcgcttggcagagcggttattccaaatttaacggtatcagatcaagtaattccaacattaatgataaaagtattgccgcctattgttgcggggattttcttagctgcaccgatgtctgcgattatgtccacaattgatgcacaacttattcaatcttcttctatttttgtcaaagatttatacctttctgcgaaaccagaagccgcaaaaaatgagaaaaaagtgagctatttttcatcaattattacgctgattttgaccgcacttttaatctttgccgcactcaatccaccagatatgattatttggttaaacctatttgcctttggcggactggaagccgcatttttatgggtaattgtactgggtatttattgggataaagcaaatgcttatggtgcgttaagctcaatgattatcggcttaggaagctatatcttgctcactcaacttggcataaaattatttaacttccatcaaatcgtaccgtcattagtatttggattaattgcatttttagtgggtaataaattgggcgaacgtcgtattgaaaaaactcaattaaaagttaccgcactttaa

SEQ ID NO: 22187 - DNA, 513 bp, Haemophilus influenzae
atggcatttattggcgtggcaattttaattaatggcggaaaaaataatgaaggcattgataacatcagtttattcggctgtttattagtactaagtgctgggatcattttcgctgccgtattacgttggacacagcgagttgttgccaaagtttcaacgcaagcctatacctccgtcagcattgtacttggcaccatcacaacattgccatttacgctattactcacagaaaactggcaaatatcattaaattctacgggtattgcaggtttattatatcttgccattggctgtagctggcttgcctattggttatggaataaaggccttaatagtgtagatgccaatatctccggtgttttagtcgcacttgaaccgctattcggcattttatttgctgtatcattacttggcgaaacgctatcattttcagccgcacttggtataacaattattatgttagccacacttggctcgactttactgccgaaacttttaaaaaaatcggtataa

SEQ ID NO: 22188 - DNA, 576 bp, Haemophilus influenzae
atgcccccaaaattttggattatcatcattgtgaaaaaaattgatcaacaaagtttagaaaatgcctaccgtttatttgaaagcggtgatattcatcaaattgaaattggttcaacaaaagggctgcaacaaattcatcattacctatttaatggtctttatgaatttgctggtaaaattcgtgaacaaaatatttcaaaaggtcattttcgttttgctaatgcactttatttaaaagaagcattaggaaaaatagagcaaatgccagaagatacttttgaaaatattattaataaatatgtagaaatgaatattgcgcacccttttttagaaggtaatggtcgttcaactcgcatttggttagatttagttttaaagaaacatttaggtaaagttgtcaattggcaaaatgtggataaaacgcaatacttacaagcaatggagcgtagcccaattaacgatttagaaattcgttttttattacaagcgaatttaacagatgatgtaaataaccgagaaattatttttaaaggtattgagcaatcttattattacgaaggttacgagaaagaataa

SEQ ID NO: 22189 - DNA, 993 bp, Haemophilus influenzae
atgcgaatcggttcataccaattaagaaatcgtgttttacttgcaccaatggcaggtattaccgaccagcctttccgccgtctttgtgcatattatggtgcggggcttacattttcagaaatgatgtccacaaatccgcaagtttggcataccgaaaaatccaaattgcgtttggcacatagcgaagatttaggtctcaatgcggtgcaaattgcaggtagtgatccactcgagatggcgcaagccgctgctattaacgtggaatatggcgctcaaatcattgacattaatatgggatgccctgccaaaaaagtaaatcgcaaactcgcaggttctgcgttgttgcaatttccagatttggtggaaaaaatcttgcgagaagtagtgtccgccgtcaatgtgccagtgaccttaaaaattcgtacaggctgggataaatctaatcgaaactgcgttcaaatcggcaaaattgcagaacaatgtggcatacaagcattaacggtgcatggtcgtacacgcgcttgtctttttgaaggcgaagcggagtacgataacattaaagccgttaaacaagcaattgctataccagttatagctaatggcgatattgattctgctcggaaagcaaaattcgttctcaattatactggagcggatgccattatgatcggtcgtgctgccttaggtaacccttggttatttcaagctgtggaaaacctaattgagcataactcgataagtcaaatgccaagtttaaaagaaaagtgtggtcagattttgcgtcatattcaagaattgcatcaattctatggcgaacaaaaaggctatcgcattgcgcgtaaacacgtagcttggtatttacagggaattcaacctgattccgtttttaaacagacttttaatgcaattagtgatcctaaagagcagctgattgtattggaagattttttcaatttaattttggataaaaaaaatgttagaacaacaacgtaa

SEQ ID NO: 22190 - DNA, 486 bp, Haemophilus influenzae
atgacaaagaaaaaagtaaaacccaattcaaatactatcgcactaaataaacgtgcaagacacgattattttattgaagatgaaattgaagcaggtcttgaattacaaggctgggaagtcaaatctatgcgcgcaggcaaggcaaatattagtgatagttatgttatttttaaaaatggcgaagcctttttattcggcgcaagcattcagccattaaatgttgcatcaacgcatattgtttgtgatccaactcgcactcgtaagttattgttaaataaacgcgaattagcatccctatttggtaaagcaaaccgagacggttttaccatagttgcactttctctttattggaaaagtgcgtgggcaaaagtcaaaatcggtttagccaaaggtaaaaaacaacaggataaacgtgatgatattaaagaacgtgaatggaaagtaacaaaagatcgcattatgaaaaatgcacatcgaagatcttaa

SEQ ID NO: 22191 - DNA, 966 bp, Haemophilus influenzae
atgattaaaaaaattgcagttttaacaagtggtggcgatgcgcctggtatgaatgccgcaattcgtggcgtagtacgttctgcacttgcagaaggcttagaagtatttggtatctatgacggttatcaaggtttatacaataataaaatcaaacaattaaatcgctatagcgtatctgatgtgattaatcgtggcggtacttttttaggttctgcacgttttcctgaatttaaagatcctaatattcgggcaaaatgtgcggaaattttacgttctcacggcattgatgcacttgtggttatcggtggtgacggttcttacatgggggcaaaattattaaccgaagaacacagtttcccttgtgttggcttacccggtactattgataatgatgttgcaggtactgactataccatcggttatcaaaccgcattacaaactgcagtggatgcaatcgaccgtttacgtgatacatcaagctcacaccaacgtatttctatcgttgaaattatgggtcgccattgtagtgacttaaccatttctgcgggcattgctggcggttgtgaatatatcgtcgcatcagaaattgaatttaatcgtgaagaattaattcaacaaattgaacgtagcattattcgcggtaaacgccacgctattattgctatcactgaacttttaaccgatgttcattctctggcaaaagaaattgaagctcgcgttggacacgaaactcgtgcaactgttttagggcatattcaacgtggtggttctccttgtgcttttgaccgtattcttgcctcacgtatgggcgcatacgcagtagatttattgctacaaggcaaaggcggctattgcgtaggtatccaaaatgaacaactcgttcatcacgatattattgatgccattaataatatgcagcgtgtatttaaggctgattggcttaaagtggcaaaacgtttggaataa

SEQ ID NO: 22192 - DNA, 1410 bp, Haemophilus influenzae
atggcaaaaacactttacgaaaaattatttgattcacacattgtgtatgaagcagagggcgaaacgccaattttgtatattaatcgtcatttgattcacgaagtaaccagcccgcaggcctttgatgggttacgcgtcgcaaatcgccaagtgcgccaagtgaataaaacttttggcacaatggatcacagcatttctactcaagtacgagatgtcaataaacttgaaggtcaagcgaaaattcaagtgttagaattggataaaaataccaaagcaacaggtattaaattatttgatataacaactaaagagcaaggtattgtacacgttatggggccagaacaaggtttaaccttacccggtatgacaattgtttgtggcgattcacacaccgcaacgcacggtgcatttggtgccttggcttttggtatcggtacttctgaagtagagcacgtattagccactcaaactttaaaacaggctcgcgcaaaaagtatgaaaattgaagtgcgtggtaaagtcgcatcaggtattacggcaaaagatattattcttgctattatcggcaaaactacgatggcaggcggtacaggacacgttgtagaattctgtggcgaagcgatccaagacctttctatggaggggcgtatgaccgtctgtaatatggcaattgaaatgggtgcaaaagcaggcttgattgcgccagatgaaaccacatttgcatatttgaaagatcgtccacacgcgccgaaaggcaaagattgggaggatgccgttgcttattggaaaaccttaaaatctgacgatgatgcacaatttgacactgtggtaacgctagaagcaaaagacatcgcaccacaagtcacttgggggacaaaccccgggcaggtaatttctgtgaatgaaaccataccaaatccgcaagaaatggcagaccctgtacaacgtgcttcggcggaaaaagccttacattatattggcttggaagctggcactaatttaaaagatattaaagttgatcaagtgttcatcggatcttgcaccaactcgcgcattgaagatttacgcgcagcggcggctgtgatgaaaggccgtaaaaaagctgataacgtaaaacgtattttagtagtaccaggttctggcttagtgaaagaacaagcggaaaaagagggcttggataaaatctttattgccgcaggtgcagaatggcgtaatccaggttgttcaatgtgtttaggaatgaacgacgaccgtttaggcgaatgggaacgctgtgcttccacttcaaaccgtaactttgaaggtcgccaaggccgtaatggacgcacccatttggtaagtcctgcaatggcggcagcggcaggagtgttcggtaaatttgttgatattcgtgacgtaacattaaactaa

SEQ ID NO: 22193 - DNA, 5085 bp, Haemophilus influenzae
atgctaaataaaaaattcaaactcaattttattgcgcttactgtcgcctacgcattaaccccttatacagaagctgcgttagtgagagacgatgtggattatcaaatatttcgtgattttgcagaaaataaagggagattttctgttggtgcaacaaatgtggaagtgagagataaaaataaccactctttaggcaatgttttacctaatggcattccgatgattgattttagtgttgtggatgtagataaacgcatcgccacattgataaatccacaatatgtagtaggtgtaaaacacgttagtaacggcgtgagtgaactacattttgggaacttaaatggcaatatgaataatggcaatgctaaatcgcaccgagatgtatcttcagaagaaaatagatatttttccgttgagaaaaatgagtatccaactaaattgaatggaaaagcagtaactactgaagatcaaactcaaaaacgccgtgaagactactatatgccacgtcttgataaatttgttaccgaagttgcaccaatagaggcttcaactgcaagtagtgatgctggcacatataatgatcagaataaatatcctgcttttgtaagactaggaagtggtagtcaatttatttataaaaaaggagataattacagcttaattttaaataatcatgaggttggaggcaataatcttaaattggtgggcgatgcctatacctatggtattgcaggcacaccttataaagtaaaccacgaaaataatggactaattggttttggcaattcaaaagaggaacacagcgatccaaaaggaatattatctcaagatccgcttaccaattatgctgttttaggcgacagtggctccccattatttgtatatgatagagaaaaaggaaaatggctttttcttgggtcttatgatttttgggcaggttataacaaaaaatcttggcaagaatggaatatttataaacctgaatttgcaaaaactgttctagataaagatactgcaggttctttaactggttctaacacccaatacaattggaatcctactggcaaaacaagcgttatttctaatggttctgaatctctaaatgttgatttattcgatagtagtcaggatactgactctaagaagaacaatcacggaaaaagtgtgactcttagaggaagtggaacgcttaccttaaataataatatcgatcaaggcgcaggcggcttgttctttgaaggagattatgaagttaaaggcacttctgatagtaccacttggaaaggagctggcgtttctgttgctgatggaaaaacagtaacgtggaaagtacataacccgaaatctgatcgtttagctaaaatcggcaaaggaacattaattgtagaaggaaagggagaaaataaaggttcgctaaaagtgggcgatggtactgttatcttaaaacaacaagctgatgccaataataaagttaaagccttttcacaagtaggtatagtaagtggtcgctcaactgttgtacttaatgatgataagcaagtagatccaaattccatttactttggctttagaggtggtcgattagatgccaatggcaataatctcacttttgaacatatccgtaatattgatgatggcgcaagactagtaaatcacaataccagcaaaacctctactgtaacaattactggggaaagtctaattacagatccaaatacaattactccatataatatagacgcaccagatgaagataatccttatgcctttcgacggattaaagatggaggacagctctatttaaatttggaaaattacacttattatgcgttaagaaaaggtgcgagcactcgttcagaattacctaaaaatagtggcgaaagcaatgaaaattggctatatatgggtaaaacttccgatgaagccaaaagaaatgtaatgaaccatatcaacaacgagcgtatgaatggctttaacggttattttggcgaggaagagggtaaaaataacggtaatctaaatgtgacttttaaaggcaaaagtgagcaaaatcgctttttattaacaggcggaacaaaccttaatggcgatttaaaggttgaaaaaggcacattattcctttctggcagaccaacaccgcacgcaagagatattgcaggtatttcttcgacaaaaaaagatcaacactttgctgaaaataatgaagtggtagtagaagatgactggattaaccgcaattttaaagcaacaaatattaatgtaaccaataacgcaaccctttattcaggtcgcaatgttgcaaacattacttcaaatatcacagcttctgataatgcaaaagtacatattggctataaagcaggcgataccgtttgtgtacgttctgactatacgggctatgtgacttgcactactgacaagttatccgataaagcccttaatagctttaacgccaccaatgtatctggcaatgtaaatttatcaggtaatgcaaactttgtcttaggcaaagctaacttattcggcacaattagcggcacgggaaatagccaagtacgtttaaccgaaaatagccattggcatttaacaggcgatagcaatgttaatcagttaaatttagacaaggggcatattcatttaaatgcacaaaacgatgcaaataaagtaactacatataacacgctgactgtgaatagcttatcaggtaacggttctttctattatttaactgatctttccaataaacaaggcgacaaagttgttgtaactaaatccgccacaggtaactttacattacaagtggcagataaaacaggcgagcctacaaaaaatgaactcacgctttttgatgcgtcaaatgctacaagaaataatttgaatgtgtcattagttgggaataccgttgatttaggtgcttggaaatataaattacgtaatgttaatggacgttacgatttgtataacccagaggtggaaaaaagaaatcaaactgtcgatacgacaaatatcacaacacctaataatattcaagctgatgtgcctagcgtaccaagtaacaatgaagaaatagcccgtgttgaaacaccagttccaccacctgcgcctgctacaccatcagagacaactgaaacagtggctgaaaatagtaagcaagaaagtaaaacagtagagaaaaacgagcaagacgcaaccgagacaacagctcaaaatggagaagttgcagaagaagctaaaccaagtgtaaaagctaatactcaaacaaatgaagtggctcaaagtggaagtgaaaccgaggaaactcaaacgactgaaataaaagaaacagctaaagtagaaaaagaggaaaaggctaaagtagaaaaagatgaaattcaagaagcacctcaaatggcttctgaaacgtctccgaaacaagcaaagcctgctcctaaagaagtttcaactgatacgaaagtagaagaaactcaagttcaagctcaaccgcaaacacaatcgacaactgttgctgcggcagaggcaacttcgccaaacagtaaaccagcggaagaaactcaaccaagtgaaaaaactaacgctgaacctgtaacgcctgtagtatcaaaaaatcaaacagaaaatacgaccgaccaaccaacagaaagagagaaaacggctaaagtagaaacagagaaaactcaagaaccccctcaagtggcttctcaagcgtctccgaaacaggaacagtctgaaactgttcaaccgcaagcagtgcttgaaagtgaaaatgttccgactgttaataatgcagaagaagttcaagctcaactgcaaacacaaacaagtgcaacagtaagcactaaacaacctgcaccagagaattcaataaatactggatctgcaaccgcaataacagaaactgctgaaaaatccgataaaccacaaacggaaactgcggcttcgactgaagatgctagtcagcataaagcgaatactgttgcggataattctgtagcaaataattcagaaagcagtgatccaaagagtagacgtagaagaagtattagccagcctcaagagacttctgctgaagaaacaacagcagcttctactgacgaaacaacaatagctgataattcaaaacgcagtaagccaaatcgtagaagtagaagaagtgttcgctcggaaccaactgttacaaatggcagcgatcgttctacagtagcattgcgcgatctcacaagtacaaacacaaatgcggtaatttctgatgcaatggcaaaagcacaatttgttgcattaaatgtggggaaagcagtttctcaacatattagccagttagaaatgaataacgaggggcaatataacgtttgggtatctaatacttcaatgaacgaaaattattcctcaagtcaatatcgtcgttttagttctaaaagtacgcaaactcaacttggttgggatcaaacaatctcaaacaatgttcagttaggtggcgtgtttacttatgttcgcaatagtaacaactttgataaggcaagcagtaaaaatactctagcacaagttaatttctattctaaatattatgcggataatcattggtatttgggcattgatttaggctacggcaagttccaaagcaacctaaaaaccaatcataatgcgaaatttgctcgccatactgcacaatttggtttaaccgcaggcaaagcatttaatcttggcaattttggtattacgccaatagtaggcgtgcgttatagctatttatcaaacgctaattttgcattagctaaagatcgcattaaagtaaatccaatatctgtcaaaacagcctttgctcaagttgatttaagttatacttatcacttaggcgagttttccgttacgccaattttgtctgctcgatatgatacaaatcaaggcagcggaaaaattaatgtaaatcaatatgattttgcttacaacgtggaaaaccaacagcaatataacgcagggcttaaattgaaatatcataatgtgaaattaagtctaataggcggattaacaaaagcgaaacaagcggaaaaacaaaaaactgcagaattaaaactaagttttagtttttaa

SEQ ID NO: 22194 - DNA, 1101 bp, Haemophilus influenzae
atgcaatttagtatttcaagagaaaatttattaaaaccgttgcaacaagtatgtggcgtattgagtaatcgcccaaatattcctgtattaaacaacgtattattgcaaattgaagactatcgtctgactatcacagggacagatttagaagttgaactctctagtcaaactcaactttcatcatcttctgaaaatggcacttttaccattccagcaaaaaaattcttagatatttgccgcactttatctgatgattcagaaatcacggtgacttttgaacaagatcgtgcattagtgcaatctgggcgtagccgttttacactagcaacccaacctgccgaagaatatcccaacctcacagattggcagtctgaagtggattttgaactaccgcaaaataccttacgccgtttaattgaagccactcaattttctatggcaaaccaagatgcccgctatttcttaaatggtatgaagtttgaaacagaaggcaatttattgcgaactgtggcaacagatggtcatagacttgcggtctgtactatctcacttgaacaagaattacaaaatcattctgtgattttacctcgtaaaggcgtgttagaacttgttcgtttattagaaacaaacgatgaaccagcacgcttacaaattggcaccaacaatttacgtgtccatttaaaaaacacagtatttacatcaaaattaattgatggtcgctttcctgactatcgccgagtattgcctcgtaatgccacaaaaattgtcgaaggcaattgggaaatgctgaaacaggcttttgctcgtgcgtctattttatctaatgaacgcgcacgcagcgtacgtttaagtttaaaggaaaaccagcttaaaattactgcctcaaatacagaacacgaagaagcagaagaaattgtcgatgtcaattacaatggcgaagaattagaagtgggctttaatgtgacctatattcttgatgtgctgaatgcacttaaatgtaatcaagtgcgaatgtgcttaactgatgcgttctccagttgcttaattgaaaactgtgaagacagcagctgcgaatacgtcattatgccaatgcgtttataa

SEQ ID NO: 22195 - DNA, 1365 bp, Haemophilus influenzae
gtgaatctctcaaatctttggcaaagttgcctgttacaacttcaagatcaagtttcagccagcgatcttagcacttggcttcgtcctttacaggctgacgtggtggcggataaccacattgttttatatgcttctaatatgtttgtgaaaggttgggtggaaactcattatctcgcacaaatccagcaaatttgtcaaacacttgcacaaaatcctgaactgcgtatttctttaaaagaaggggttaaacctgcacccaagatagtggaaagcacaccaaatacatcacttagatcagaaagtgcggtagattttcaagctgaatctagtgcttcagtaaaatttgaatctcatctcaatactaaacacttatttgataactttgttgaaggtaaatcgaaccaactcgcacgtgcagtcggtcaaaaacttgctcaagcaccaggcgaaccatcagccaatcctttctttttatatggcggcactggtttagggaaaactcacttgttacacgccattggcaacggcattttagccgataaaccgaatgcacgagtgctttatattcacgcaaataactttatgcaacatatggtaaaagcagtgcgtgataataaaatggatcagttcaaaaaattctatcgttctcttgatgcgcttttagtggatgatattcaatttttcgctgaaaaagaaaaaactcaagaagaattcttccatattttcaatagcttgtttgaaacaggtcgccagattatcttaacttcggatcgttatcctaaagaaattgaaaaaattgaagaacgtttaaaatcacgttttggctggggcttaacaacagccattgaaccgcccgatcttgaaacccgtgtagcgattttattgaaaaaagcggaagaacataatatgaacttgccagaagaagtcgctttcttcattgctcaacgcttgcgtaccaacgtgcgtgaacttgagggtgcattaaatcgtgtaaaagcaatgcaagacttcaaaggcggtgacattgatattgatttcgtgcgtgataccttaaaagatattttggctctgcaagaacgcttagttaccattgaaaatattcaaaaagtggtggctgaatattatcgaattaaggtttcagatttaaaatcaaaaagtcgtgcacgttcagtgactcgtcctcgccaaattgcaatggcgttagcaaaagaattaacaaatcgcagtttgccagaaatcggtcgtgcctttgaccgtgatcacacgaccgtattaaacgcttgccgagaagtaccaaaattccgtgagcaagacaatagcattcaagaagattgggcgaatttgatccgcactttgtccgcataa

SEQ ID NO: 22196 - DNA, 135 bp, Haemophilus influenzae
atgaaacgtacatttcaaccttctgtattaaaacgtagtcgtactcacggtttccgtgctcgtatggcaactaaaaatggccgtcaagttttagcgcgtcgccgtgctaaaggtcgtaaaagtttatctgcataa

SEQ ID NO: 22197 - DNA, 360 bp, Haemophilus influenzae
gtggttaagctgaacttttcaagggagttacgtttattaactcccattcaattcaaaaatgttttcgaacagccattcagagctagtactcccgaaattacaatccttgctagaaaaaataatcttgaacatccgcgtttaggtttgaccgttgctaaaaaacatttaaaacgcgcccacgagcgtaatcgaattaaacgcttagtacgagaaagttttcgtttatcacagcatcgtttgcctgcttatgattttgtttttgtagctaaaaatggtattggaaaactcgacaataatacatttgcacaaatactcgaaaaattatggcagagacacattcgcttggcacaaaaatcttaa

SEQ ID NO: 22198 - DNA, 1626 bp, Haemophilus influenzae
atggactcaagacgtagcctattagtgcttgcactgatttttatttctttccttgtttatcagcaatggcagttggataaaaatccacctgtgcaaactgaacaaacaacttcaataactgccacttctgacgttccggcaagttccccttctaattcacaagccatagctgattctcaaactcgtggtcgtattattactcttgaaaacgatgtgttccgtttgaaaattgatacattgggtggcgatgtaattagctctgaattattaaaatatgatgcagaattggattcaaaaacaccgtttgaattattaaaagatactaaagagcatatttatattgcgcaaagtggtttaattggtaaaaacggtattgatactcgttctggtcgtgcgcaatatcaaattgaaggcgataattttaaattagcagagggtcaagaatctctttctgtaccgcttctttttgaaaaagatggcgtaacttatcaaaaaatctttgtgttaaaacgtggtagctatgatttaggcgtagattacaagattgataaccaaagtggtcaagccattgaagttgagccttatggtcaattgaagcattctattgttgaaagctctggtaatgttgcaatgcctacttatactggcggtgcatattcttcttcagaaactaactataaaaaatatagttttagtgatatgcaagataataatctttctattgatactaaagctggttgggttgcggtgttacaacattatttcgtttctgcgtggatcccaaatcaagatgtaaataatcaactttatacaattacagatagtaaaaataatgttgcatcaattggttatcgtggttctgttgtcactattcctgctggtagccaagagacgattacaagttcattgtggactggccctaaacttcaaaatcaaatggcaactgtcgcaaataatttagatttaactgttgattatggttgggcttggtttattgctaaaccgttattctggttattaacctttattcaagggattgtgtctaactggggtttagcgattatctgtgtaacaattgtagtgaaagcaattttgtatcctcttacgaaagcacaatatacttcaatggctaaaatgcgtattttgcaaccgaaaatgcaagaaatgcgtgaacgttttggagatgatcgccaacgtatgagccaagaaatgatgaagctttataaagaggaaaaagtaaatccacttggtggttgtttgccaattcttcttcaaatgccaattttcatcgcattatactggacgttcttagaagccgttgaattacgtcatgcaccattctttggttggatccaagacttatcggcacaagatccttattacattctccctattttaatgggtatctcaatgttcttgttgcaaaaaatgtctccaacaccagtaactgacccaacacaacaaaaagtaatgaattttatgccattagtttttatgttctttttcttgtggttcccatcaggcttggtattatactggttagtatctaacttgatcactatcgcccaacagcaattaatttatcgtggattagagaaaaaagggttgcattctcgtaagaaatag

SEQ ID NO: 22199 - DNA, 1386 bp, Haemophilus influenzae
gtgcggctagattttaaagagttttttatgaaagaaacaatcgttgctcaagctactgcaccaggtcgtggtggtattggaattttaagagtctctgggcctttagcaacaaaagttgctcaagctatattaggtaaatgcccgaagccaagaatggcagattatcttccttttaaagatgctgatggcactattttagatcaagggattgcgctttatttcaaatcgccaaattcatttactggtgaagatgtgttggaattgcaaggtcacggtgggcaggttgtattagatttattactcaaacgtattttacaaattgatggaatccgtttggcgagaccaggcgagttttctgaacaagcttttttgaatgataaattggatcttgctcaagcggaggccattgcggatttaattgatgcaacatcagaacaagcggtacgctcagcattaaaatctttgcaaggtgaattttctaaaaaagtaaatgaattagttgattctgtgatttacttacgtacttatgtagaagcaagcattgactttcctgatgaagaaatagatttcttggcagatggaaaaattgaagcaaacttacgtggtattattaatcagttggaagatgttcgctctgaagctaaacaaggttctattttacgtgagggaatgaaagtcgtgattgctggtcgtccgaatgcgggtaaatcgagcttgcttaatgcgcttgctggtcgcgaagcggctatcgtcacggatattgcaggtacaacccgtgatgtattgcgtgagcatattcatattgacggtatgccattgcatattattgataccgcaggtcttcgagatgcaatcgatgaagtagagcgtattgggatttctcgtgcttggacagagattgaacaagccgatcgtattattttgatgttagatagtagcgatcctgaaagtgcagatttaagcaaagtgcggtcagaatttttagcaaaattaccctcaaccttgccagttactattgttagaaacaaaattgatttaaatggcgaacaagcaagtgaaagcgaacagggcggttatcaaatgattagtctttccgctcaaacgcatgatggtgtacaacttttacgtgagcatttgaaacaagcaatgggtttccaaacaggcatggaaggaggctttttagctcgtcgtcgtcatttagatgcgctggataaagccgcagagcatttacaaatcggtttggttcaacttacagaatttcacgcaggagaacttttagcggaagaattacgcttagttcaaagctatttaagtgaaattacgggtcaattcacatctgatgatttacttggtaatatttttagttctttctgcattggaaaatag

SEQ ID NO: 22200 - DNA, 1560 bp, Haemophilus influenzae
atgatgttcgggaaaaaaataattcattctaaaacaatatggttttattttttattgtttctcttttccatatttaccaatatgggattaggcaatgtattaagtgagaatattcctgtttcagattacgcaattttatttgttatcacggcgatttctttttattttaccccttggcttgggcgaatattaatcactgtattattccttagtgcgttattttattgctctgctggttttttctatggtattccatctttgggtattattgcttctgtttatgaaacgaatattaatgaaaccttggaatactacacgactattcctttttggatatttttatttcaagctagttatttcatcctgtttgttgctttaatgaaattaagttttcatgttaaacaacaagcatttaaatggctaaatacggctgttatcagcctattattagttttttcttacaatcaattttctgattggaactatgggtataaattccgtttttatcccgttcttttttattctgaatttgatcgaatgaatgatctgtatttagaacaacgtgattttctaaatcaatccgctaatgcgccttctcaatgggatattcaatcttttatgccaaaatataaaaattatattttgattatcggtgaaagcatgcgaaaagattatatgtcgttatatggttttccattgaaaactacaccatttttagagcgtgtgaaaggcacagtttttgaaaattattattctgcggcaccgaatacgcaaccatctttacaactcaccctatatcgagcagaaaaaggggaaacggtttatacggataatattatttctttagccaaaaaagcgggtgtgaaaacctattggatttctaatcaaggcaaaattggggaatttgatacgatagcatctcgtattggtcaaagtgcagatgaaacgatttttatgaagccgttaggttataactctaaaaaagtttatgacgatgaaatgttgcctgtattagataaagccttaaaagaaaatattagcaattcaaaattaattgtgattcatttaataggctcacatcctgctttttgtgagcgtcttccatacgaggttaaaaattattttattaatcaatcgatgtcttgttatttagaatcgattaaatatacggatcagtttttagaaaaattaaattcacaattggtggcacaaaatgaaccctattcggtgatttacttttctgatcatgggcttgctcattatgaggattctaacggcctatcattgcatccaaataatctttataaacaagattatgaaattcctttcataatgttttcgagtgatagtcaaaaggtagaaaaaataaaaacgccacaatcggcatttaattttgtttatggttttgctgattggatgggaattaaggaaaaacatttacaaggcgtggatttcttccatcctgaaaaacaggaaattaaggtatttgattggaataacgttgtaaatgttaaagagttggctgatgatccagcaaaattaccagaaaccgttcagtaa

SEQ ID NO: 22201 - DNA, 633 bp, Haemophilus influenzae
atgacggatttagcacaaaaagaattaatggtgcagctcggacgttctttttatgagcgaggttacaccgtgggcggtgcaggtaatttatcagttcgcttagatgacaatcgtgtgttagtgacccctacaggttcttcactcggtcggttaagtgtagaacgtttatctgtattggatatggaaggtaatcttttagggggcgataaaccatcgaaagaagcagtatttcatttggctatgtacaagaaaaatcctgagtgcaaagccattgtgcatttacatagtacctatttgaccgcactttcttgcttagataatttggatcctaataatgctatagagccatttacaccgtattacgtaatgcgcgtgggaaaaatgcaagttattccctactatagaccgggttcaccaaagattgcagaagaattaagtaacagagctttaacaggcaaagccttcttactcgctaatcatggtgttgttgtcactggctcagacttgcttgatgcggcagataatacagaagagttagaagaaaccgcaaaattattcttcactttgcaaggacaaaaaatccgctatctcactgataccgaagtgaaagatttagaaaatagaggaaaataa

SEQ ID NO: 22202 - DNA, 999 bp, Haemophilus influenzae
atgaaacttcttaaattaaccttaatttctaccgcacttttttccaccgcagcattagctcaagcacagcaaagtgtaaacgtatatagctacgactctttcacttctgaatggggggctgggccaaaagtaaaacaagattttgaaaaagcccatccacaatgtgcgattaattttacgccttttgaaagcgttggtgtgttgctcaaccgtgttcgtttggaaggaaagaaaacaaaagcggatattgtgctaggtttagataacttttttttggaacaagctgaaaaaacaggtatttttgcgccaaataacgtggatttaactcagctggatttaccaacaaaatgggcgaataaaaccttcttaccttttgatttcggtaattatgcttttgtgtacgataaaactaaattacaaaacccgccgaaaagtttgaaagaattagttgaacgtcaagatcttagtgtgatttatcaagatcctcgcaccagcagtgtgggtcgtggtttattggtttggatgaatgctgtttaccctgctgataaaattcaatccgcttggaaagagttagataagcatacagtgacagtgggtaaaggctggtcagatacttacggtgcatttttgaaaggcgaagcggatttagtattaagttacagcacatcgccactttatcatcaactttttgagaaaaaagataattatgcggcgacagattttgcggaaggtcatattactcaagtagaattagcggcgcgagttgcaaaccatccaaatcaatgtgcggatgattttatggcatttttaatttcgcctacagcacaaaaacatattgtgaccgcgaacattatgttgccagttattcaaggcgaaattgaaccgcactttgatgcacttaaagttcaacaaaaaactcaaacgtcaattaatccaatggtgaatactgagcagttaaaaaattggatcagcacttggcaaactacattaacaaaataa

SEQ ID NO: 22203 - DNA, 1002 bp, Haemophilus influenzae
atgttagcggaaaaattacaaattaactctattacacctcatccaagtgtagaatattggtctgtttgcaaagttgaggcgttatttgaaacgccatttttggaattagtttaccgagcaacgcaagttcatcgtaagcattttaatcctcgcgcgattcagttatccacgttaatgtctatcaaaacggggggatgcccagaagattgtagttattgccctcaatcagcccgttatcatactggcgtacaaaatcagcagttattagatgttgatgagatcgtcgctaaagcaaaaattgcgaaagcacgtggtgcagggcgtttctgtatgggggctgcttggcgaggccctaagccaaaagatattgagaaagtcacagaaattattaaagccgtgaaatcacttggtttagaaacttgcggtacctttggtttattgcaagacggtatggcggaagatttaaaagaagctggattagattattacaatcataatcttgataccgcaccagaacattatgcagaagtgattggtactcgccgttttgatgatcgccttagcaccttaggaaaagtgcgcaaagctggattaaaagtgtgttgtggtggcattgtagggatgaatgaaactcgcaaagaacgggctggattaatcgcgagccttgcaaatcttgatccgcaacctgagtcagtgccgattaatcaactcgttaaggttgaaggtacgccgttagccgatgcggaagaattagattggacggagtttgtgcgaacgattgctgttgcacgtattactatgccaaaaagttatgttcgcctttctgcaggtcgcagtggtatgactgaagaaatgcaagcgatgtgttttatggcgggtgcaaattctattttctatggcgataaattacttgttacagataatccagaagaagatggcgatcagttattgatggcaaaattagatttagagccagaaactgcagaaaataaaaagttgtag

SEQ ID NO: 22204 - DNA, 1998 bp, Haemophilus influenzae
atggcaactcgtagacaattagccaatgcaattcgtgtcttagcaatggattctgtacaaaaagcgaaatctggtcaccctggtgcaccaatggggatggcggatattgctgaagtattatggcgcgactttttaaaacacaatccaaccaatcctaaatgggctgatcgagatcgttttgtactttctaacggccatggttctatgttgatttatagtcttttacatttaactggctatgatctttctatcgaagatttaaaacaattccgtcaattacattctaaaaccccaggtcacccagaatatggttatgcccctggtgttgaaaccacgactggcccgttaggtcaaggtatcactaatgcggtgggtatggcaattgctgagaaaaccttagctggacaatttaaccgtgaaggccatgaaattgtcgatcaccacacttatgtgttcttaggcgatggttgtttaatggaagggatttctcacgaggcttgctctttagcaggaaccttaggtctgggtaaattaatcgcattctacgatgacaacaatatttccattgatggtcatgttgatggctggttcagtgatgacactgccgagcgttttgaagcttatggctggcaagtaatccgtaatgtagatggtcacgatgcagagcaaattcgtgctgctaccattcttgctcaagcagaaaaaggaaaaccaacgttaattatttgtaaaaccatcatcggctttggttcaccaaataaatcaggttctcatgattcccatggcgcaccattaggcgatgaagaaatcgatttaacccgtaaagcacttggttgggaatatgcgccatttgaaattccagctgaatactatgctgaatggtcggcaaaagagaaaggtgctgcagcagaaaaatcttgggaagaaaaatttgccgcttatgcaaaagcctatcctgaattagcagcagaatttaaacgtcgtgtttctggcgaattaccaacaaactgggcggcagaatctaaagcgttcatcgaaaaattacaagcaaatccagcgagtattgcaagccgtaaagcatcacaaaatgctatcgaagcttatgcgcacgtattacctgaattcttaggtggctctgcagacttagcaagctctaacttaacgttatggagtggttctaaaccaattcgtgcccacgaaaacgtaggtggtaactacattaactacggcgttcgtgaatttggtatgtctgccattatgaacggtattgctttacacggcggtttcattccttacggcgcaaccttcttaatgttctacgaatatgctcacaatgcggtgcgtatggcagcattaatgaaacaacgcacattattcgtttatacccacgattccattggtttaggcgaagatgggcctacacaccaaccagtagaacaaacggcttcactacgcttaattccaaaccttgaaacatggcgtccatgtgaccaagttgaatcagccatcgcatggcaacaagcggttgaacgtcaagatggcccaagtgcgttgatctttacccgtcaaaacttagcccaaatggaccgcacttctgcacaattagatgcggttaaacgtggtgcttatgtgttaaaagactgtgatggcacacctgagttaatcttcattgcgacaggttctgaagtggaattagcagtgcaagcagccgaagcattaagtgctgaaggtaaaaaagtacgcgttgtttctatgccaagtactaaccgtttcgataaacaagatgcagcgtaccgtgaaagtgtattacctgcagcggtaaccaaacgtgttgcgattgaagcgggtattgctgacttctggtataaatacgttggattcaatggtcgtgttatcggtatgaatagctttggcgaatccgcaccagcagatcaattattcaaactctttggtttcactgttgaaaacgtggtagcaaaagcgaaagaaattctttaa

SEQ ID NO: 22205 - DNA, 987 bp, Haemophilus influenzae
atgaaacttttcaacttcaaaaagcttagcatgctaatcgctggttttacgttagttacttctccagcattagctgaaatatcactacgttttggctatgaagcgccacgctcagatagccaacatagtgcggctaaaaaatttaatgatcttttgatgaaaaaaacgaaaggtgaaatcaaactaaaattatttcccgatagtactttaggtaatgcacaaacaatgattagtagtgtaagaggaggaacaattgatcttgaaatgtctggatcaccaaattttacaggattagaacctaaattaaatgtcattgatattccttttatttttaaagatcgtgaacacgtttataaagtattagatggcgaggtgggacagaatttattaaaagacttagagaaacaaggattaaaaggcttagcattttgggatgtaggtttccgcgcattttcaaattctaaacaaacagtaacaaaacctgaacatattaaagggttaaaagtacggacaaatcaaaatccgatgtacattgaggcattcaaattactaggaagtaaccctgttccaatgccattagcagaactttacacggcattagaaactcgagctgtggatgcgcaagagcatccgattggaattttttggtcttcaaaactctatgaagtacaaaaatatttaagtttgactaatcatggctatacacctctcattgttgtgatgaataaagcaaaatttgattcacttttaccagctttacaaacagctattatagaagcagctaaagaagctggacaattccaacgagatcttaatgtaaaaaacgaacaaaatattattagtaaattacgtaaacaaggagttgaagtcattgaaaaaatcaatacagagccctttaaaaccttgattgaagaaaaagttcgcaaaagctttattgaaaaacatggcgatgatttattgaagaaagtagatgcattatcggaatag

SEQ ID NO: 22206 - DNA, 2421 bp, Haemophilus influenzae
atgagtaactttaatcaaataagtcgccgagattttgtcaaggcgtcatctgcgggagctgcactggcagtttcaaatcttactttacctttcaatgtaatggctaaagagacacaacgcctcaatgaaaataatcaagaacgtattgtttggagtgcttgtacagtaaactgtggtagccgttgtccattacgaatgcacgtaaaagataaccgaatcacttatgtggaaaccgataatacggggacagaaacatataatcttgatcatcaggttcgtgcttgtctacgtggacgttctatgcgtcgtcgagtatataacccagaccgtttaaaatatccaatgaaacgtataggtaaacgcggagaaggcaaattcaaacgaatcagttgggatgaggctttaactgaaattgcagacgcattgaaacgcaatataaaaaaatatggcaatgaatcaatttatttaaactatggtacgggaacactcggtggcacaatggctaaatcttggccacctgcatccactatgatcgctcgttttatgaattgtattggtggatatttaaaccattatggtgattacagcaccgcacaaattgctgtcggtttagattatacctatggtggtggttgggcattgggaaatggaatggctgacattgaaaacaccaaattaatagtgttattcggtaataatcctgcagaaactcgtatgagtggaggtggtttaacttattgtattgaacaagccaaagctcgttccaatgccaaaatgattattatcgatcctcgttataatgatactggtgcagggcgtgaagatgagtggatcccaattcgtccaggtactgatgcagcccttgttgctgcccttgcttatgtaatgattcaagaaaatctcgtggatcaacctttcttagataaatattgtgttggttatgatgaaaaaacattacctacggatgcccctaaaaatggtcattataaagcctatattttaggttatggtaatgatggtatcgctaaaaccccagaatgggcggctaaaatcacgggtattccggcggagagaattattaaactcgcacgtgaaattggtagtacaaaacctgcctttatttcccaaggttgggggcctcaacgtcgtagtaatggagaattaatctctcgtgccattgcgatgttgccaatcttaacaggtaatgttggaattcacggcggtaacactggtgcacgtgaaagtgcgtatagcattccatttgtacggatgccaacgctaaaaaatcctgtgaaagcaagcattccaatgtttttatggacagatgcaattattcgtggcacagaaatgaccgcacttacagatggtattcgtggtgttgataaattatcgtccccaattaaagtaatttggaattacgcaagtaactgtttgattaatcaacacgcacaaatcaatcgtactcacgatattttacaagatgatacgcaatgtgaaatgatcattactattgataatcatatgacatctactgccaaatacagtgatattttattaccagattgtacaacttcagaacaaatggatttcgctttagatgcctttgtatccaatatggcatatgtcatttttgcagatcaagtgattaaaccatcttttgaatgtagacctatttacgatatgttgagtgatttggctgagaaaatgggcgtaaaggaaaaatttactgaaggacgaacacaagaagaatggttacgccatatttatgagcaatctcgagaaaaattacctgaattacctacttttgaagaatttagacaacaaggtatttttaaaaaagttgatcctaatggctttaaagttgcatacaaagatttccgtgataatccagaagcccatccacttaaaacgccatctggcaaaattgaaatttattcttctcgtctagctgaaatagcaaaaacttggaaattagcagaagatgacgtaattcatcccttacctattcacgcccaaagttttgagcattacggtgatccattaatggaaaaatatccgttacaactaagtggttttcactataaagcgagaacccattcaacttatggcaatgtggatgtattaaaagcagctaatccacaagaagtttggatgaatcctattgatgcagaacctcgtaatattaaaaatggcgatatgattcgtatctttaatgatcgaggcgaagtacatattaatgtaaaaattacaccccgtattattccaggggttgtggcattaagcgagggggcttggtatgcaccagataaagatcgtatcgatcattcaggttgcattaatgtacttacgacacaacgcccatcaccgcttgcgaaaggtaatccgcaacattctaatttagttcaagtggaacgtttgtag

SEQ ID NO: 22207 - DNA, 897 bp, Haemophilus influenzae
atggactatttagataaacttacccatttagcacaagtgcgtggagaaattaatattcgctgtgaatttcaaggcgaatggcaaatatctcatcaagaaaaggatgcaggaaaaggcatattccatcttattgaacaaggcgagtgctggcttacactaaatgaaaaacaatttcatttaaaagagggggatgttttttttcttcctcaaaatcaaccgcactctatgcattattcagcaaataaaagagcggatattcctacaaaaaaaagtcatcaaggattatttgagttacatcagattggacgaggtacaccagatttaaaaatgttctgcggtaatttttattatcaacaagatgcgcttcttacagcatcaatgcctgaatatttacatataaatttatgcgacacaccaattcatcctttagtacagctttttttacaagaagcgcaaaaaaatgatgcgggtacgaaatccgtcgttgatgcactttcaaatgtacttttaatttatattttacgccacgctattcaacaaaatttaattgaacaaggcatcttatttgccttgcaagataagcgattaaatactgcactgatcgcaatattacaacaacctcaaaatgattggcatattgaacaattagctgaacttgcaacaatgtctcgtgcaaactttattcgtatctttcaacaacatattggtatgtcgccaggacgttttctcacgaaagtgcggttacaatctgcggcgtttttattaaaacaatcacaacaatctgtgcttgccattgctttagaagtggggtatcaatcagaagctcatttttgtaaagtttttaaaaattactaccaactttctccaagccaatacagaaaatctgtcagcctataa

SEQ ID NO: 22208 - DNA, 594 bp, Haemophilus influenzae
atgtttgaatatccacaaggctataaattgatcgctggcgttgatgaagttgggcgaggccctctagttggggcggttgtcacggcagccgtgattttagatcctcataatccaattgaaggattagctgattctaaaaaactttcagaaaaaaaacgtttagcccttgctgaagaaatcaaagaaaaagcccgtgcttgggcattaggtcgagctgaagctgacgaaattgacgagataaatatcctgcaagcctccttgctggcaatgactcgagcagtaaaatctttaaaaattcaaccgcactttgtgttgattgatggcaataagatcccaaaagatttagctattccagcgcaagccgtggtaaaaggcgatagccttgtggctgaaatcagtgcagcctctattttagcgaaagttgcacgagaccaagaaatggaagaattagacaagcaatatccagaatacgcttttgcccagcataaaggctatccaaccaaattacatttggaaaaattagctgaacttggcgcgttaccgcaacatcgtcgtagctttgccccagtaaaaaaagcactagaacagttttag

SEQ ID NO: 22209 - DNA, 1173 bp, Haemophilus influenzae
atgaacaaaacaaatccaaccattgctcttgttgcaggagaagtgtctggcgatattctcggggcgggattaatacgccagctcaaagcacattatcctaatgcgcgctttattggcattgcaggcccaagaatgttggctgaaggttgtgagacgcttgttgatatggaagagctttcagtcatgggcttggctgaaatattaaaacatcttcctcgtctgttgaaaattcgcaaaaatgtcattcaaactatgttgcaagaaaaacctgatgtttacatcggcattgatgcgcctgattttaatttggatgtagaacttaaactaaaagcgaacggaattaaaactattcattacgtgagcccctctgtatgggcttggcgtcaaaaccgcatccataaaattgccaaagcaactcatcaagttctagcctttttgccttttgagaaagccttttacgataaatttaatgtgccttgccgttttattgggcacacaatggcagatgctattccgctcaaaccaaaccgtgccgaagcctgccaaacgttacagattgatcccgcacaacgctatttagcaatcttagttggaagccgaggttcagaagtggaatttctggctgagcctttcttaaaaaccgctttattattaaaagaacaattcccagatttacaattcctcgtgcctttagtgaacgaaaaacgacgaattcaatttgaaaccattaaagctaaaattacgccaaatctagacctgcatttaattgatggcaatgcacgacaagcaatgatcgcagctgatgcaacacttcttgcttcaggaacagcagcacttgaagcaatgctttgtaaatcccccatggtagttggctatcgaatgaaaccactgacctatttcttagcaaaacgtttagtgaaaactgattatatttctttaccaaacttgcttgcgaatgaaatgcttgttcctgaaatgattcaagaagaatgcacgccagaattgcttgctgaaaaactatcagtttatctttctgatgatgaaagtgcggtaaaaaatcgccatgttttaattcagcacttcacggatttacaccaaaaaattcaatgcaatgccgataagcaagcggctcaagcggtcattgatttattagaaggaaaagaaaatgtttga

SEQ ID NO: 22210 - DNA, 447 bp, Haemophilus influenzae
gtgtcagaacaacaaccaaaagtgatcgaatcaaaagaaattatgactttattaccacatcgctatccatttttattagtggatcgcgtattggattttaaagaaggcgaatggttaaaagcgattaaaaatatcagcgtcaatgagccttgtttcacaggccacttcccaggcgaacccattttaccgggcgttttaattttagaagctttggcacaagcaatgggcattttagcctttaaaactcacgaattaaaaggcggcgaactattctactttgcaggtattgatgaagcgcgctttaaacgcccagtattaccgggagatcaaatggaattaaacgttcaagtgattaaaaaacgccgtggtattactgcatttactggcgttgccaccgtaaacggcgaaatcgcttgtgaagcaaaactaatgtgtgctcgtcgttaa

SEQ ID NO: 22211 - DNA, 1458 bp, Haemophilus influenzae
gtgaagaagttaaatatggaaattctcagtgaaaggtggataatagcgacattttcttttcagggaagacaatataacacgaaaaaaacaagccaaattttgcccgcactttttgcagtgatttgtgccgcattcgcgggttattttattttaatcggttctggaatgtttacagaaccaagtgtggctctcattctgcttgcgacaataactattctcttattaagcagcagtaaaaaatccttctattttattttgctacctcttacgttactgcatgctttttatacgcctacagggctaaattttggccctccaagctaccaatatatcgcctcgcttttcgcgacagatatattagaaacgaaggaatttctattgcaaatcccagtgagtagttacttaattgctttcgccattcctattttgatttttcttcagtacaaaagtgcggtgaaatttggcataaaattttatcgtaataaaacatttattgccttggcgacattgctttttgcttacaacatgccgcttgctgaaccgctcaaagaaacagtaagttccacattaaaaattgtagatgaagtgcaaaaactaaaacaaatctctcaatctgataactggggaaaatcaacattagaaaattcacgctatgatgattatgtaattgtactcggagaaagtgcacggaaagattaccaccatgcctacggttatccaattgaaaacaccccctttatgtctaacgctaaaggcacgttgattgatggttttcgttcagcaggaacaaataccgtcgcctcacttcgtttaatgctaacctttccagacaaagaaaaatgggaacccaattacagtttgagtttagtagatctcatcaaatctgcgggcattaaaacttattggctttctaatcatgggatgatcggtaaattcgatacgccagtttcatcccttgcatcaaaatctgatgaaacctttttcttgaaaaaaggcggaagctttaattcgactaactttagtgactttgatttattacccaaattcgcccaagtattagaaaattctgttcaaggaaaacgttttattgtgttgcatatttatggttcacacccaatggcttgcgatcgtatcgaagattatccaaaaatctttgatgataaagatcttaatccgagatatggttatttaaattgctatgtttcatctattaagaaaactgatgaatttttaaaacgtgtatatgatcagcttgaagaaaacgtgaagaaaaatcaccgcactttttcaatgatttatttctcagatcacggtttgtgccaccaacaagatgaaaaaacaatatacttttgttcaatcaaaactgtttcagccgagagcaccataatattccgctattcaaaatttcatcagatgatatggaacgcaaagaatataaggtgtttaaatcaggtttga

SEQ ID NO: 22212 - DNA, 714 bp, Haemophilus influenzae
atgagccaaccaatttataaacgtattttattgaaattaagcggtgaagcattacaaggagaagatggtcttggtatcgatcctgcgattctcgatcgtatggctgttgaaattaaagaattagtggagatgggtgtggaagtcagtgtcgttctcggtggtggcaacttattccgtggcgcaaaactagcaaaagcggggatgaatcgcgtggtgggcgatcatatgggaatgcttgctactgtgatgaatggtttggcaatgcgtgattctttattccgtgctgatgtgaacgcaaaattaatgtccgctttccaattaaatggtatttgcgatacttataactggtctgaagctatcaaaatgttacgcgaaaaacgcgtagtcattttctctgcgggaacgggaaatccattctttaccactgattctaccgcttgtttgcgtggtattgaaattgaagctgatgttgtgttgaaagcgactaaagttgatggtgtgtatgattgtgatcctgcgaaaaatcctgatgcaaaactttataaaaatttaagttatgcagaagtgatcgataaagaattaaaagtgatggacttatcggcgtttactttagctcgcgatcatggcatgccgattagagtgttcaatatgggtaaacctggagcattacgtcaagtagtgactggtactgaagaaggcaccactatttgttag

SEQ ID NO: 22213 - DNA, 1566 bp, Haemophilus influenzae
atgttagacgttgttgatctttctcgcttgcagtttgctttaactgcgttgtatcacttcattttcgtgccgctaacattgggtttatcctttattcttgtaattatggaaactatttatgtggcgacaggtaaagaagtttataaagatatgacaaaattttggggaaagttatttggtattaactttgcccttggggtgaccaccggtattattatggaattccaatttggtactaactggtcttattattctcattacgtgggggatatttttggtgcgccacttgctattgaagcgttacttgccttcttcttagaatccacttttgtggggttatttttcttcggttgggatcgtttatcaaaaggaaaacacttattagcaacttattgtgtggctttcggttctaatttatctgctatgtggattttggttgcaaatggctggatgcaagcaccaacaggttcagaatttaattttgaaactgtacgtatggaaatgactaacttcttagatctttggttaaaccctgttgcacaaagtaaattcttacatactctttctgcaggttatgtgacaggcgcattttttgttttagccattagctcatactttttactaaaaggtcgtgattttgaatttgcaaaacgttctttctccgtagctgctacttttggatttatcgcctctatttcagtgctaattcttggtgatgaatctggttatgatattggtaaagcacaaccagtaaaattagccgcaatggaagctgaatttgaaactcacccagcacctgctccattccttccagtagcaattccaaatacggctgaaatgaaaaatgattttgcgattgaaattccttatcttggcggtgtaatagcaactcgttcaattgataaagaaattataggtctaaaagatcttcaagcattaaatgaaactcgtgtacgtagtggtatccgtgcttatgaattatttactcaactacgcgctgagaaaaaagcaaatggtcaagtaaatgaagaaaccaaagcacaattcaatgaagttaaaaaagatcttggtttcggtttattattaaaacgctatacaaacaatgttgttgatgcgacagaagaacaaattaaacaagccgctcgtgatactattccaaatgtaggccctaatttttgggcatttcgtgcaatgattgcagctggtggtttaattgctttacttacattcggcgcatttgttcaaaatttacgtaataaagtcactcaaattccattattgttaaaagttcttttatggggcttgccattaccttggattgccattgagtgtggttggttcttagcagaatatggtcgtcagccttgggctacttacgagatcttacctgttggcgtatccgcttctaatttaagtacaggcgatttatggttctctattggtttaatttgtgcgctttatcttgcgttcattattgttgagatgtatttgatgtttaaatatgcgcgtttgggtccaagtgcgttaaaaaccggcaaatactactttgaacaatcagctaaataa

SEQ ID NO: 22214 - DNA, 1638 bp, Haemophilus influenzae
atggctacaaattatattttcgtcactggcggtgtggtttcatcgttaggtaaaggcattgcggcagcatcattggcggcaattttagaagcacgtggtttaaacgtaaccattatgaaattagatccatatattaatgtggatcccggtacgatgagcccaacccaacacggggaagttttcgttactcaagatggcgcagaaacagatttagatttaggtcattatgagcgtttcatccgcacgaaaatgaccaaacgtaataacttcactacaggtaaaatttattctgaagtattacgtaaagagcgtcgtggcgattatcttggtgcaacaattcaagtgattccacatatcactaatgaaattaaagatcgcgtcattgctggtgctcaaggtcacgacgttgtgattgttgaagtgggcggcactgttggggatattgaatcacttccattcttagaagcattacgtcaattagccgttcaagttggtcgtgaacatacgttatttatgcatttaaccttggtgccttacattccaacggcgggagaggtaaaaactaaaccaacccagcattcggtaaaagaattgctttctattggtattcaacctgatgtgttgatttgccgttcagatcgtatgattccaccaaatgaacgtgcgaaaattgctttattttgtaatgttgcagaacgtgcagtcatttcattaaaagatgtgaattcaatttatcaaatccccgcattattaaaatctcaaggtttagatgattttgtctgtgaacgtttccgtttaacttgccctgaagcagatcttactgaatgggaacaagtgctttacaagcaagccaatccagtgggagaagtaaccatcggtatggtaggtaaatacactgagttacccgatgcctataaatcagtaaatgaagccttaaaacacgcaggtttaacgaaccgtttaagtgtaaacattaaatatattgattctcaagatgttgaaaccaaaggtgttgaagtattaaagggcattgatggcattcttgttccagggggatttggttatcgtggtgtagagggtaaaattcgtaccgcacaatatgcacgagaaaacaaaattccttacttgggtatttgcttaggtatgcagatcgcattgattgaatatgcacgtaatgtagcgggtttaactaaagccaattcatctgaatttgataaagattgtgaacaacctgtggtggcattaatcacagaatggcaagatgcggagggtaatactgaagtgcgtaccgatgaatcagatcttggcggaacaatgcgtttaggcgcacaacaatgtcatttggtatcaggtagccgcgcccgcgagctttatggcaaagaaaccattgaagagcgtcatcgtcatcgctatgaagtgaacaataccttgcttccacaaattgaaaaagcaggattgaaagtaactggattatctgcagataaaaaattggtagaaattatcgaagtgccaaatcatccttggtttgtcgcttgtcaattccatccagaatttacttctacgcctcgtgatggtcatccgttgtttgcaggctttgtaaaagcagcctatgaaaatcacaaaaaatctgtgaagtaa

SEQ ID NO: 22215 - DNA, 774 bp, Haemophilus influenzae
atgtctatgttaaaagtaagtaatattcagaaaaactttaatggcaatcatgtgttaaaaggcattgattttgaaattaataaaggcgaagtggtcgcaattttaggcccttctggttctggaaaaaccacctttttacgttgtttaaacttgcttgaacgaccagagcaaggcattttggaatttactgatggcagtctaaaaattgattttagccagaaaattagtaaagcagatgaattgaagttacgccgacgttcgtcaatggtctttcagcaatacaatttattccctcatcgttctgcccttgaaaatgttatggagggaatggttgttgtgcaaaaacaagataaagctcaagctcgtgaaaaagcacttagtttgctagaaaaagtagggcttaaaaataaagcggatttatttccatcccaactttctggcggtcagcaacagcgagtggggattgctcgagcccttgcggtaaaacctgatattattttattagatgaacctacatcggcattagatcctgaattggtgggcgaagtgttacaaacactaaaaatgctcgcccaagaaggctggacaatgattattgttactcacgaaatgcagtttgcgaaagatgtcgcggatcgtgtgattttaatggcggatggacatattgtagaacaaaatacagcagataaattcttcacttgcccacaacacgagcgtactaaacagttcttgttacaagcaaaaataccacttgagcttgattattatatttaa

SEQ ID NO: 22216 - DNA, 1275 bp, Haemophilus influenzae
atggataaatttcgtgtttatgggcaatctcgtttaagtggaagtgtgaatatttcaggcgcaaaaaacgccgcacttccaattctttttgcggctattttagcgacagaacctgttaaattgacaaatgttcccgaacttaaagatattgaaactactttgaaaattttgcgtcaattaggcgtggttgtagatcgtgatgcaactggtgcagttttattagatgcctctaatatcaatcatttcactgcaccttatgaattggttaaaactatgcgagcttcaatttgggcattggcacctttagtcgctcgtttccatcaaggtcaagtatcattacctggaggttgttctattggggctagacctgttgatctccatattagcggtttagaaaaattaggtgcggatattgttcttgaagaaggatatgtaaaagcacaagtatcggatcgtcttgtgggaactcgtattgtaatagaaaaagtaagtgtaggcgccactttatctattatgatggcagcaacccttgcgaaaggtacgactgttattgaaaacgccgctcgtgagcctgaaattgttgataccgccgatttccttaataaaatgggtgcgaaaataacaggtgcaggatctgctcacatcacgattgaaggtgttgaacgtttaactggttgtgagcacagtgtcgtgccagatcgcattgaaacgggtacattcttaattgctgcagcaatttcgggcggttgtgttgtttgtcaaaatactaaagcggatactttagatgccgtaattgataaactccgtgaagctggtgcgcaagttgatgtaactgaaaatagcattactttagatatgcttggtaatcgccctaaagcagtgaatattcgtactgcaccacatccagggttcccaactgatatgcaggctcaatttactttattaaatatggtggcagaaggtacaagcattatcactgaaacgatttttgaaaatcgttttatgcatattcctgaattaattcgtatgggtggtaaagctgaaattgaagggaatacagcggtatgtcacggggttgaacaattgtctggcacagaggtaatagcgacagatttacgcgcttcaatcagtttagtgcttgcaggttgtatcgcaacgggtgaaaccattgtagatcgtatttatcatatcgatcgtggttatgaacatatcgaagataaattacgtggcctaggtgcgaaaattgaacgtttttctggaagtgatgaagcgtaa

SEQ ID NO: 22217 - DNA, 666 bp, Haemophilus influenzae
atgatttttttagagataattaaacgagaacttcaaattgcgatgcgtaaaaatgcggaaattttaaatccgctatggttctttttgcttgtgattactttgtttccgcttgttattgggccagatcctaaattactttcccgtatcgcaccgggtatcgcatgggtagctgcattactttcagcattgctttcttttgaacgtttattccgtgatgattttattgatggctctcttgaacaattaatgttaaccgcacagcctttgccaatgacagctttggctaaagtggttgcacattggttgctcactggtttgccgcttattttgctatcacctattgcggctttgttgctttctcttgaagtgaatatttggtgggcattagttttgacattgttactgggcacccctgtattgagctgtatcggtgctattggcgtggctttaacggtgggattgcgaaaaggtggcgtgttgttgagtttgcttgttgttccgttgtttattcctgttttaatttttgcttcatcggtattggaggcagcaggattaaatgtgccttatggggggcaactggcgattttaggtgccatgatggttggcgctgtaacgctttcgccttttgccatcgcggcagcgttgcgaattagtttagataattaa

SEQ ID NO: 22218 - DNA, 1947 bp, Haemophilus influenzae
atgattgctgaattaggaaattacgcacttgctttaagtttagctgtatcgcttatgttggcgattttccctttgtggggggcggaaaagggcaatgcacaattaatggcattagctcgcccaatgacttatggtttatttgcaagcctaagcattgcttttgctgcgctattttatttattcgcagtcaatgattttagcgtgcaatatattgtaaataattctaatactactttacccatttattatcgtttatctgcggtatggggttcccatgaaggctctttgttactgtggatttggttactggcggtttggtcatttgccgttgctttattgagtaaacatttaccccaagaagcggttgctcgcgtgcttggtattatggggattattagcgtcggttttgtattgttcgtcttgtttacctcaaatcctttcacgcgtactttccctgatttcccagtggatggaaaagaacttaacccaatgttgcaagatgtaggcttgattttccaccctccattactttatatgggctatgtgggtttttcggtggcatttgcgtttgcgatagcatccttaatgactggaaaattagattcagcttgggctcgttggtcacgtccttggacgcttgctgcttgggtgtttttaactttaggtatcgtactcggttcttggtgggcttattatgagcttggctgggggggctggtggttctgggatccagtagaaaactcatcgtttatgccgtggcttgctggtactgcattgattcactctctttctgtgacagaaaaacgtggttctttcaaagcttggacggtattacttgcgattttagccttttcactttgtctgctcggcacattcttagttcgttctggtatcttagtttcagttcacgcatttgcatcggatccaactcgtggtttgtatattttggcttacctcgttgtggtaattggcggttcgcttgctctctatgcgtataaaggcagtcaaattcgttctcgtgataatgcagaacgctattcacgtgaaagtatgttgttattaaataatatcttattaatgaccgcactttgcgttgtattcttaggaacgttgttaccacttgttcacaaacaacttggtttaggctctatttctattggtgcgccgttctttgatcaaatgttcttaattattatgacaccatttgcattattgcttggtattggacctttagtgaaatggcgtagagaccaattttctgcaattcgtacgcctgttgttatctgcgtatttgttatgctgattgcaggttttgcgttaccttatttcttgcaagataaaattaccgtgagttcagtgcttggttcaatgatgactgtgattattgcgttacttgcgctttatgaattgcaacaacgtgcgacgcatcgtgaatcattctttgttggcgtacgcaaactatctcgttctcattggggaatgatgttagctcacttaggcgtagcaatgactgtttgggggatcgcgtttagccaaaactttagcgtagaacgtgatgtgagaatgaaagttggcgagagcgcacaaattggtcgttacgattttaaattcactggtgtgacggatgaaaatggtccaaactatattggtggaaaagctcaaattgatatttctaaagatgggcaaccagaggcgagtttattcgcagaaaaacgtttttacacagtaagtcggatgtctatgacagaagccgctattgctggtggtttaactcgtgacctttatgtggcacttggcgaaaaacttgaggataattcttgggcgttacgcttatattacaagccatttattcgctggatttggattggcggcttatttatggcgttaggtggattgttgtgcatgttcgatcgacgctatcggtttaatgtgttgttgaagaaataa

SEQ ID NO: 22219 - DNA, 2040 bp, Haemophilus influenzae
gtgcggtcatttttctccgagaattttatgacaaatattcaaactcaactagacaatctacgcaaaaccttgcgccaatatgaatacgaataccacgttttagataatccgagtgtgcctgatagcgaatacgatcgtttatttcatcagctcaaagccctagaattagagcatcctgaatttctgacgtcagattcgcccactcaacgtgttggtgcaaaaccactttctgggtttagccaaattcgtcacgaaattcctatgctctctttggataatgctttttccgatgcagaatttaatgcttttgtaaaacgcattgaagatcgtttaatcctattaccgaaaccacttactttctgttgcgaacctaaacttgatggcttggctgtgagtattttgtatgttaatggtgaacttacacaagccgccactcgtggtgatggcaccacaggcgaagatattacagccaatatccgcacgattcgtaatgttccattgcaacttttaacagataatcctccagcacgtttagaggtgcggggcgaagtttttatgccgcacgcaggctttgagcgtttaaataaatatgcgttagaacataatgaaaaaacctttgctaatcctcgcaatgcagcggcaggctctttacgccagcttgatcctaatattaccagcaaacgtccgctggtattaaatgcttatggtattggaattgctgagggggttgatctgccgactacgcattatgctcgtttgcaatggctaaaatctatcgggattccagtaaatcctgaaattcgtttatgcaatggtgcagatgaagttttaggtttttatcgagatattcaaaacaaacgtagctcgttaggttatgatattgacggaacggtattaaaaatcaatgatatagccttacaaaatgaactaggatttatttctaaagcacctcgctgggcgattgcttataaattccccgcccaagaagaattaaccctgttgaatgatgttgaattccaagtgggtcgaactggcgcaatcacaccagttgccaaattagagccagtgtttgttgcaggcgttacagtaagtaatgccaccttacataatggcgatgaaattgaacgtttaaatatcgctattggcgatactgttgttattcgtcgagcaggcgatgtaattccacaaattattggcgtattacacgaacgtcgccctgataatgctaaaccaatcattttcccaacaaattgccctgtgtgcgattctcaaattattcgtattgaaggcgaagcagtagcacgttgcacgggaggattattctgtgcggcacagcgtaaagaggcgttaaaacatttcgtctctcgtaaagcaatggatattgatggtgtaggcggaaaattaatagagcaattagtcgatcgagaactgattcatacacctgcggacttatttaaacttgatttaaccacgctcacacgcttagaaagaatgggtgcaaaatctgcagaaaacgctctcaatagtcttgaaaatgcaaaaagcacgacgcttgctcgctttatttttgctttaggcattcgtgaagtgggcgaagccactgcattaaatcttgctaatcatttcaaaactttagatgcgcttaaagacgcaaatcttgaagaacttcaacaagtgcctgatgtaggggaagttgtagcgaaccgaatttttatattttggcgtgaagcgcataatgttgcagtcgtggaggatttaatcgcacaaggtgtgcattgggaaactgtagaagtgaaagaagcaagtgaaaacttgttcaaagataaaactgtagtactgacaggcactcttacacaaatggggcgtaatgaagcaaaagccttattacaacagcttggtgcaaaagtaagtggttcggtatccagtaaaacagatttcgttatcgcaggtgatgcagcaggctctaaacttgcaaaagctcaagaactaaatattacagtactaacagaagaagaatttttagcacagataacaagataa

SEQ ID NO: 22220 - DNA, 987 bp, Haemophilus influenzae
atggatttaaatacaattttgattattgtgggtatcgtggcacttgtcgccttaatcgtacacggattatggtcaaatcgtcgtgagaaatcaaaatattttgataaagccaataaatttgaccgcacttctctaacatctagatcccatacgcaagaagaaatggtacagccaaacaatatttcgccaaatacctatgtggaaaatgggcatacaccaattcctcaaccgaccacagaaaaattaccatcagaagctgaattgatcgattatcgccaaagcgataaaagtgtggatgacatcaaaatttctattcctaacacgcaacctatttatgatatggggaatcatcgttccgagccaatacaaccaacgcaacctcaatacgatatgccaaccgcaaataatgtcgcaagtatgaccttagaacaacttgaagcacaaagtcaaaatgttggttttaatggcattaattcatcatcgccagaattaagagtgcagcttgcagaattatctcacgaagaacatcaagtagactacaacctctcgttcaatgaaccaaaagcagaaacgacagctcatccaaaacaaacaactggctatattcaactttatcttattccaaaatctagcgaagaatttaatggtgctaaattggtgcaggctcttgaaaacttgggttttatcttgggtaaagatgaaatgtatcatcgtcacttagatttaagtgtggcaagtcctgtgctttttagtgtggccaatttagaacaacccggcacattcaatgcttataacttagcggaatttaacaccataggaattgtattatttatgcaattgccctctccaggtaataatcttgctaatttacgtatgatgatgcgtgctgcccatacattagccgaagatttacaaggtgttatactgactgaagaacaagaaatttttgatgcaaatgcagagcaagcctatcttgctcgtgtgtaa

SEQ ID NO: 22221 - DNA, 951 bp, Haemophilus influenzae
atggcaatttatgcagacaattcttattctatcggaaatacgccgcttgtgcgtttaaaacactttggccataacggtaatgtggtggtaaaaattgaaggtcgtaacccaagctacagcgtaaaatgccgtattggggcgaatatggtgtggcaagcagaaaaagatggcacgctcacaaaagggaaagagattgtagatgcaacgagtggtaacacgggcattgctttggcttatgttgcggcggctagaggttataaaatcacgctcactatgccagaaacaatgagtcttgaaagaaaacgcttattgtgcggattgggtgtaaatttagtgcttaccgaaggcgcaaaaggaatgaaaggtgctattgcgaaagcagaagaaattgttgcttctgatccaagccgctatgtcatgcttaaacaatttgaaaatccagccaacccacaaattcatcgagaaacaacagggcctgaaatttggaaagatacggatggcaaagtcgatgttgttgttgctggcgtaggaacaggtggttcgattacgggcatttctcgcgcgattaaattagattttggtaaacaaatcacttctgttgccgttgagccagtggaatctccggtcattagtcaaactttagcgggtgaagaagtaaaaccaggcccacacaaaattcaaggtatcggtgcgggtttcattcccaaaaatttagatttatctattattgatcgcgtagaaactgttgatagtgataccgcacttgccacagctcgtcgcttaatggcggaagaaggaattcttgcaggtatttcatctggtgcagctgtcgcggctgcagatcgcttagctaaattaccagaatttgctgataaactcattgttgttattttgccttcagcgtctgaacgctacttaagcacagcactgtttgaagggattgagggataa

SEQ ID NO: 22222 - DNA, 1224 bp, Haemophilus influenzae
atgacaaacaaagtaaacagttatggctggaaagccttaattggctctgccgtcggctatggaatggacggtttcgatcttctcattttaggtttcatgcttagtgcaatttccgcagacttaaatctaacacccgcccaaggtggctctctcgtaacttggactctgattggtgccgtatttggcggcattttatttggtgcattaagcgataaatacggtcgtgtacgcgtactgacttggactattcttctttttgcggtgtttactggtttatgtgcgattgcacaaggttattgggatttactgatttatcgcacaattgctggcattggcttaggcggtgaatttggaattgggatggctctagcagcggaagcatggcccgcacgccacagagctaaagcagcatcttatgttgcattaggttggcaagtcggtgtgttaggtgcagcattgcttacaccattattgctcccacatattggctggcgtggaatgttcttagtgggtatcttccctgcatttgtcgcttggttcttacgttctcatctgcacgaacctgaaattttcacgcaaaaacaaaccgcactttcaacgcaatccagctttactgataaattacgttcatttcagcttctgattaaagacaaagccacgagcaaaattagccttggtatcgtcgtactcacttctgtacaaaacttcggttattacggcattatgatttggttacctaatttcttatcaaaacaacttggattcagtttaactaaatctgggctttggacagccgttaccgtctgcggcatgatggctggaatttggattttcggacaactcgccgaccgcatcggacgcaaaccaagtttcttacttttccaattaggcgcagtgataagtattgtggtttactcacaacttaccgatcctgacatcatgcttcttgctggggcatttttaggtatgtttgtgaacggaatgctgggcggttacggtgcattgatggcggaagcctacccaacagaagctcgagcaacggcacaaaacgtacttttcaatattggtcgtgccgtagggggatttggacctgtagttgtgggctcagttgtacttgcttactctttccaaactgccatcgctctacttgcgattatctacgtaattgatatgttagcgacaattttcttaatccctgaattaaaaggtaaagccttagactaa

SEQ ID NO: 22223 - DNA, 999 bp, Haemophilus influenzae
atgaaaatcaaatcagctttacttacccttgttggtgcattaactgtatttagtagttctgcccattccaaagatcttaaaattggtttatccattgatgatttacgtttagaaagatggcaaaaagatcgagatattttcgtaaacaaagcagaatcaatgggtgcaaaagtgtttgtccaatctgcaaatggtgatgattcagcacaaatttctcaaatcgaaaatatgatcaataaaaatattgatgtattagtaattattcctcataacggtgaagtattaagtaacgttatttctgaagctaaaaaggaaggaataaaagtattagcgtatgaccgtttaatcaataatgcagatttagatttttatgtttcctttgataatgaaaaagtgggtgaactacaagctaaaagtattgtggctgtaaaaccagaaggtaattattttttaatggggggatctcctgtagataataatgcgaaattatttagaaaagggcaaatgaaagtattagatcctttaattgccagtgggaaaattaaggttgtaggagatcaatgggttgattcttggttagctgaaaaagcgttacaaattatggaaaacgcattaacagctaataaaaataatgtggatgctgttgttgcatctaacgatgctactgctggaggtgcgattcaagcccttagcgcacaaggcttatctgggaaagtcgcaatttctgggcaagatgcagatttagctgcaattaaacgtattgtcaatggctcgcaaactatgactgtttataaaccaattacgaaacttgcagataaagcggcagaaattgcggttgaattaggtaagaatgaaaaaatagaagctaatgcagaactgaataatggcttaaaaaatgttcctgcgtatttacttgatcctatcgctgttgataaacgtaatattaatgaaactgtaattaaagatggttttcatactaaggaaagtatttatcactaa

SEQ ID NO: 22224 - DNA, 1320 bp, Haemophilus influenzae
atgacaacctatttcgataaaattgaaaaaatctcctttgagggagaaaaatccacaaatccttttgctttcaaacattatgatgctaatcaagtaattttaggtaaaactatggctgaacatttacgcttagcggtgtgttattggcataccttttgctggaatgggaatgatatgtttgggctaggttctttggaacgaagttggcagaaaaattcaaatttgcttgctggcgcagaacaaaaagccgatattgcttttgagtttttgaataagttaggcgtgccttattattgttttcatgatgtcgatattgcacctgaaggtaattcagtgcgggaatatgtacaaaattttcatcatattgttgatattttagaacgcaaacaagtagaaacgggtgtaaaactcttatggggaactgcaaattgttttactaatcctcgttatatgtctggtgcagcaaccaatcctaatcctgaggtttttgcttgggctgcaacacaagtgtttaatgcgatgaatgccactcaacgtttaggtggagaaaattacgtattatggggtggacgtgagggatatgaaactttattgaataccgatttgaaacgtgaacgtgaacaaattggtcgttttatgcaaatggtggtagaacataagcataaaattgggtttaaaggtacattattaattgagccaaaaccgcaagaaccaactaaacatcaatatgattatgatgtggcaacagtgtatggtttcctaaaacaatttggtttagaaaaagaaattaaagttaatattgaagctaaccacgcgacgcttgctggccatacctttcaacatgaaattgcaacagcttgtgcattagatatttttggctcaattgatgctaatcgtggcgatccacaattaggctgggataccgaccaattcccaaatagtgttgaagaaaacacgttagttatgtatgaaattttaaaacatggtggttttactactggaggttttaattttgatgcgaaaattcgccgacaaagtattgatccttatgatttattttacgctcatatcggtgcaattgatgtattggcattatccttaaaacgtgcagcaaaaatgttacaagaggaaaccttacaaaaaattgttaatgaacgctatgcaggttggaatagtgaacttggtcagcatattttgcaaggcaaaacttcacttgaaacacttgcgcaacttgtccaacaaaaagatttagcaccaaaaccagtttcaggtcagcaagaatatttggaaaatttggtaaaccaagttatttatagctaa

SEQ ID NO: 22225 - DNA, 1536 bp, Haemophilus influenzae
atgaagcaaaagtgcggttgtattccaccgcacttttttattttaggagacattatgtatataggaattgattgtggcacacaaggaacaaaggcgatagtgcttgattctgtccaaaaaaaagtgattggagttggttacgcaaaacatgaattaattacacaatccaatggaagacgtgaacaacaaccaaattggtggattgaggcattacaacaagcattacaaattgcattgaaacaagcaaaaaattcaccgcacttttcacctaatttagtgaagggaataggcatttcaggacaacaacatggactggtaatgttagataaaaacgatcgtcctctatataaggctaagctttggtgtgatacagaaaccgctacggaaaatgatatactgatcgaaaaattaggcggacaaacagccgtatttgaaaaattaggcatcatttgccaaactggttacacagcttcaaaactaagttggtttcgtcaaaattatcctgacaaatttgccaatattcgcaaaatcatgctgccacacgattatctaaattattggctaacaggaaaattctgcactgaatttggtgatgcttctggtagtggttatttcgatgttgtgaaaagagaatggaaaagagaagtcttcaaatatcttgctccagaattaaatatggatgaagtgttaccaaaattactttctgctgaacaaaaaatcggtgtgattaaacctgaaattgcgactttatttggttttaatgagaatgtcatcgtctccacaggtggaggcgataatatgatgggagcaattggtacaggaaatattcgagaagggattgctacgatgagtctcggtacttctggtaccttgtatgcttatacgcaaaagccattacttaatttaccaccaatgatcgcaaatttttgttcaagtaataatggctggttaccactggtttgtgtaatgaatataacctcctcaaataaacagctaatgaatttgctcaatattgatattgaagaattaaatcaacttgctcaacaagcacctattggcgcgaatggcatcactattttgccattctttaatggtgaaagagttccacctttacccaatacaaaagcgagcattttaggattagattcaagtaatttcacacgagaaaatctttgtcgagcaatgatggaaagtgctacttttacgcttcgctatggcttagatttatttcgtcaagctggcctcaaaacctcacaaattcgcctaattggaggtggcgcgaaaagctcattttggcggcaaatgattgctgatgtgatgaattctgaagtggtatgtttgcaggaagaagaagctgctgcattaggaggagcaattcaagctatgtgggcaaatggagaaggagaactggaatttttatgcgaaaccttcattcacttagatgaaaactcaaaagcttatcccaacttatcacaggtgaaaaattatcaaaatgcttatgagcgttatttaacacatttatcacaattatattaa

SEQ ID NO: 22226 - DNA, 672 bp, Haemophilus influenzae
atgacatcaaatcaacttgctcaatatatcgatcacaccgcacttaccgcagaaaaaaatgaacaagatatttcgacactctgtaatgaagcgattgaacacggattttattctgtatgtatcaattctgcttatattccactcgctaaagaaaaacttgctggctcaaatgtaaaaatttgcaccgtagttggattccctttgggggcgaatttaacctcagtcaaagcatttgaaacgcaagaatctattaaagcgggtgcaaatgaaattgatatggtgattaatgtaggttggataaaatcgcaaaaatgggatgaagtaaaacaagatattcaagcggtatttaatgcttgtaatggcacgccattaaaagtgattttagaaacttgtttgctcactaaagatgaaatagtgaaagcctgcgaaatttgtaaagaaatcggtgtagcttttgttaaaacatcaacaggctttaataaaggtggtgcgaccgtagaagatgttgcattgatgaaaaacacggtcggcaatattggtgttaaagcatcaggtggtgtgcgtgatactgaaactgcacttgcaatgattaaggcgggtgcgactcgcattggtgcaagcgctggcattgcgattattagcggtactcaagacactcaaagcacttactaa

SEQ ID NO: 22227 - DNA, 972 bp, Haemophilus influenzae
atgaatcctttattagatgtaaaaaatctctacgttcgcttcaaaacaccagatggcgtcgttacagcagtgaatgacttaaacttcacgctgaatgcaggaagcacgctgggcatcgtaggcgaaagtggatcaggcaagtcacaaacagcctttgctttaatgggtttattggcagccaacggtgaagtggaaggctctgccatttttgaaggtaaagaattagttaatttaccgaatgctgaattgaataaaatccgcgccgagcaaatttccatgattttccaagatccaatgacgtcactcaacccatacatgaaaatcggtgaacaactcatggaagtgctgcaattgcacaagggctatgataaacaaactgcctttgctgaatccgtgaaaatgttagacgcagttaaaatgccagaagctaaaaaacgcatgggcatgtatccgcacgagttttctggcggtatgcgtcaacgggtgatgattgcgatggccttattatgccgtcccaaactactcattgcagatgaaccaacaaccgctttggatgtgaccgttcaagcacaaatcatgactttattaaatgaactaaaacgtgaatttaatactgcaattattatgattacccatgatcttggggtagtggctggtatctgcgatcaagtcatggtgatgtatgctggacgaaccatggaatacggcacagcggaacaaattttctatcatccaacccatccctattccataggcttaatggatgcgattcctcgcttagacggcaatgaagaacacttggtaaccattcctggcaatccaccgaatttattgcatttgccaaaaggttgtccattctcacctcgttgccaatttgctaccgaacaatgccaaattgcgccaaaactgactacatttaatcacggtcaattacgtaattgttggttatcagcggagaaatttaacctatga

SEQ ID NO: 22228 - DNA, 954 bp, Haemophilus influenzae
atgacaacacagttagattcacttcgtaatatgaccgtcgtcgtagctgatactggcgatattgatgcaatcaaaaaataccaaccacaagatgcaacaacaaacccatctttaattttaagtgcttcagcattaccacaatacgccccattaattgatgaagcggtagcttatgcaaaagcacaaagtgcagacaaagcacaacaattaattgatgctgaagataaattagcggtaaacatcggcttagaaattttaaaaattgttccaggacgcatttcaacagaagtagatgctcgcctttcttacgatacccaagcaacggttgaaaaagcgcgtaaattaattgcactttataatgcagcaggcatctcaaatgatcgtattttgattaaaatcgcttccacatggcaaggtatccgagctgcagaaatccttgaaaaagaaggcattaactgtaacttaaccttattattctctgaagcgcaagctcgtgcttgtgcagaagcgggcgtttacttaatttctccatttgtaggtcgtattttagactggtacaaagcaaattcagacaaaaaagaatatgcgccagcagaagatccaggcgttatttctgtcaccaaaatctataattactacaaagaatatggctacaacacagttgtgatgggcgcaagtttccgtaatgtaggtgaaattactgaacttgcaggttgcgatcgtttaaccattgcaccagcattactgaaagaattacaagaaaattcaaccgcacttgtacgcaaattagaatacaaaggcgaagtaaaagcgaaaccacaaccattaacagaagctgagttctactggcaacataacagcgatgctatggctgttgaaaaattagcagagggtattcgtaaatttgctattgaccaagaaaaattggaaaccatgctttcagcaaaactttaa

SEQ ID NO: 22229 - DNA, 1116 bp, Haemophilus influenzae
ttgaggagccttcctatgttatggtttttcttttgtgtaaccgtgttgattatcggttactttatttatggaaaaattatcgaaaaaatttttgtgattaatccaaaacgtcaaacacctgcttaccaagtaaatgatggtgtggactatatgccaatgtctaaaacgaaaatttggctaattcaattgttaaatattgcgggaacaggccctatttttggccctattcttggtgcattatatggacctgtagcaatgctttggattgttattggttgtatttttgctggcgcagtacacgattatttctgtggtatgttaagtattcgtcacggtggcgcaacaatgccatatttggcgggtaagtttttaggtcgtcccgttaaagtctttatcaatacattagcacttgtgttgcttttacttgtcggtgttgtgtttgtggcaagcccagctcaattaatgggtaccattacaatggatgtatttggtgtttcgcaaggtgcgttagtgcttggtgatgcagaggcagttcatcattctgttgaagctggtgggattaaagtatggggaatggataaagcaacagtggttgctgtgtggacagcaattatttttgcttattatattcttgcaaccttacttccagttgataagattattggtcgaatttatccactctttggtgcgttattactctttatgtcagttggtatggtatacggattagttgtttcacattttagtgcaacagatccaattgagtttttccgtacaatcaatgctgatggcgagggtttaacttgggcgaaatttacacaaaatttccaagtgaaaggtgatgttccaatttggccacttttattcttaactatctcttgtggcgcattatcaggtttccacgcaacgcaaactccattaatggcacgttgtacagaaaatgaaagtgaaggtcgcttcattttctacggtgcaatgattactgagggggtaattgcattagtatggtgtatggttggtcttgcattctatgaaaatccacaagcgttacaagatgcaatttcagcaggttgctccatgctaaagttgtgtatgatagttcgttacatttcttag

SEQ ID NO: 22230 - DNA, 456 bp, Haemophilus influenzae
atgtttcgtggtgcaacggcggttaatttagattctaagggacgtgtagcgattccaactcgctatcgcgctgaaattcttgaaaagaaccaagggcaaatggtttgtactgtagatattcgtcaatcctgtcttttactttatccccttgatgaatgggaaaaaatcgaacaaaaacttctcgcactttctaactttgatcctacccaacgccgtttgcagcgagtaatgcttggtcatgccactgaatgtgagatggatgctcagggtcgtattttgcttagtgggccattacgccaacacgcaaaattagaaaaaggtttaatgttggtagggcaacttaataaatttgaaatttggagcgatgtagaatggcatactcaaattgcagaggatatagaaattggctccagcacagattttgctgctgatgcgttaaatgatttctcattatag

SEQ ID NO: 22231 - DNA, 966 bp, Haemophilus influenzae
atgaatagcgaaaattccttttcttcatctgaacatattacagttttacttcacgaagccgtgaatggcttggcattgaaggagaatggcatttatattgatggtacttttgggcgtggggggcattctcggtttatcctttctcaactttcttctaatggtcgtttgatagctgtagatcgcgatcctcgtgctattgcagaagcacacaaaatccaagacttgcgttttcagattgaacataacagcttttcgcatattcctgaaatttgtgacaaattaaatttagtgggcaaaattgacggtattttgcttgatcttggtgtgtcttcccctcagcttgatgaagcagaacgtggttttagttttatgaaagatggcccgcttgatatgcgtatggatacaactcaaggtttatctgctgaagaatggttaaaacaagtgtccattgaggatttaacttgggtgttgaaaacttttggcgaagagcgtttcgctaaacgtattgccactgctattgttgatttcaataaaagtgcggtaaaaaatggcacagaatttttatcgcgtaccagtcaattggcggaacttatttcacaggcagttccttttaaagataaacataaacatcctgcgacgcgtagtttccaagctattcgtatttttattaattcggaattagatgaattagaaagtctgcttaattctgcgttagatatgttagcaccagaaggtcgtttatcaattattagtttccattctttagaagatagaatggtgaaacattttatgaaaaaacaaagtaagggcgaggatattcccaaaggtttaccattgcgagaagatcaaattcagcgtaatcaaaaattaagaattattggtaaagccattcagccaagtgatgcagaaattcaagccaatcctcgttcaagaagtgccatattacgtgtggcagagagaatttag

SEQ ID NO: 22232 - DNA, 1833 bp, Haemophilus influenzae
atggtgaaatttaattcctcgcgtaaatcaggtaagtcaaaaaaaacaattagaaaattgaccgcacctgaaactgtaaagcaaaacaagcctcaaaaggtgtttgaaaaatgctttatgcgtggacgttatatgctttctacggttcttattttacttggcctgtgtgctttagtcgcacgagcagcttatgttcaatctattaatgccgatacgttatcgaatgaagcggataagcgttctttgcgtaaagatgaagtattatcggtgcgtggttctattttagatcgtaatggtcagcttttatctgtaagcgtgccgatgagcgcgattgtggcagatccaaaaacgatgttgaaggaaaattcgcttgcggataaagaacgaattgcagctttagccgaagaattaggtatgactgaaaatgatttagtgaaaaaaattgagaaaaattctaaatctggttatttgtatttagcacgtcaagttgaattaagtaaagctaactatattcgtagattaaaaattaagggtattattttagaaacagagcatcgccgtttttatcctcgtgtagaagaagctgcacacgtggtgggttatacggatattgatggaaatggtattgaaggcattgagaaaagttttaattccctgcttgttggtaaagacggttcacgtactgttcgtaaagataaacgtgggaatattgttgcacatatctccgatgagaaaaaatatgatgcacaagatgttaccttaagtatcgatgaaaaattgcaatctatggtgtatcgtgagattaaaaaggcggtgtctgagaataatgctgagtctggtactgcggtgttagttgatgttcgaacaggggaagtgttagctatggcgactgcgccctcttataatccaaacaaccgtgtcggcgtgaaatcagagttaatgcgtaaccgtgcaattaccgatacttttgagccaggttctacggtaaaacctttcgttgttttaaccgcacttcaacgaggtgtagttaaacgagatgaaattattgatactacgtcctttaaattaagcggtaaagaaattgtggacgttgcaccacgtgctcagcaaactttagacgagattttaatgaactctagtaaccgtggtgtaagtcgtcttgcattacgtatgccacctagtgcattaatggaaacttatcaaaatgcaggtttaagtaaaccgacagatttaggcttgatcggagagcaagttgggattttgaatgcaaatcgtaaacgctgggcagatattgagcgtgcaacagtcgcttatggttatggtattactgcgacacctttacaaattgctcgtgcctatgcaacccttggtagtttcggtgtttatcgtccgctttctatcactaaagttgatccgccagttattgggaaacgggttttctctgaaaaaataactaaagatattgtgggaattttagagaaagtagcaattaaaaataaacgcgcaatggtggaaggctaccgtgtcggcgtaaaaacaggtacggcacgtaagattgaaaatggacattatgtaaataagtatgtggcatttactgcgggtattgcaccaattagtgatcctcgttatgcattagtggttttgatcaatgatccaaaagcaggagaatattatggtggtgcggtttctgcccctgtattctctaacattatgggctatgcgttacgtgcaaatgctattccgcaagatgctgaagcagctgaaaacacaacaacgaaaagtgcaaaacgtattgtttatattggcgaacacaagaatcaaaaagtgaattaa

SEQ ID NO: 22233 - DNA, 1467 bp, Haemophilus influenzae
atgaaaaaactcaccgcactttttaatttgcctgaattaaagaatgatatagaactccataatatggtgttagatagccgtaaggttaaagctggcgatctttttgtggcgataaaaggtcatcaggtggatggaaatcaatttattgattctgctcttcattctggtgcgagtgcggtggtttctgagacagaattatccagcgagcatttaactgtagcgtttatcgggaatgttcccgtagtgaaatattatcaacttgcacatcatctttcatctttggcggatgttttctatgattcgccctctaacaatttaacccttgttggtgtcacggggacaaatggcaaaaccactatttctcaattattagcgcaatgggcggaattattggggcatcgtgcggctgtgatgggaaccattggtaatggactttttgggcaaattgtagaagctaaaaatacgacaggttcagcagtagaaattcagtcatctctttcagctttcaaacacgcaggtgcagattttacctctattgaagtttcatcacacggtttggcgcagcatcgtgtagaagccttgcattttaaagcagcaattttcacgaatttaacccgtgatcatctagattatcatcaatctatggaaaattatgctgcagcgaagaaacgcttgttcactgaattagatacccaaattaaagtgattaatgctgatgatgaaattggataccaatggctaactgaactacctgatgctattgccgtaagtatgaatgcggattttaaagtaggttcacaccaatggatgaaagcaataaatatccattatcattttaaaggtgcagatattacttttgaatctagctggggtaatggtgttttgcatagcccattaattggtgcttttaatgtaagtaatttattattagtaatgaccacgttgttatcgtttggttacccattggaaaatttactcgctacggcgaaatctttaaaaggagtatgtggaagaatggaaatgattcaatatccaaataaaccaaccgttattgtagattatgcgcatacaccagatgcgttggaaaaagcgttgattgctgcgcgtgaacattgccaaggcgaattatggtgcatttttggttgtggcggagaccgtgatagaggcaaacgtccgttaatggcacaggttgcagagcagtttgctgaaaagattattgtgacaaaagataatccacgaacagaatcacaaagccaaattgaaacagatattgtcgctggctttaaaaatatggaaaaagtggggattattcctgatcgcgcacaggcgatccagtttgcgattgaaagtgcggtagaaaatgacgtgattttaattgctggaaaggggcacgagcattatcaaattattggttcggaagttgtgcatttttccgaccaagaaattgcacttgatttcttaaaataa

SEQ ID NO: 22234 - DNA, 1374 bp, Haemophilus influenzae
atgattaaactctctactgtacaacttgcacagattcttcaagctaaattaattggcgatgaaaatgtgcaagttgaaaaaattaatacggatactcgaaaaagcgtatcaaatagcttattttttgctttaaaaggcgaaaaatttgatgctcatcaatatcttgatcaagcggtgtcacagggtgcgcttgcgcttgttgttcagcaagaaaattcatccatttctgttccacaattggtggttaaggatacccgtattgccttgggtgaacttgcaaaatggttacgtgagaaaattaatccacgtactgtggcgatgaccggctcttctggtaaaaccacggtaaaagaaatgacggcaagtattttgcaacataccgcagcggattcagaagcggtactttttaccaatggtaacttcaataacgatataggtgtgcctttaactctacttcgcttaacagaaaaacatcgttttgctgtgattgaacttggtgcaaatcatcaaaatgaaatcaattacaccacaaaattagttcaacctaatgccgcattgattaataatattgcgcccgcacatttagaggggtttggttctttagcgggggttgttcaagcaaaaggcgagatttatcgaggtttaacaaaaaatggtgtggcgattatcaatgctgaacataatcacttagatatttggcaaaaagaaatcagtaatcacgccattcaatatttcaacggtaaagattattctgcaaaaaatattcatcatacttctcaaggctccacttttacacttatttccccacaaggtgaaattgagattaccttaccttaccttggtgaacataatgtaaaaaatgccttggcagcgaccgcacttgcaatgaatgtcggtgccactcttacagatgtaaaagctggattagaacaacgttcacaagtgaaagggcgtttattccccattcaagtcacgcctaatttattgctgttagatgatacttataatgcgaataaagattctctgtgtgctgcgattgatgttttaaaaggttatgatgctttccgtattttgtgtgtcggtgatatgaaagagctaggcgaaaactctctcgctattcatcgtgaagttggacaatatattaatttggtaaatttagatttagtgtgttcttatggcaatgaaagtgcggttatttctgaggctgtttcgggtaagcattttacggataaaactgaaatggtggatttcttagttccacttattgaaaaccaattacaacaaaataaaaaagttgtggtgctaggaaaaggctcacgctcaatgaaaatggaagatgtgatctattcattaaaggataaaattaaatgttag

SEQ ID NO: 22235 - DNA, 1083 bp, Haemophilus influenzae
atgttagtctggcttgctgaatatcttgttcgttacgaaaccgcgtttaatgctatttcttatattacagtccgcgcaaatcttgcattattaaccgcactttttatctcactttggattggccctaaagtgatcaaacgcttgcagatcttaaaatttggccaagaagtgcgaaatgatggccctgaaagtcactttgcaaaaaaaggcacacccactatgggtggtgtgatgattttattctctattggcgtaagtacgttattatgggcaaatcttgctaatccgtatatttgggtttgtttatttgttttatttggatacggcgcaattggttttgtggatgatttccgtaaaattacccgtaaaaatactgatggattgattgctcgttggaaatatttctggatgtctgtggtggcattagtggcaatcctttggctttattggcttggtcacgacactgatgccacccgtttagtgattccattctttaaagacattatgcctcaattaggtttgttctatattgtgttatcttactttgtgattgttggcacgggtaatgcagtgaatttaaccgacggtttagatggattagcgattatgcctactgcgcttgttgcaggtgcgtttgctttaattgcttgggctacaggtaacgtgaatttcgcagaatatttgcacattccgtatattaaatacagttctgaagtagtggtgttctgtacagctattgttggcgcgagtttgggattcttatggtttaatacttatccagctcaagtatttatgggggacgtgggttctctagcattaggtggtgcgctgggtgttgtagcaattcttgttcgtcaggaatttttgcttgtgataatgggtggtgtatttgttgttgaagcactctctgttattttgcaagtagggtcttataagttacgcaaacaacgcatttttagaatggcaccgattcaccaccattttgaattgaagggatggcctgagccaagagtgattattcggttttggattatttccttaatgctggtgttgatgggattggtcaccttgaagttgcgttaa

SEQ ID NO: 22236 - DNA, 1314 bp, Haemophilus influenzae
atgaacgcctatcaaaacaaaaatattactatcatcgggcttggcaaaacaggtctttcttgtgtggattatctcttatcccaacaggctaatattcgtgtgattgatactcgaaaaaatcctactggtattgataaacttcctcaaaatatccctcttcatactggtagtttaaatcaggaatggttacttgaaagcgatatgattgttattagcccagggcttgcggtaaaaacaccagaaattcaaaccgcacttaaagcgggagtggaagtaatcggcgatattgaattattctgccgcgcagcgacaaagccaattgtggggattacaggttcaaatggtaaaagtaccgtaactactttagtttatgaaatggcgaaagctgctggtgtgaaagttggtatgggcggaaatattgggattcccgctttgtcattgttgaatgaagattgtgaactttatgtactagagctttctagttttcagcttgagacaacttatagcttaaaagctgcggcagcgactgtcttgaacgtgactgaagatcatatggatcgctatatggatttagaagattatcgccaagcaaaattacgcatttatcataatgctaaagtaggtgtgttgaacaatgaagataggctgacttttggggaaaacgaaaatcaagcgaaacataccgtttcttttgcggaaaatagtgcggattattggctaaaaactgaaaatggcaagcaatatttaatggtaaaagatgaagtgattttaccttgtgaagaagctacattggttggtcgccataattatatgaacattttggcagcaacagcattggcacaagctataggtattaatttagattcaattcgtaccgcacttcgtcatttcaaagggttagatcatcgttttcaattagtgcatcaagctaatggcattcgttggattaatgactctaaagcaacaaatgtggggagtacagttgctgcattggctgggctttatattgagggtaaattgcatttgttgctaggcggagacggaaaaggggctgatttttcagaattagctgaattaattaatcaaccacacattatttgttattgttttggtcgagatggtgcgctgcttgcaaaattttcatcgcaaagttatttgttcgatacaatggaacaagcgatagaatttttacgcccaacattgcaaagcggagatatggtattattgtcgcctgcttgtgcaagtctcgatcagtttgcttcttttgaaaagcgcggcgaagaatttacgcatttagctcaatgtttaacctaa

SEQ ID NO: 22237 - DNA, 1185 bp, Haemophilus influenzae
atggaatttttacaaaatatcaaaaaaaattacgatgaatggacacgcatcacacctcaaggtttgttgtatgatcgcgcactattttggttatttgttattttgcttttaattggtttagtggcagtaacatctgcttctattccttatagctctcgtttatttaatgatcctttttactttgcaaaacgcgacgctatttatgtgctactttctttactcacttgttatatttcattacaaatttcttcttcgcaatgggaaaaatggcacgctaaaatttttttattttctgtcatattattattgcttgtcccttttatcggtacatcggttaatggcgcaaaacgttggatttcgttgggaatcttaaactttcaacctgcagaatttgcaaaattggctttgacttgttttttagcaagttatttcactcgtcgttatgatgaagtgcggtcgcgacatgttagtatttttaaaccgtttattgttatgcttgtattgggttgttttcttttattgcaacctgatttaggtagtacagtcgtgctatttattattatgtctgggatgctttttatcgtaggggcgaaaattttacagtttgtaggattgatagcattaggtggaatcttattcgtttggctagtattgaccgcctcttatcggttaaagcgatttataggttttttagaaccctttaaagaaccttatggcactggtttccaattaacaaactctcttatagcatttgggcggggagaaattactggcgaaggattaggtaattcaattcaaaaattagactatctgcctgaagcacataccgatttcattatggcgattatcggcgaagaatttggatttatcggtatattgattgttattcttttattaggtttattaatttttcgtgcaatgaaaattggacgagaatccttaatgttagaacaacgttttcgaggtttttttgcattaggtattggtttttggattttctttcaaggctttgtgaatttaggtatggctcttggaatgctaccaactaaaggtttaacctttccactcgtgagttatggtggttcgagtattatcattatgtccgccactattggtattttattgcgaattgatcacgaaaatcgtttatttcgtataggtcaagcacgcttgcgtgatgattag

SEQ ID NO: 22238 - DNA, 1056 bp, Haemophilus influenzae
atgaaaaataaaaaattattagtgatggcgggtggtactggcggtcatgtttttcctgccattgcagttgctcaaactttacaaaaacaagaatgggatatttgctggttaggtacgaaagatagaatggaggctcaacttgtaccaaaatatggtattcctattcgatttattcaaatttctggtttgcgtggtaaaggtataaaagctttgttaaatgcgccttttgccatttttcgtgcggtgttgcaggcaaaaaaaattattcaagaagaaaagcctgacgctgtacttggtatgggaggctatgtttctggccccgctggcgttgcggcaaaactttgtggtgtaccaatcattttacatgaacaaaatgcgatagcgggtttaacgaataagttattaggtaaaattgcaacctgtgtattacaggcatttccaactgcttttcctcatgctgaagtagtaggaaacccagttcgagaagatttatttgagatgccaaatcctgatattcgtttttcggatcgtgaggaaaaattacgtgtcttagtggttggtggtagtcaaggagcgagagtgcttaatcatactttacctaaagtagtcgcccagcttgcagataaattagagtttcgtcatcaagtaggtaaaggtgcggtagaagaagtcagccaactttatggcgagaatttagaacaagttaaaataacagaatttattgataatatggcagaggcttatgcttgggctgatgtggttatttgccgttctggcgcattaaccgtatgtgaaattgcagcagtgggagccgcagcaatttttgtaccattccaacataaagatcgccaacaatatttaaatgcgaaatatttatcagatgttggcgcggcgaaaattatagaacaggcagatttaacgcctgaaattctagtgaattatttaaaaaatttaactcgtgaaaatttattgcagatggcattgaaagcgaaaacaatgtcgatgcctaatgcggcacaacgtgtagctgaagtaattaaacaatattcaaactag

SEQ ID NO: 22239 - DNA, 1428 bp, Haemophilus influenzae
atgaaacattcccacgaagaaattagaaaaattatccctgaaatgcgccgtgtacagcaaattcatttcattggcattggtggtgcgggaatgagcggcattgcagaaattttattaaatgaaggttatcaaatttcaggttcagatattgccgatggcgtagtcactcaacgtttagctcaagctggggcaaaaatctacattggtcatgcagaagaacatattgaaggtgccagtgttgttgttgtgtctagtgcgataaaagatgataaccctgaattagttacatcgaaacaaaaacgcattccagtgattcaacgcgcacaaatgttggcggagattatgcgttttcgtcacggtattgctgttgcaggaacacacgggaaaacgacaacaacagcaatgatttcaatgatttacacccaagctaaacttgatccgacttttgtaaatggcggtttagtgaaatcggcgggtaagaatgcacatttaggagcaagtcgttatttaattgccgaagccgatgaaagtgatgcgtcgtttttgcatttacagccaatggtatctgttgtaactaatatggagccagaccatatggatacttacgaaggcgattttgaaaaaatgaaagccacttatgtgaaattcctgcataatttacccttctatggtttagccgtgatgtgcgctgatgatcctgttttaatggaacttgtgccaaaagttggtcgccaagtgattacatatggttttagtgaacaggcagattatcgcattgaagattatgaacaaacaggttttcaaggtcattacacggtgatttgcccaaataatgaacgtattaatgtgttgctcaatgttcctggaaaacataatgcattaaatgcaacggctgcacttgctgtagcaaaagaagagggtattgctaacgaggcaattttagaagctctggctgattttcagggggctggtcgtcgttttgatcagctaggcgaatttattcgtccaaatggtaaagtgcgtttagttgatgattatggtcatcatccaacagaagtaggcgtaaccattaaagcggcgcgagaaggctggggagataaacgtattgtaatgattttccaaccgcatcgttattctcgcactcgtgatttgtttgatgattttgtacaagtgctttcgcaagtagacgctttgattatgcttgatgtgtacgcagcgggagaagcccctattgttggcgctgacagtaaatctctttgccgttccattcgtaatcttggtaaagttgatcctattttggtatcagatacttcgcaactaggcgatgttctcgatcaaattattcaagatggcgatttgattttggcacaaggtgctggtagcgtaagtaaaatttctcgtggcttggctgaatcttggaagaattaa

SEQ ID NO: 22240 - DNA, 921 bp, Haemophilus influenzae
atgaacttaaaacaagaaaaaatcgcggtgttattaggcggcacatctgctgaacgtgaagtttctctcaattcaggcaaagcggtattagaagcattattaaagcaaggttataatgcacatcctattgatcctaaagaatataatgttgcaaatcttaaaaaggatggctttaatcgagcatttaatattttgcacggtcgtggtggagaagatggcacaatgcaaggtttattagagcaaattggtttgccttatacgggttgtggcgtgatggcttctgcattaacgatggacaaaatgcgtacaaaaatgttgtggaaagcttttggtttacctgttgcagatatgaaagtggttacccgagaaactttttctgaattggatcctcaggctgttgtggcaaaattaggcttaccattaatggttaaaccctctttagaaggctctagcgttggcttaacgaaagtaaaagcggtagaagagttaaaaagtgcggtggaatatgcgcttaaatttgataataccattctaattgaagagtggttagctggcgatgaattaactgtgcctgtgcttgacaatcaagtattacccgcaattcgtattgttccagagggcgaattttatgattatgaagcgaagtatatttctgataatacgcaatatttctgcccagcaggtttaacgcctgaacgcgagcaagcgttatcaacattagtaaaacgtgcttatgatgcagtgggatgtcgtggttggagtcgtattgatgtaatgtgtgatgcaaaaggtaatttccgtttggttgaggttaatactaatcctggaatgacgagccatagtttattcccaaaatctgcagcgacagtaggtatttcttttgagcaactcgtcgtgaaaattttggagctgagcctgtaa

SEQ ID NO: 22241 - DNA, 765 bp, Haemophilus influenzae
atgaacattctgaaaagaaaaacgccacagaatattcgttttggagaacaaaagcctaaatattattttcatattcgggcttttgcggtattgcttggtgtcttttttttacttggtgtttattttaattggcaaagcattttagaaaaaatggatgataagccgattagcgcatttgcacttgttggacaaaatacctttactactgctgatgatattaaagaaagcctattaaaaatgggcgaattaaaaggattttgggggcaagatgtggcaccgattcaagagcaaattgaggctttaccttgggttaaaggtgcaatagtaagaaaaatgtggccaaatcgtttaagtatttgggtatcagaatatcaacccgttgcgttttggaatcaaaatcaatttgttacccttgatggtatcgtttttcagcttccctctgtacgtttaactgcaaaaaatttgccctatttgggtgggcccgattatcagagtttgaaagtaattgagacgtggaaccaaatttatattaatttaaaatcaaataatataatggcaaagggaattaatattgatgatcgcggtgcgtggcaggtccagcttgataatgatattgtgctaaaattaggtcgtggcgattggaaatcaaaacttgagcgatttgtcacaatttatccgcaaattgatgtgccagaaaacaaaaaaatagattatatagatttaagatatacggcaggtgcagctgtaggtatggttgatagataa

SEQ ID NO: 22242 - DNA, 1278 bp, Haemophilus influenzae
atggttaaaggtgtggaaacaaaaacaatagtaggtttagaggttggcacgtcaaaagtggtcgttgtagttggcgaagtatttcctgatggtgtagtgaatgtgcttggtgtaggcagttgtccttcaaaagggattgatcgtggcagcatcactgatcttgatgccgtggtgggttcgattcaacgtgctattgaagcggcagaatctatggctgattgtcagattatgagtgtgactttagccattactggagagcatattcaaagcctcaatgaaagtggttttgtgccgatagcagaaagtgaagtaacacaagaggaaatcgattccgcacttcatacagcaagctcaataaaattgccagaaggcttatctttattgcatgttattccacaagaatacgctgttgatcgtcagatgaacattaaaaatccattgggattacaaggcgtgcgtttaaaagcacaagtacatttgatcgcttgtcatcaagattggcaaaataacttaaaaaaagccgttgaacgttgtggattgcaagtggataaagtggttttctctggttttgcagcaacacattctgtgctaactgaggatgaaaaagatctcggcgtgtgtttaattgattttggtgctggcacaatgaacgtgatggtttatacgaatggcgcattacgttttagcaaggtaattccttacgcaggaaatattgtgacaaatgatattgcgcacgcttgtacaatttcgcgagcagaagcagaacggatcaaagtgaactatgctagtgcattttacccagctcgtttgcacggagataaaaaaattgaagtggcaagtattggcggtcgtgcgcctcgttcattaacaaaaagtgatttatctttaattacatcagctcgttatacggagcttttaggcgtggtaaaagatgaattagataagttaaaagctgaattagaagcaaaacatattaaatttgaattaattgcaggtgtggtaataactggtggtggagcgcagattgaagatcttaaagaatgcgcttcaaatgttttccattgtcaggtgcgtattgcgagtccattaaatattactggtttgactgattacgtgaatcgtccacaatattcaacggtggtgggactattgcaatataattacagtaatagtgatgatgatttaatttcaggaagtgatgattctgaaggaactttctttgaatctatttggcaaggagtaaaaaaaattgtcaataaagtgcggtcagaattttga

SEQ ID NO: 22243 - DNA, 1266 bp, Haemophilus influenzae
atgctatacccagagtaccctgagtacgataattttaacgaatccggcgcactgatcaaagtcgtaggtgtaggcggtggcggtggcaatgccgtaaaccatatggtaatgaatatggtaaaacaagaaatgggcggaacctttgttggcgaaagttcattaacatcagaggaacacggtcgcatagtattttatgccgtcaatactgatgctcaagcattgcgtaaaagtcaagttcaacagaccgtacaaattggtggagaaacaaccaaaggtttaggtgctggggcaaatccgaatattggtcgtaaggcagctgaagatgatcaggatgaaatccgcaaaatgcttgaaggtgccgatatggtctttattgcagcaggtatgggcggcggcacaggtacgggtgcggcacctgttgttgctaaaattgctaaagaactcggtattttgactgttgctgtagtgactaaaccttttacctttgaaggcaaaaaacgtatgcaatttgcagagcttggtattaaagatttatcccaatatgttgattcaatgattattattccgaatcaacaaatccaaaaagttctccctaaaaatgctaaattaattgatgcttttgctgctgcaaacgacgtattgcgtaattctgtaatgggaatttcagatatgattacctctcctggtttaattaacgtggacttcgctgatgtaagaacggtaatgtcagttcaagggcaagctatgattggttttggttcagctgtgggagaacccggtgcaggtagagcagaagaggcagctcgtcttgcagtacgcaatgatcttctagaaaaaatcgatctttctaacgctcaaggaattttagttaatattactgctggaatggatttagtttttgaagagtttaacattataggtgagacaataggtagttttgcttctgaagaagctacagttgttgttggtacgagtttagtgcctgagatgagcgatgaaattcgtgtaactattgtggcaactggtctcggtgaaattgcaggaaatgaaccaattcaggttgttcgtcaagggctttctacgcagaatattgaaggtgaaggacgtgtaaacattgttcctgaacttcatcgtcgtgaatctgttgaagtgtcaagaactgcatcagaagaatatcaacggccgttagataaaccgattacagatcgcttggaagcatttaagaaaaataatttctttaatcctgcacagcgtgaagaaaattaa

SEQ ID NO: 22244 - DNA, 918 bp, Haemophilus influenzae
atgattaaacaaagaacattaaaacaaagtattaaagttacaggcgttggcttgcatagcggtgaaaaagtgacattaaccttgcgcccagctatgccaaacactggtgttgtttattatcgtacagatttaaaccctgcggtggcattccctgctgatcctaattcagtgcgtgatacaatgctttgtaccgcactaattaatgaacaaggtgtgcgtatttctaccgtcgagcatttaaatgcagctttggcagggcttggtattgataatattattattgaagttgatgctcctgaaattccaattatggatggtagtgctagtccgtttatctatttgttgttagatgcgggaattgaagaacaaaatgcagcgaaaaaatttattcgtattaagcaatatgttcgagttgaagatggcgataaatgggctgaatttaagccttacaatggttttcgtttagattttactattgattttgaccatcctgctattggcaaagatgtacgtaactatgaaatgaatttttctgcccaagcatttgttcatcaaattagccgagcaagaacttttggctttatgaaagatattgaatatcttcaatctcaaggtttagtattaggtggtagccttgataatgcgattgttcttgatgattatagaattttaaatgaagatggtttacgttttaaagatgaacttgttcgtcataaaatgttagatgcaattggtgatctttatatggctggttataacattatcggtgattttaaagcctataaatcaggtcacggtttaaataacaagttacttcgtgctgttttagcaaatcaagaagcgtgggaatttgtaacctttgaagataaagcgcaagtgccacaagggtatgtagctccagtgcaagtgcttatttaa

SEQ ID NO: 22245 - DNA, 870 bp, Haemophilus influenzae
gtggggaaacttatggaaattatcattattagtggacgttctggcgcaggaaaatctgtagccttacgagcattagaagatgccggatattattgtgttgataatattcctctggatttacttcctcaattgactgatattctatctcaatcccaatcatctgtcgccatcagtcttgatattcgtaatattccaaactccgctcattctcttaagcaaaccctttcaacattacaaaagcatcatcagattaaaatcattttcttagaggctgatcgtgccaccctgattcgccgatatagcgattcacgccgtttgcacccgctttcattaaaagatttatctcttgaagccgcaattgatgaagaatatcgctatcttgaaccattgattcaacacgcaaatcttattcttgataccacccatctttctacgcatagtcttgcagagcgattacgcgaatttttacgcggtaatagtgaaaaagaattaaaaattattgttgaatcttttggttttaaatatgggattcctttagatgcggattatgttttcgatgtacgatttttacctaacccccattgggatccaacattacgcccaatgactggattagaagcccctgtcgcagaatttctaaatagtcatacagaagtcaatgaatttatttatctcactcgtcattacattgatacttggttgccgatgttagaaaaaaataaccgtagctatttgacgattgccatcggatgtactgggggaaaacatcgctccgtttatattgcccagcaattaggcgaatattttcaagccaaaggaaaaacggtgaaaattcaacataaatctttagaacggaacaaaaaaatataa

SEQ ID NO: 22246 - DNA, 537 bp, Haemophilus influenzae
atggcaaaacgtaagaaaaaagaagttttcgattgggaagatgaagatcaagaagaaattatttgggtgagtaaaagcgaaatcaaacgcgatgcggaagatttaaaacaacttggcgaaaagattgtcaatttaaccaaagctaatcttgccaaaatcccacttgatgaatccttacttgatgccattgaacttgcacagcgtttacaaaaagaagctcgccgccgtcaattacagtatatcggcaaattatttcgaggaattgatgttgagcccattcgtgaagccttagataaaattgaaaataagcataaccaacaacaagctatgctacataaaatcgaaaaagtgcgggatgaattggtggaaaaaggcgatgtggctttaacagatttattaaatgattatcctaatggcgatcgtcagcaactacgcaatctgattcgttctgcacaaaaagaactggagcaaaataaaccatcgaaagcctatcgagaaatttatcaaatgctcaaggtattaatgttggaagattaa

SEQ ID NO: 22247 - DNA, 468 bp, Haemophilus influenzae
atgaactacctccaatactacccgaccgatgttatcaatggcgaaggtacaagatgcacacttttcgtcagtggctgtacgcacgcttgcaaaggttgctacaaccaaaaaagttggtcattttcagcgggtgtattatttgatgacgtaatggaacaacaaatcatcaatgatttaaaagacacacgcattaaacgccaaggtctgacgctttcaggtggcgatccacttcatcccctcaacgtagaaacattattgccctttgtgcaacgtgtaaaacgagaatgtcccgataaagacatctgggtttggacgggttataagctagatgaattagacaaacaacaacgtgcaatgttgccttatattgatgtgttaattgatgggaaatttattcaagaacaggcagacccaagtttagtttggcgaggttccgcaaaccaaattattcatcgatttaagttataa

SEQ ID NO: 22248 - DNA, 567 bp, Haemophilus influenzae
atgtatcctctatttgaaaccctttgtattgaaaacgggaaaattcaaaatatcaatttacaccaagtgcgatatgaacgtagtttgcgtgaatattatggtaaaagtgcggtgaaaatttttaatcttttttcactcattcaacttccaacgcctttacaaaatcaattaattcgctgccgcattgattacaatgccgaaaccacacaaattcaatattttgaataccaacgaaaaatctaccgcacttttcaacctgtaatttgtgatgacattgaatatagtttgaaatattcagatcgcagtttaattaatacattatttgctcaacgtggtgcttgtgatgaaattatgattatcaaaaatggaaaagtgacagattgttccatcggtaatttaatttttcgccaaggaaaaaaatggtacacgccagacacgccattgcttttaggcacacaacgagaaaaattattacaagaagggaaaattcaagaacgcacaatattccaagaagatattgtcaattttgacgaaattaaaatcattaacgcaatgaatggcttataa

SEQ ID NO: 22249 - DNA, 1155 bp, Haemophilus influenzae
atgtctagttatttatttacatctgaatcagtctctgaagggcatccagataaaattgccgatcaaatttctgatgcggtacttgatgaaatcctaaaacaagatccaaaagcacgagtagcttgtgaaacttacgtaaaaactggtatggcattggttggtggtgaaattacaacatcagcatgggttgatattgagaatttaacccgtaaagtgatttgtgatattggttatgaacattctgaaatgggctttgatggtcattcttgtgcagtgcttaatgcgattggtaaacaatctgcagatattaatcaaggcgttgatcgtgaaaatccattagatcaaggcgcaggcgaccaaggtattatgtttggttatgccaccaatgaaacggatgtattaatgcctgcagccattacttatgcacatcgtttaatggaaaaacaatctgaagtgcgtaaaagcggtaaattagcatggttacgcccagatgcgaaaagccaagttactttaaaatatgaagataataaaattgttggtgtggatgcggttgtgctttctactcaacattctgaagaagttagccaaaaagatttacatgaaggtgtgatggaagaaattatcaaacctgtgttaccaagtgaatggctttctaaagaaacaaaattcttcattaacccgactggtcgttttgttatcggtgggccaatgggcgattgtggtttaactggccgtaaaatcatcgtggatacttacggtggtgccgctcgtcacggtggtggcgcattctcaggaaaagaaccatctaaagttgaccgttctgcggcttatgctgcacgttatgtcgcaaaaaatattgtggcagcaggtttagcagatcgttgtgaaatccaactttcttatgcgattggtgtggctgaaccaacatctatcatggtcgaaacctttggaactggaaaagttgcgaatgaattattagtgtcattagttcgtgagttttttgatttacgtccttatggcttaattaaaatgttagatttaatccaaccaatctatcgtgaaacggcagcttatggtcatttcggtcgtgaacaattcccttgggaaaaagtggatcgcgcagaagatttacgtattgcggcaggtttaaaataa

SEQ ID NO: 22250 - DNA, 666 bp, Haemophilus influenzae
atgttttctgactttctttctttaatgtttaccgctgctctaatgactttagggcttgcggtctgttcattgctcttaggcttatttttaagccttatttttgccgtgcttgaagcaaatcgctttgttggcaagccgatgacagtatttgtggcattattacgtggcttacccgaaattattgttgtattacttgtctattttggttctactgaattagtagaaatgctgacaggagaatacattgaatttggggcatttggctgtggcgtgcttgcgctttctcttatttttgcagcttatgcttcacaaacattacgcggtgcaattcaagccataccaaaaggacaatgggaatcaggtgcagcgttaggcttaagcaaaagctatacgttcattcatattgttatgccacaagtatggcgtcacgccttacctggtttaagcacccaatggcttgtattgctaaaagatacggcattggtttcattaattggtgtggacgatttgatgcaccaagcggatctgattaataccaatacacatcagccttttacttggtatggtattgctgcgttaatttatttggcagtgacattaattagccaagttggtattcgaaaattagagctgcgttttactcgttttgaaaggggcgtgaaataa

SEQ ID NO: 22251 - DNA, 720 bp, Haemophilus influenzae
atgaaaaaaacattattaactgccattttattaggtgcatccgtagcagcaagtgcacaagaactcacttttgcaatgcaacctagctatccaccatttgaaaccacaaatgcaaaaggcgaaattatcgggtttgatgttgatgtgacaaatgcaatttgtcaagaaattcaagcaacctgtaaattcaagagcgaaacctttgatgcgttaattccaaatttaaaagcaaaacgttttgatgcagcaatttccgcaattgatattaccgatgctcgtgcaaaacaagtgttattctctgatgcgtattacgatagctctgcaagctatgttgctcttaaaggcaaagcaaccttagaaagtgcaaaaaatataggtgttcaaaatggtacaacattccaacaatataccgtagcggaaaccaagcaatatagtccaaaatcctatgcaagtttacaaaatgccattttagacttaaagagcggtcggattgacattatttttggcgataccgccgtgctcgccgatatgatttccaaagagccagaaattcaatttataggcgaaaaagtgaccaataaaaaatattttggtaatggtttaggtattgcaatgcacaaatcaaacaaagatttggctgcacaattaaacaaaggtttagctgcaattaaagcaaatggcgaataccaaaaaatctatgataaatggataacaaaataa

SEQ ID NO: 22252 - DNA, 984 bp, Haemophilus influenzae
atgacgaatgaagtaaaagaaaatacgccattattaaatgccattggcttaaaaaaatattaccctgtaaaaaaaggcttgtttgcaaaaccacagcaagtaaaagcgttggatggtgtctcttttcagcttgaacgaggtaaaactttagcagtcgtgggggaatctggttgtggaaaatcaacgctaggtcgtttattgacaatgattgaagaaccaaccaaaggcgaactttattacaaagggcataattttttagaaaatgattctgaaacaaaagcactacgtcgtaaaaaaattcaaatagtttttcaaaatccttacgcatcgttaaatccacgcaaaaagattggttcaattttggaagaaccattaatcatcaatacaaaactttccgccaaagaacgtcgagaaaaagttttatcgatgatggaaaaagtgggcttgcgcgctgaattttatgatcgttatcctcacatgttctcaggcggacaacgccaacgtattgccatcgctcgtggtttaatgttagatccagatgttgtcgttgccgatgagcctgtttctgcattggatgtttccgtgcgtgcacaagtactgaatttaatgatggatttacaagatgaattaggcttgtcttacgtgttcatttcacacgatctttctgtggtagaacatatcgctgatgaagtgatggtaatgtatctaggtcgttgtattgaaaaagggacgacagagcagattttttctaatcctcagcatccttataccaaagcgttactttcagcgacaccacgtttgtcgccaaacttgcgccgtgagcgtattaagctgacaggcgaattaccaagcccgattaatcctccaaaaggctgtgcatttaatcctcgttgttggaaagcgacagaaaaatgtcgtgaaaatcaaccgcacttggagcaacatactgatggaaaattaatcgcttgtttccatattgattaa

SEQ ID NO: 22253 - DNA, 1002 bp, Haemophilus influenzae
atgtttaaatttgtattcaaacgaatcttaatggtgatccctacttttattgccattactcttattacctttgcccttgtgcattttattcccggtgatcctgtggaaattatgatgggggaacgtggcttaacggcagaagtacatcaacaaatgatgcaccaattgggtttagatttacctctttatcagcaatatttccactatattggcaatgtaattcaaggggatttcggtgcatcgttccgcactcaacaacctgtccttactgaattttttacgcttttccctgctaccgctgaattagctttttttgcgttattttggtcattattaggtggaataattttaggcacgattgccgcagtaaaaaaagacagttggatttctcacaccgttacagctgcatcgctcacaggttattctatgccgattttctggtggggtttaattttaattttatatgtttcgccacaactcggtttgccacaaggtgggcgtttagataatgaattttggatcgatacaccaacaggatttatgcttattgatagctggctttcaggtgtttctggtgccttcgaaaatgcggtgaaatccttaattcttcctgcaatagtcctaggcacagttcctctcgccattattacgcgtatgacacgatctgcaatgctggaagtattaggcgaagattacattcgcacggcaaaagcaaaaggtttaagctatactcgaattgttattgttcacgcattgcgtaatgcgttaattcctgttgtcactgtggtcgggttaattgtagctcaattgctttctggtgcagttctcacagaaactattttctcttggccggggattggaaaatggattattgatgccattcaagcccgtgattatccagtgttgcaaggttctgtactgattattgcgacgattattattgtggtaaatttaaccgtcgatttactttacggcgtggtcaatccgcgtatccgtcattaa

SEQ ID NO: 22254 - DNA, 2184 bp, Haemophilus influenzae
atgatggatatttctgaattacttgacggactcaacgataaacaacgcgaacgcgtagctgctcctcttggtaatcacttagtgctagctggtgcaggctcgggcaaaacgcgtgtattgacgcaccgtattgcttggttaattgcggtcgaaaatatttctgaaggcagcattatggcggtgacgtttaccaataaagccgcagcagaaatgcgtcatcgtattcaatctacccttgccaaacacgcacaacatcaattatttggtatgtggattggcaccttccatagcattgctcatcgtttgttgcgagctcatcatttagatgtgggattgccacaagatttccaaattttagattcagaagatcaacttcgtttaattaaacgattattaaaattacataattttgatgaaaaagcttttccgcctaaacaggcttgttggtacatcaataacaaaaaagatgaaggcttgcgaccaaatgatattgaagattttaatgatcgccaagaacgtgaatggattaaaatttatcagatctatcaagacacttgcgatcgcgcagggttggtcgattttgctgaattattaattcgggtctatgaattatttgagaaaaaaccattaattttgcaacgttatcaacaacgttttcagcatattttggtggatgaatttcaagacaccaataaaatccaatataaatggatcaaaattcttgctggaaaaacaggccaagtcatgattgtgggcgatgatgatcaatctatatacggttggcgtggtgcacaaatagaaaatatccaaaaattcttgaaagatttcaaagccgaaacaattcgccttgaacaaaactatcgttctaccgccaatatcctaaacagcgcaaatgaattaattgcaaacaatagtgatcgtcttggtaaaaatttatggacagagggtgagaaaggcgatcctgtgggcatctattctgcctttaatgaattagatgaagcaaaatttgtcgcttcacaaattcaggattgggtagaacatggcggaaaacttgatgattgcgctgtactttatcgtagtaatagccaatcacgggttattgaagaagctttaattcgttgtcaaattccataccgtatttatggcggtatgcgtttcttcgaacgtcaagaaattaaagatgcgttagcctatcttcgtttgattaataatcgtcaagatgatgcggcttttgagcgtgtaattaatacgccaacccgtggcattggcgaccgcactttagatatattgcgtaacttaacacgcgaacgccaaattaccttatggcaagcagtacaagtcgcaacacaagaaaatatgttggcagggcgagcctcaacagccttattacgtttccaagaattaattaattcactacaacttgataccgcagaaatgccgcttttcgcacaaactgattttgtgattaaacattcgggcttatatgaaatgtatcaacaagaaaaaggcgaaaaaggcgaagtgcgtattgaaaacttggaagaattagttaccgcaacccgtgaatttatcaaacctgataatgcggaagaaatgaccgaactcactgcctttttaacgcacgcttccttagaagctggcgaagaacaagcctcgccgcatcaatcttgtgtagaaatgatgacgttgcactctgcgaaaggcttagaatttcctcgtgtatttatggtgggcgtagaagaaggattattcccaagttttcgttcttttgaagaacccggacgtttagaagaagagcgtcgtttagcttatgtcggtattactcgcgcgaagaaaaaactgaccatctcttatgcggaaagccgtcgattatatgccaaagaagaacgccatttgccatcacggtttatcgcagaattaccgagagaatgtatccaagaaattcgtttacgagggacagtcactcgtgcgatgaacctagcaaaagtcggttcattgtcgaataccagtgcggtcgaaaatgaatggaaaatgggtcaaaaagttaaacacgaaaaatttggtttcggcacagtgattaatgtggaaggttctgaaaataacacacgtttacaaatagcattccaagcgcaaggcattaaatggttgattgcgcatttggcaaaattggaaaaagtgcggtag

SEQ ID NO: 22255 - DNA, 426 bp, Haemophilus influenzae
atgtttaaaatttccaaagaatttagctttgacatggcacatttattagatggacatgatgggaaatgtcaaaatttacatggacacacatataaattacaagttgaaatttcgggtgacttatataaatcaggtgcaaaaaaagcaatggtcattgatttttcagatctaaagtctattgtgaaaaaagttattttagatccgatggatcacgcctttatttatgatcaaaccaatgagcgagaaagccaaattgccactctattgcaaaagttaaactcaaaaacttttggtgttccctttagaactacggcagaagaaatagctcgttttatttttaatcgtttaaaacatgatgaacaactgtccatatcatccattcgtttatgggaaaccccaacttcattttgcgagtatcaggagtaa

SEQ ID NO: 22256 - DNA, 1032 bp, Haemophilus influenzae
atgaaagacttagactggaataaccttggttttagttatattaaaacagattaccgcttcatcgctcactggaaagatggcaaatgggacgaaggaaaactcactacagatagcacattacatattcacgaaggttcaaccgctcttcactacggtcagcaatgttttgaaggattaaaggcttaccgttgcaaagatggttcaatcaacttattccgcccgcaagcaaatgcagagcgtatgcaacgtaccgcagaccgtcttttaatgccacgcgtaccaactgaattattcgtgcgtgcatgtaaagaagtggttaaagctaaccaagattggttgggtccttacggttctggtgcaaccttatacttacgtccattcttaattggcgtgggcgaaaatatcggcgtgaaaacggcaccagagtttattttctctgttttttgttgcccagtgggtgcttacttcaaaggtggtttggctccatcaaactttatcacgaccgattatgaccgtgctgcaccaatgggcactggtggtgtgaaagtgggtgggaactacgcagcaagcttacttccacacgaattagccgcagaacaaggtacgccagaacgtaaatttgcggatgcaatctatttagatccaaaaactcacaccaaaattgaagaagtcggtgcggcaaacttctttgggatcacaaaagacaataaattcatcacaccaaaatcagaatctattttaccaagtatcactaaatactctcttttacatatcgcaaaagagcgtttaggtatggaagctattgaaggcgatgtgtatatcgatcaactcgatcaattcgtagaagctggtgcgtgcggtacagcggcggtgattaccccagtgggcggcattcaacacaacggaaaattccacgtattcgattcagaaactgaagtaggccctgttacccgtcgtctttatgatgaattaacaggcattcaattcggtgatatcgaagcacctgaaggctggattgtgaaagtagaataa

SEQ ID NO: 22257 - DNA, 882 bp, Haemophilus influenzae
atggcgattttaattgataaaaataccaaagtgatttgccaaggttttactggtggacaagggacttttcattctgaacaagcattggcctacggaacgcaattagttggtggcgtatcgccaaataaaggtggaaccactcatcttggtttacctgtatttaatacagttcgtgaagctgtcgaaaatacgggggtaacagcgacagtcatttatgtgccagcatcattttgtaaagatgccataattgaagctattgatgcagggattcagttaattgtctgtattactgagggtattcctacattggatatgcttaaagtgaaacagaaattaaatgaaacgggcgtagtaatgattgggccaaattgcccaggtgtgattacgcctgatgaatgtaaaatcggcattatgcccgctcacatacataaaaaaggtaaagtggggattgtttctcgttctggaactttaacttatgaagcggtaaaacaaactacagatgaaggctttggacaatcgacttgtgtgggtatcgggggagatcctattccaggttctagttttattgatattcttgaaagatttcaacaagatcccgaaacagaagccattgtgatgattggcgagattggcggctctgcagaggaagaagcagcaatcttcattaaagataatgtcactaaaccagtggttgcgtatattgcgggtatcactgcgccaaaaggaaaacggatggggcatgcgggagccattattagcggcggaaaaggtactgcagtagaaaaaattgcagcgttagaagccgctggtgtgacctgtgtaaaaagcctcgctgaaattggtgaagccttgagaaagctattaaaatcatctaaaaattaa

SEQ ID NO: 22258 - DNA, 1074 bp, Haemophilus influenzae
atgaaacctagtcaaaaacaaactcaaagacaaccgcacttttccaaagattcagcaaagaaacgtgatttttcagctaaaaatgacagacgttcagtatctcgtactgctcgcatagaaacagcaaatacgaaaaaaagtgcggttaattctgacaacaaatttttatctaagccaaaagcgaaacctgttgtaagagcctcgaatcaaccgaaagcagagggcgaaaaattacagaaagttttagcgcgtgctggacaaggctctcgtcgtgaaattgaaacgatgattgccgcaggcagagtgagcgtagagggtaaaattgcgactttgggcgatcgtattgacgtacattctggcgtgaaagtgcgtattgatggtcaaatcattaatcttagccacacacaaaaagaaatttgccgtgtattaatgtattacaaacctgaaggcgaactttgtacacgtagcgacccagaagggcgcgcgaccgtgtttgatcgtttgccgcgtttaacaggctctcgttggattgcggtggggcgtttagatattaatacatcgggtttattgctttttaccactgatggcgaattagcaaatcgtttaatgcacccaagccgtgaagttgaacgtgaatattctgtgcgtgtatttggtcaagttgatgatgcgatgttagcacgtttacgtaaaggcgttcagcttgaagatggccttgccaactttaaagaaattaaatttacaggcggtgtgggtattaaccaatggtatgacgtaaccttgatggagggacgtaaccgtgaggttcgtcgtttgtgggaatcccaagggattcaagttagccgcttgattcgtattcgttatggaaatatcaaactgatgaaaggtttgcctcgtggtggctgggaagaaatggatcttgaaaacgtcaattatttacgtgaattggtgggattacctgctgagactgaaacgaaattagatgtaaaacaggctagtcgtcgtccaaaatctgggcaaattcgtaaagcggtaaaacgttattcggagatgaacaaacgttataaaaaataa

SEQ ID NO: 22259 - DNA, 2136 bp, Haemophilus influenzae
atgtctcgcacgattattcttatccctgtaagtacaggcgtgggtttaactagcattagtcttggattaatccactctctcgaacaaaaaggcacaaaagttgcttttatgaaaccagtttctcaaccaagcactggcgaagataaattggatcgcacaacttctattattcgcactagcactagccttgaaactgccgaaccttttatgttaagcgtggcagaatcattaattggtcaaaatcagtctgacgtattgttagaaaaaattgtagctaaccaccaacaattaaccaaaaataatgacatcgttgtagttgaaggcttaatacctacaagaaaacacggttacgcaaacagtatcaactatgaaattgcacaagcattagatgcggaaattgtattagttgcagcacctgcaactgaaacgccaaccgaattaaaagatcgcgtagaagctgcagcctctctatttggtggtaaaaacaatccaaatcttttaggtgttgttgtaaacaaattcaatgcacctgttgatgaatcaggtcgtactcgtccagatcttgctgaaatttttgattcattccaacacaatcatattagcgaaacagaagtaaacaagttatttgcaggtagtgccatcaagttattagcttgtgtgccttggaatgcaaatttaatcgcgacacgagcaatcgacttagtcaaacatttaggtgcatcaatcattaatgaaggagaaatcaatcgccgtattcgtggtatcactttctgtgcaagaagtttaccaaatatggtagaacatttccgtgcaggcagcttattagtcgcttcagcagatcgtccagatgtgcttgtagcagccgctcttgcagcatcaaatggtattgaaatcggcggtattttattaacaggcggctacaaaattgatgctcaaattaataaactttgccgtccaacttttgaaaaagcgaaattaccgatcttccgtattgaaggcaatacttggcaaactgcattaagtttacaaagttttaatcttgaagtgcctgttgatgacaaagaacgtattgaaaatattaaacaatacattagccagcactttaatgctgactttatcaataatttagttgcagattccagccgtttacctcgcttatccccacctgcattccgtttccaattaactgaacttgctcgtgcggcgaaaaaacgtattgtgcttcctgaaggcgatgaacctcgtacaatcaaagcagccgtactttgtgcagaacgtggcattgcggaatgtgtgcttttagcagatcctgcatccgttcaacgagttgcagaagcacaaggtgttaaattaggtaaaggcattacaatcatcaatcctgctgacgttcgtgaaaactatgttgatcgtttagttgaattacgtaaagcaaaaggtatgaccgaaactgcggctcgtgaacaattagaagacaccgtagtacttggtaccatgatgttagaagcaaatgaagtagatggtttagtatctggcgctgtccacaccactgcaaacaccattcgcccaccaatgcaaatcatcaaaactgcaccaggtagttctattgtttcttcgatcttctttatgttattaccagatcaagtgcttgtttatggtgactgtgcggtaaacccagatccaactgcagaacaacttgctgaaattgcaattcaatctgcggattctgctaaagcatttggtattgatccaaaagtcgcgatgatttcttactcaacaggtacatctggtagcggtgctgatgtagaaaaagtgaaagaagcaactcgtattgcgaaagaaaaacgccctgatttattaatcgatggcccattacaatacgatgcggcagtgatggaagatgtggctcgctctaaagcaccaaattcaccagtagcaggtaaggcaacggtatttgtattccctgacttaaatacgggtaacacgacttacaaagcagtacaacgttctgcagatttagtgtctattggcccaatgcttcaaggtatgcgcaaaccagtcaatgacttatctcgtggtgccttagttgatgatattgtgtacacaattgccttaaccgcaattcaagcaacacaataa

SEQ ID NO: 22260 - DNA, 444 bp, Haemophilus influenzae
atggcatttttttccatttttaaacaggggcaaatttatcttaatacttggccgctggaggcgaagttaggcattattttccctgaaaaccgtattatgaaagccacgagttttgcacaaaaatttatgccttttgttgctgtgtttgcaattctatggcagcagttttatgcaaaaaatgatttgatggcattttctatcgcaattttgaccgcactttttgccttgcttattccttttcaaggtctttattggcttggtaagcgtgccaatacgccgttagaaaatcaaagtgcggtatggttttatgatatttgcgaacgtttaaaacaactacatgaacccttgccttttgtgcaagaaaaaccgacataccaacatttagcggaagtcttaaagaaagctcaaagtaaattggaacgtgctttttggcaggaaatttag

SEQ ID NO: 22261 - DNA, 891 bp, Haemophilus influenzae
atgaatattctattaacgggaggaacaggacttatcggcaaagcacttgtcgaacgactctgtttacgcaatgaacaagtgacgatcttaacgcgctcaagttcgccgcacactctctcaaagcacaaaaacatcaaatttattaccgcactttcccaacttaattcacaagaacagtttgatgccatcatcaatcttgctggcgagccaatttttcataaagtttggtcgaaaaaccagaaatctattttacgagaaagtcgtttaagcctcaccactcaactggttgaattcattaatcaatatcagcaacacccaatttttatatcaggttcagcaacaggaatttacggcgatcaagacgaacaaaaaattaccgaaacaagcaaaacagcaaaaaccttcactgcacaattatgccaagattgggaaaatattgcgcaacaagctaatgggagggtttgtttgattagaacaggcatggtcttttctacaaaaggtggcgcacttgctaaaatattgcctttctacaaatggggacttggcggtaaactgggcaagggagagcaatatttcccttggattgctttggaagatatggtaaacggcattttatttttactcgatcattcagaatgcagaggagcgtttaacttcgctgcccccaagtctataaaacagcataaatttaaccgcactttagctcaactattaaaacgtcctgcctttgcaaccattccaaaatggctattacattttattcttggcgagcgagcaaatctattactcgaaagtcaaaatgttgtacctgaaaaattacttaacgctggattccaatttcaatatgctgattgcgaaaactatctagaagacatcctaaaaaacaaataa

SEQ ID NO: 22262 - DNA, 1509 bp, Haemophilus influenzae
atgtcagaacaagaagttaaagaattagatctcaatggcgaaatgctcgtccgtcgtgaaaaattagccgcattacgtgcaaaaggtaatgcctttccaaataagtttcgtcgtgatgctctcgcacaagatttgcacaatcaatatgatgcagaagacggggaaatcttaaaagaaaaaggcattgaagtacaagttgctggtcgtattatgactcgccgtgcaatgggtaaagcaacttttatcactattcaagatatgagcggtaaaatccaactttatgttgcacgcgataatttgcctgaaggtgtttataaagatgacgttggtacttgggatttaggtgatatcgttggcattaaaggcactttatttaaaacaaaaactgatgaactcaccgttaaaactacggaagttcaacttttaaccaaagcacttcgcccattaccagacaaattccatggtttaaccgaccaagaagttcgttatcgccaacgttatttagatttaatttctaacgaagaatctcgccgcacttttattattcgttctaaagttgtcgcgggtattcgtgaatatttcatttctaaaggctttatggaagtggaaacgccaatgttacaagtgattccaggcggtgcatctgcgcgtcctttcgtgactcatcacaatgcattagatgtggatatgtatttacgtatcgcacctgaactttatttaaaacgcttagtcgttggtgggtttgaacgagtatttgaattaaaccgtaacttccgtaatgaaggggtttctgttcgtcataatccagaatttactatgcttgaatactatcaagcatatgcggactaccatgatttaatggataacaccgaagaacttcttcgtaaattagcgattgatattcttggtacaaccattgtgaaatacggtgatttagaatttgacttcggcaaaccatttgagcgtattacattacatgatgcaaccattaaatatggtgcagataaaggtatcgtaaaagaagatctttatgacttcgatcgtgcaaaagcaactgctgaacgcttaggtattgaagtacaaaaatcttggggtttaggcagcattgtcaatgcaatctttgaagaagtggctgaacatcacttaattcaaccaacctttcttaatggctcacctgcggaaatttcgccacttgcacgtcgtaatgatgaaaaccctgaagtgactgaccgttttgaattattcatcggcggacgtgaaattggtaacggtttctcagaattaaatgacgcggaagatcaaaatgaacgctttgatgcacaagtggctgcgaaagaagcgggcgatgatgaagcgatgtttaaagatgaagactttgttgttgcactagaacacggcttaccaccaacagctggggaaggtttaggtatcgaccgtctagcgatgctttatgcaaatgcaccgtcaattcgtgatgttatcttattccctgcaatgcgtcagaaataa

SEQ ID NO: 22263 - DNA, 690 bp, Haemophilus influenzae
atgaagaaaatttttaccgcacttttgtgcgtggctgcggctaatgcaatggcagatgatgcggcaattaaacgcaaattacagtcttttaatatatcaaatattgttattaaatcttcgccgatttcaggcattaaaacggctgttacggatcaaggtatactctatgtgagcgaagatggaaaatatctttttgaaggtaaactttatgaactcacaaataatggccctgttgatgtcgcaggtaaaattttagtggataaacttaattcttataaagacgagatgattgtttatcctgcgaaaaatgaaaaacacgtagtaacagtatttatggatattacctgtcattattgccatttgttacatcagcaattaaaagaatataatgatcttggcattaccgtacgttatttagctttccctcgtgcaggtatgaataatcaaacggcgaaacaaatggaagcgatttggacggcgaaagatcccgtttttgctttaaatgaagcagaaaaaggcaatttaccaaaagaagttaaaacgccaaatatcgtgaaaaaacattatgaattaggtattcaatttggtgtacgaggaacaccaagtattgttacctcaactggtgagcttattggcggttatttaaaacccgctgatttattaagagcacttgaagaaacggcacaataa

SEQ ID NO: 22264 - DNA, 1728 bp, Haemophilus influenzae
gtgaaaaaacttatcaaacgccgtgaaattccaattggaaattctgtttcaaaccatcccttattagatcgactttatcgcgctcgtcatattcaaaacaccaaagaattagaccgcactttgaaatcaatgctcaatccaaatcagttatatggcattgagcaagcggtaaatttattagtggaagcctatcaaccacagcaaaaaattgtgattgttggggattttgatgctgacggtgcaaccagcacagcattgagtgtgctggctttaagacaacttggcttttctgatgtggattaccttgtgccaaatcgatttgaacaaggttatggtttgagtattcccgtggctgaaatggcaattgaaaagggcgttcagcttttaatgacggtggataacggcgtttcatcttttgacggtgtggcatttttgaaagaaaaaggcattcgagttttagttacggatcatcatttaccgcccgaaactttgccgccagccgatgcgattgttaatcctaatttaagtcagtgtggttttccttcaaaatccttagcgggcgttggtgtggcgttttatttgatgttagccgtacgagcaaaatttcgtgaactcggtatttttacggcagaaacacaacctaattttactgatttgctcgatctggtggcactaggcactatagctgatgttgttcctttggatcaaaataatcgtatccttgcttatcaaggtttaatgcgtatccgtgctagacactgccgtcttggtattattgcgttggcagaagtggctaaccgtaatgtagagcagtttacttcaagtgatctcggtttttgtattggaccgcgtttaaatgcggcagggcgtttagataatatgtcgattggggtagaacttttgctggcgaacgaaatgtcaaaagccagagaattagctttagatctcgatcagcttaaccaaactcgtaaagaaattgaagcaggtatgaagcttgaggcaataaaaatttgtcaaaatcttaccgcactttttaaagagttaccctatggtattacgctttatcaaccagattggcatcagggcgtattaggcattgtgtcatcaaggattaaggatcaatatcatcgtccagtgattgcctttgcacaagatagtgagggaattttgaaaggttccgcgcgttctattgaaggtttacatatgcgtgatgttctggagcgtattcattcgcaacatcctaatatgattttaaaatttggcggacacgcaatggcggcaggcttgagtattcgcgaagaacattttgcggatttccaacatatttttaatcaaaccgttgccgattggcttgatgaagaacatctacaaggcgtaatttggacagatggcgaactgaattcaaatgaatttaatcttgaaacggcagagctgataaaatcggtaggcacttgggggcaagggtttcctgagccttgctttgatggcgaatttaaaattttagaccagcgcgcaattgggcaaaataaaaatcatctaaaaatgttgctagagccgaaacaaggcggggttttattagatgcgattgcatttaatattaatacaagattgtatcctgatctttcaattaaacaggctcgtttagcctataaattagagattaacgaatttcgtggcaatcgtagcctacaattattggtagattatattgagccgatagatgagtga

SEQ ID NO: 22265 - DNA, 690 bp, Haemophilus influenzae
atgaaaatcggaattgttggtgcaatggcacaagaagtcgaaattttaaaaaatttaatggctgatagaacggaaactcgagtagcaagtgcggtcatttttgaaggtaaaattaacggtaaagatgttgcattattgcaatcaggcattggaaaagtggcagctgccattggcacgacggcgttattgcaattagccaaaccagattgtgtgatcaatactggttctgcaggaggggtagcaaaaggcttaaaagtgggggatattgtgatttctgatgaaacacgctatcacgatgcggatgtgaccgcttttggctatgaaaaagggcagttgcctgctaatcctgcggcatttttatcggacaaaaaattagcagatctcgctcaagaaattgcagaaaagcaaggacaatcagtaaaacgtggtttaatttgctctggcgatagttttattaatagtgaagacaaaattgcacaaataaaagcagacttcccgaatgtgacgggggttgaaatggaagccacagcgattgcacaagtttgctatgcgtttaatgtgccttttgtggtggttcgagcaatttctgatgggggcgatggcaaagcaagtatgtcttttgaagagtttttaccattagcggcgaagcagtcttcggcattagtgttagggatgattgatagactgtag

SEQ ID NO: 22266 - DNA, 696 bp, Haemophilus influenzae
  misc_feature (652)..(652): n=g, a, t or c
atgattattactgttgatggccctagtggtgctgggaaaggaacgctttgttatgcgttggctgaaaagttgggctatgcattgttggatagtggggcgatttatcgcgttactgcattggcagcgttgcaacgtaaaactgatctaacaaatgaaacagatttagcagaattagctcgtcatttagatattcaatttattcctcaaaatggcgaggtaagcattttgcttgcaggaatggatgtgagccgtttaattcgcacgcaagaagtggcagatgctgcgtcaaaagtagcagtctttcaaaaagtgcggtcagctttattacaacttcagcaagattttgcaaaaaatgatggattaattgcggatggcagagatatggggactgtggtattcccaaatgcacaagtaaaattatttttagatgcaagtgctgaagaacgtgcaaaaagacgctataaacagttgcaaaataaaggaataaatggtaactttgcacagattttagccgagataaaagagcgtgattttcgtgatagaaatcgtgaagttgcgccgctaaaaccagcagatgatgctttattattggatagtacaaccttgagtatcgatgaagttattgatcaggcgttagcttatattcaaaganaaggtatcagtttccgatttaactgtttgttcaaggaagaataa

SEQ ID NO: 22267 - DNA, 1650 bp, Haemophilus influenzae
  misc_feature (338)..(338): n=g, a, t or c
  misc_feature (576)..(576): n=g, a, t or c
atgtcagaatcttttgctcaactttttgaagaatcattaaaagtccttgaaactcgtcaaggttcaatcgttagcggtactgtagtagctatccaaaaaggctttgtgcttgttgatgcaggtttaaaatctgagtctgcaattccagttgctgaattcttaaatgcacaaggcgaacttgaaatccaagttggcgatactgtaaatgttgcattagatgcagttgaagatggtttcggtgaaactaaactttctcgtgagaaagcggttcgtcacgaatcttggattgaattagaaaaagcttacgaagaaaaagcgaccgttatcggtttaatcancggcaaagtgaaaggtggcttcacagttgagttaaacggtgttcgtgcattcttaccaggttctttagttgatactcgtccagcgcgtgaagcagatcacttacttggtaaagaattagaattcaaagtaatcaaattagatcaaaaacgtaacaacgttgttgtttctcgtcgtgcagtaattgaatctgaaaacagccaagaacgtgaacaagtattagaaaatcttgtggaaggntcagaagttaaaggtgtcgttaaaaacttaactgagtacggtgcattcgttgatcttggtggtgttgatggtttattacacatcacagatatggcttggaaacgtgttaaacacccaagtgaaatcgtaaatgttggcgatgaagttactgttaaagtattaaaattcgataaagatcgtactcgtgtatctttaggcttaaaacaattaggtcaagatccatgggcagcaattgctgaaaatcatccagtaaacagcaaattaacaggtaaagtaactaacttaactgactatggctgtttcgttgaaatcttagatggcgttgaaggtttagttcacgtttctgaaatggattggactaataaaaatatccacccatctaaagtggttagcttaggcgatactgtagaagtaatggtattagaaattgatgaagaacgtcgtcgtatttctttaggcttaaaacaatgtaaagctaacccttggactcagtttgctgatactcacaacaaaggcgataaagtaacgggtaaaatcaagtctatcactgatttcggtatcttcatcggtcttgaaggtggtatcgatggtttagttcacttatctgatatttcttggagtatttcaggcgaagaagctgttcgtcaatacaaaaaaggtgacgaagtttcagctgttgtattagctgttgatgcagtaaaagaacgtatctctttaggtattaaacaacttgaagaagatccattcaataactttgtcgcaatcaacaaaaaaggtgcggtagtatctgcaactgttgttgaagcagatgctaaaggtgctaaagttgaattagcaggtggtgttgaaggttatatccgttctgctgatttaacaagtgaagtagctgttggtgatgtcgttgaagcgaaatacactggagtagatcgtaaatctcgcattgttcacttatcagtgaaagcaaaagatcaagctgaagaagctgcggcagttgcaagtgtaaataacaaacaagaagatattgttattccaaatgcaatggctgaagcatttaaagcagctaaaggtgaataa

SEQ ID NO: 22268 - DNA, 627 bp, Haemophilus influenzae
atgaaactggttgaagtaaaacatccacttgtaaaacacaaactaggtgtgatgcgtgaagctgagattgatacaaaaaaattccgtgaacttgcaacagaaatcggtagcctattaacctatgaagcaacctctgatttagaaactgaaaaagtaacgatcaacggttggaatgggccagtagaaatcgatcgaattaaaggtaaaaaagtaacggttgtgccaattttgcgtgcaggtttaggaatgatggatggtgtacttgaacacgtaccaagcgcacgcatcagcgtagtggggatctaccgtaatgaagaaacccttgaaccagttccttacttccaaaaattagctagcgatttagaagagcgactttcaattgttgtcgatccgatgcttgcaacgggcggctctatgattgccacccttgatcttttaaaagcaaaaggttgtaaacatatcaaagtattagtgttagtcgctgcaccagaaggaattaaagctcttgaggctgcacaccctgacattgaactttactgcgcttctattgatagccatttaaatgaacaaggttacattattcccggtcttggtgacgcgggcgataaaatttttgggacaaaataa

SEQ ID NO: 22269 - DNA, 2067 bp, Haemophilus influenzae
atgagctatcaagtcttagccagaaaatggcgaccaaaaacatttgctgatgtcgttgggcaagaacatattatcacggcattagcaaatggattaaaagataatcgactacatcacgcttacctcttttcaggcacgcgtggtgtaggaaaaacctctattgctagattattcgcaaaaggattaaattgtgttcacggtgtaacggcaacgccttgtggcgaatgtgaaaattgtaaagctattgagcaaggcaattttattgatttaattgaaattgatgcggcgtctcgcacaaaagttgaagacacgcgtgaattattggataacgtgcaatataaaccagttgtgggcagatttaaggtttacttaatcgatgaagtccatatgctatctcgtcattcatttaatgcgttgctcaagactttagaagaaccgcccgaatatgtaaaatttttactcgcaacaacggatccacaaaaactacctgtaactattctttctcgctgtttacaatttcatcttaaagcattagatgaaactcaaatctcccagcatcttgcccatattttgacgcaagaaaatattccttttgaagatcctgcattagttaaacttgcaaaagcggcgcaaggaagtattcgtgatagcttaagtttaacggatcaagccattgcaatgggcgaccgacaagttacaaataatgttgtaagcaatatgttagggttgcttgatgataactattctgttgatattttatacgccttacatcaaggcaatggcgaactcttaatgcgaacactacaaagagttgctgatgcggcaggcgattgggataaattacttggcgaatgtgcagaaaaattacatcaaattgcgcttatgcaacttcttccacaaaaatcttcagataacaatgaacatttttcatttttagccaaacatatctctccagaaaatgttcagtttttttatcaagtcattgtttctggtagaaaagatttatcaaatgcaccaaatcgtcgtattggtgcagagatgacattattgagggcattggcattccacccaaagttccttacggcagtaccaaaggctaacaccactattactccaccgccatcaacgccaagtgcggttgaaaatacgggtaattatgtcgatgtgccagtactgtcgcaaagtatcaaatctgcttattctcaagcaaaaccaaataaaacgagcattccaaatttggcaagcctttcggctttagatgcgcttgaacatttaacacaactggaaaaccaagaacgtcaagaacacaaagctgaatcattagctgtagtaagtgaaaccttacatcacatccaagaactagacgaagaaaaatctcataaaaaaatgaccgcacttcccgtgcgagaaatgactgagccgaagcccaagcacatagaaaagccaacattaccatcaaatgccgcacaggctccacaaaaaaatagcacagaagaaaattcaagtgatgataatgtagaaattgctcaagatgagcaagaaatcttgagtgctgacacctatcgttgggaatggagcaatccagaacttgctaaagccgatacaggcgtttgtccttctgatataaaacaggcgattttaaaagatattacgcctgaattacgtttaaaaatcattacccaaactcaacaacaagatcagtgggcagatatagttgagcgttctggcttaacaggatttagcaaagaattagcattaaattgtttcttacaaagcaaaaccgatgatgaaatcaatcttggactacattcagaaaaatcccatttacgccaagacagaagtataaaaaatttagctgaagcattaagcaaattacaaggtaaagatattcgattaacaattaatcttgatgatagcaatgtcacgacgccaattgaatatcgccgcaatatttatcaagcattgcgggaaaaagctcaaaatgagttgcaaaaagatagtaaattacaaattctacttaatgagtttgatgcaaaattagatgtagagagtattcgaccagtttaa

SEQ ID NO: 22270 - DNA, 1437 bp, Haemophilus influenzae
atgagtaaagaaattaaaacccaagtcgttgtacttggtgcaggtcctgcaggttattcagccgcattccgttgtgcggatttaggattagaaactgttattgttgagcgttattcaaccttaggtggggtgtgtttaaacgtaggttgtattccatctaaagcgttattacacgttgcaaaagtaattgaagaagcaaagcatgctaataaaaatggtatttattttagtgaaccacgcattgagctagatgaagtacgtgcaggtaaagaagctgttgttgctaaattaactggcggtttagcgggaatggcaaaagcacgtaaagtgactgttgttgaaggtttagcgacttttaccgattctcacacattagttgcgcgtgatcgcgatggaaaccctacgactgttaaattcgacaatgccattattgcggcaggttctcgtccagttcaattaccctttatcccacacgaagatcctcgtatttgggattcaacagatgcgctcaaattaaaagaagtaccgaaaaaactacttattatgggcggtggtatcatcggtttagaaatgggtactgtatacaatgctttaggttctgaagttgaagttgttgaaatgttcgaccaagtgattcctgcagcagataaagatgttgttggtatttacactaaacaagttgagaaaaaattcaagttaatgcttgaaaccaaagtgactgcagttgaagcaaaagatgatggtatctacgtttcaatggaaggcaaagcatgtaatgataccaaacgttatgatgcagtgcttgttgctatcggtcgtgtgccaaatggtaaattaattgatgcaggtaaagcaggtgttgaagtggatgatcgtggttttattcacgttgataaacaaatgcgtaccaacgtgccacatatctacgcaattggggatattgtaggtcagccaatgttagcacataaaggtgttcacgaaggtcacgttgccgcagaagtcattgcaggacaaaaacactacttcgatcctaaagtaattccatcaatcgcttataccgaaccagaagtggcgtgggtaggtaaaactgagaaagaatgtaaacaagaaggcttaaactacgaagtggctaaattcccttgggctgcatcaggccgcgcgattgcatctgaatgttcagaaggtatgacgaagttaatctttgataaagatacacatcgtgtacttggcggtgcaatagtgggttctaacggtggtgaattattaggcgaaatcggtcttgccattgaaatgggttgcgatgcagaagatattgcattaactatccacgctcacccaactttacacgagtctgttggcttagctgcggaagtatttgaaggctcaattactgaccttccaaatgcaaaagcgaaggaaaaaataatttctatttaa

SEQ ID NO: 22271 - DNA, 1704 bp, Haemophilus influenzae
atgtcaaaacaaattcaaattcctgatattggtagtgatgaagttaccgtaacagaagtcatggtaaacgtaggcgataccatttctgttgatcaatctatcattaacgttgaaggcgataaagcttcaatggaagtgcctgcaccagaagcgggtgttgtaaaagaaattttagtcaaagtgggcgataaagtttcaactggtactccaatgcttgtattagaagcggcaggtgctgctccagcagctgatgagcctactgctccagtagctgatgcgcctactgcaccagtggttgctaccgcaccaacggcttcagctattgtagaagtaaatgtgccagatattggtggcgatgaagtcaatgtaaccgaaattatggttgcagttggcgatacaatcactgaagaacaatctttaattaccgttgaaggcgataaagcctcaatggaagttcctgcaccattcggcggtgtggtaaaagaaattttagtgaaatcaggcgataaagtttcaactggttcattaattatgcgttttgaagtactaggtgcagctccagcagaatcagcatcagctccagcttcaacatcagcaccacagacagcagctcctgctactactgcacaagcaccacaggcagcagctcctgatactactgcacaagcaccacaggcagcagctcctgatactactgcacaagcagctcaatcaaataacaacgtatctggattaagccaagaacaagtagaagcaagtacaggatatgcacacgcaacaccagtaattcgtcgtttagctcgtgaatttggtgtaaatctagataaagtaaaaggtactggtcgtaaaggtcgtatcgttaaagaagatattgaagcttatgtgaagaccgcagttaaagcctatgaaagcggtgcaacagcacaagctactggcaatggtgtagcaaatggtgctggcttaggcttattgccatggccaaaagttgatttcagtaaatttggcgaaattgaagaagttgaattaagtcgtatcaacaaaatttcaggtgctaacttacatcgtaactgggtaataattccacacgtcactcacttcgataaagcagatatcacggatttagaagcattccgtaaagaacaaaatgcgttacgagaaaaacaaaaactcggtgtaaaaatcacgccagttgtgtttattatgaaagcggtggcaaaagcattagaagcgtatccacgtttcaacagctcaattaccgaagatgctcaacgcttaatcctgaaaaaatatattaacatcggtgtcgcagtagatacgccgaatggcttagtcgtgcctgtattcaaaaatgtgaacaagaaaggcattatcgaactttcacgtgaattaatggaagtatcgaaaaaagcccgtgaaggcaaattgactgcatctgatatgcaaggtggctgtttcaccatttcaagtcttggtggtattggtacaacgcactttgcaccaatcgtaaatgcgccagaagtagctatccttggtgtgtctaaatcatcaatggaaccagtatggaatggtaaagaatttgcgccacgcttaattcttccaatgtcattatcattcgaccaccgtgtcattgatggtgcagatggagctcgtttcattagctatcttggctctgttttagcagatttacgtcgcttagtaatgtaa

SEQ ID NO: 22272 - DNA, 1908 bp, Haemophilus influenzae
atgggaaaaattattggtattgacttaggtacaacaaactcttgtgtagctgtaatggacggcgataaagcgcgcgttattgaaaatgcagaaggggcacgtactactccgtcaatcattgcatatacagataatgaaaccttagttggtcagccagcaaaacgtcaagcaatcactaacccaaaaaatacattgtttgcgattaaacgtttaattggtcgtcgttttgaaagtgaagaagttcaacgcgatattaaaattatgcctttcgaaattactcgtgccgacaatggcgatgcttgggtaaacgtgaaaggtgataaattagccccaccgcaaatttcagcagaagtgttgaaaaaaatgaaaaaaactgcagaagatttcttgggtgaatctgtaactgaagcagtaattactgtgcctgcatacttcaacgacgcacaacgtcaagcaacgattgatgcaggtaaaatcgcaggtttagatgttaaacgtatcattaatgaaccaacagcggctgcgttagcgtttggtttaggttcaagcaaagagaaccaagtgatcgctgtttacgacttaggtggtggtacatttgatatttcaatcatcgaaattgataactttgatggcgaacaaactttcgaagtattggcaaccggtggtaacactcacttaggtggtgaagactttgataaccgtgtaattgattacattattgatgagttcaaaaaagaacaaaatatcgatttacgtaatgatgcaatggcattacaacgtgtgaaagaagctgcagagaaagcaaaaattgaactgtcatcagcgcaatctaccgaagtaaacttaccttacatcacggcagatgcgacaggccctaaacacttagcattaaatatcactcgtgcaaaattagaagcattagtagaagatttagtggcaagctcaattgagtctttgaaagcggtattaaaagatgcagataaaggtgtaagcgaaatccacgatattattcttgtgggtggccaaactcgtatgccacttgtacaacaaaaagttgctgagttctttggtaaagaagcacgtaaagatgtgaaccctgatgaagcggtggcaatcggcgcggcagttcaaggtggtgtattaaaaggcgatgtgaaagatgttcttttattagacgtaactccattatctttaggtatcgaaaccatgggcggtgtgatgaccactttaattgagaaaaataccacgattccaactaaaaaatcgcaagtattctcaacagcagaagataaccaaagtgcggtaactattcacgttcttcaaggcgaacgtaaacgtgcggcagacaataaatctttaggtcaattcaacctagaaggtattaatcctgcgccgcgtggtatgccacaaattgaagtaacatttgatatcgatgcaaacggcgtaatcaacgtatcagcaaaagataaaaatacgggtaaagagcaacaaattcgtattcaagcatcatctggtttatctgatgaagaaattcaacaaatggtgcgtgatgcagaagcaaatgctgatgcagaccgtaaatttgaagaagttgttcaagctcgtaaccaagcagatggtattgctcacgcaacacgtaaacaaattgcagaagctggcgatgcattgagtgtcgcagacaaagagaaaattgaagctgcagtcgctgagcttgaaacagcagcaaaaggcgaagataaagcagaaattgaagcgaaaattgaagcagtaattaaagcctctgaaccattaatgcaagcagtgcaagcaaaagctcaacaagctggtggcgagcaaccacaacaatcatcagcaaaagatgatggcgtggtagatgctgaatttgaagaagtgaaagataataaataa

SEQ ID NO: 22273 - DNA, 1254 bp, Haemophilus influenzae
atgttagaacaaatgggtaaacaagccaaagatgcagcatttatcttggctcaactcaccactgctgaaaaaaattgtgcattatccattattgcagaacaactcgaacaacaagcaccgcttatcttagccgaaaacgcaaaagatattgaacttgccaaacaaaatggattatcggatgccttgattgatcgcttactgctcacacaagaacgtttacaaggcattgctaatgatgtacgccacgttatttctctagcagatcccgtggggaaaatcatagacggcggtacattggatagcggacttaaaatcgaacgcgtacgcactccgctaggcgtcattggtacaatttatgaagctcgcccaaatgtaaccattgatgtggcaagtctttgccttaaaacgggtaatgcagtgattttacgcggtggtaaagaaacacagttttctaacaagattttaatcgaagttgtgcaaaatgctttagagcaagcaggcttaccaaaatttgcggtgcaagccattaccgatccaaaccgtgaactcgttatgcaattattaaaactggatcgctatgtggatatgattattcctcgtggtggttcgggtttacatgaattgtgtaaacaacattcgactattcctgttattgtgggtggtgtgggtgtttgtcatactttcgttgaaaaaagtgcggatcaaaataaagcgatttttgttattgataacgccaaaacccaacgtccaagcacctgtaacacattggaaacattgttagttcaacattctattgctgaagaatttttacctaaacttgtctctcacctttccgctaaaaacgtaaaatatcatgcaaaatccaccgcacttaatatattgaaacaagcgggtgcgaatgtctgcgaagtgacagaaaaagaattgcgaaaagaatggggatcattggatttgaatgtggttgttgtggaagatattcatgccgctattgagcatatccgccaatatggtacgcaacattctgaaagtattttaacttcctcacaaagcctagcccgtcaatttatcaatcaagttgatgcggcagccgtttatgtaaatgcaagcacacgctttactgatggcggacaatttggattaggcgcagaagttgccgtgagtacccaaaaacttcacgctcgtggcccaatgggattagaagcattaaccagttataaatgggtttgtgaaggcgaatatactgtccgcaaataa

SEQ ID NO: 22274 - DNA, 1197 bp, Haemophilus influenzae
atgaatcaacaaaaatcgactttcatctttattcttaccctcggtattctctctatgctaccgccctttggcgtggatatgtatttgccgtcttttttagaaattgcaaaggatctcgacgtaagtccagaacaagtacaacacacgctcacctcttttgcttatggcatggcgtttggtcagcttttttgggggccttttggtgatagtttcggacgaaaaccgatcattttactcggtgttattgtgggcgcattaacagctttagtgcttaccgaaataaattcagttggaaattttaccgcacttcgttttgtgcaaggtttctttggtgccgcacctgttgtactttctggcgcattattgcgtgatttatttagtaaagatcagctatccaaagtgatgtccaccatcacgttagtatttatgcttgcacctttagttgcaccaatcattggtggttacatcgttaaatttttccattggcatgcgattttttacgttatttcgctcgtgggattattagccgctgcattggtctttttcatcattccagaaacccataaaaaagaaaatcgcattccgctgcgcttaaatattatcgctcgcaatttccttctgctttggaagcaaaaagaagtgcttggctatatgtttgccgcctcttttagctttggtggattgtttgcttttgtgactgcaggatcaattgtctatatcggcatttatggcgttcccgtcgatcagtttggttatttctttatgatgaatatcgttacgatgatctttgcctcttttttaaatagccgatttgttactaaagtgggtgcagaaacaatgttacggatagccctcgcaattcaattcctttctggaatgtggctaattttgaccgcacttttagatctcggtttttggccaatggcaattggcgtcgcctttttcgtcggtccaaacccagtgatttcatcaaatgcaatggcatcagctttagaaagatgtcctcaaatggcaggaacagcaaattctttgattggtagcgtacgttttgcagtgggtgcaattatgggaagtttagtcgcgtcaatgaaaatggatactgccgcaccaatgctctttactatgggggcatgtgtcgtgatttccgtgttggcgtattactttctaaccagccgaaatcttaaaagccgtggataa

SEQ ID NO: 22275 - DNA, 699 bp, Haemophilus influenzae
atgagattagataaatttattgctgaaaatgtgggattaactcgttctcaagcaacaaaagcgatccgccaaagtgcggtaaaaatcaacggtgaaattgtcaaaagtggttcggttcaaatttcacaagaagacgaaatttattttgaagatgaattattaacttggatcgaagaaggccagtattttatgttgaataaaccacaaggctgtgtttgttctaatgatgacggcgactatccaacaatttatcaattttttgattaccctttagctggaaaattacatagcgcaggtcgcttagatgtggatacgacaggtctcgtattgcttaccgatgatggacaatggtcacatcgcatcacttccccaaagcatcattgtgaaaaaacctatttggtgacattagctgatcccgtagaagaaaattattcagcagcttgtgcagaaggcattttattacgcggagaaaaagagcccactaaaccagcaaaattagaaattttagatgactacaatgtgaatctgaccatttctgaaggtcgttatcatcaagtaaaacgtatgtttgccgcacttgggaataaagtcgttggattacatcgctggaaaattggtgatgtagtgttggatgaatccttagaagaaggcgaataccgcccattaactcaaagtgaaattgaaaagttagtaaaataa

SEQ ID NO: 22276 - DNA, 1944 bp, Haemophilus influenzae
gtgttagtggtttttacaatgaaaaaagcacattcccctttattccccatcttcacattcgtgttgattaatctcattatcctttccttatcccgtttgggacttgctgtgtggcaatcagagcgtgtatccgccgtagatggctggttgcaattatttttgcaaggcgtacgaatggatgttgtggcactttgttatttatttggcgtaccagcattgctcacaacattgttccatagcagtaaagtttgggtaaaaattttacgcctatggctaacctttggtagcgtgttcattatctttatggaaattgccacacctgcctttattgaaacctatgattaccgaccaaatcgtttatttatcgaatacctgatttatccgaaagaagttttttcaatgcttgcggaaggacatttaagtgcggtgatttttagccttgttttcacgattttagctgccgtgatttattggaaaatttctggttgggcagtcaaaaatttacgttcaatgagttggaaacttcgccctgtgattgctttgcttgtgattgtcgtgagcttccttggggcacgttcaagttttcaacaccgtggtataaatcctgctatggtggcattttcttctgatgcgttagttaattctctggtgcttaattcgggctattccgtcatttatgcggcacagcaatttaaagatgaagaaaaatcttcagaaatgtacggaaaaatggatgcagatgaaatgtttcgtattgttaaagccagccgtggccgtccagaaagtgattacatttcagataaatacccaactttaacgaaaaatgtcgcgacttatcagggtaaacctaaaaatatcgtgattttgttacaagaaagtctcggtgctcaatttattggaacactcggtggcaaaccactttctccaaatgtggatcagctcgcaaaagaagggtggttatttgaaaatctttatgcaacaggcacacgttcagtacgtggtattgaagcaaccaccgcaggttttacgccaacaccagctcgtgcagtggtgaaacttaataatgcccaaagtggtttctttactattgcggatttattacataaacaaggctataacacttcgtttatttatggtggcgaaaagcacttcgacaatatggcgagctttttctacggtaatggctttaaagatatttgggatcaacaagactatcagaatccaaaatttactggcacttggggcgtgagtgatgaggatttatttgataaagccaatgaaactttcacgaaattacaaaatgaaggtaaaccgttttttagtttagtatttagctcaagcaatcacgatccatttgaatatccagatggcaagattgagctttatgagcaaccaaaagccactcgtaataatgcggcaaaatatgcggattatgcgttaggtcatttctttaaaatggcaaaacagtctaattattggaaagatacgattttcttaattattgcggatcacgattctcgtgtaggcggagcaagtcttgtgccgattaagcatttccatattccagccttgattcttggtgatggcattacgccacgtcgtgacagccgtcttgtgagccaaattgatatgccaactacattgctttctttagctggcgtaagtggcaattatccaatgattggttttgatttaacgcaagatgtaaacccagatcgtgcttttatgcaatacgatcaaactcaagcaatgatgaaaggcaataatgatgtggtaattcaaatgccaaataaagcagcgcaaggttatcattatgataaatcaacagaaactttaacgccaaaagacgtacctgatgcaatgaaaaaagaggcattggctcacgctttattaggtagttatttatataaaaatcgcttgtattcttcaggtgaaaataaatag

SEQ ID NO: 22277 - DNA, 1671 bp, Haemophilus influenzae
atgtcatctcaatttgtgtatacgatgcatcgtgtcggcaaagtagtgccgccgaagcgtcatattttgaaagatatttctttaagctttttccctggtgctaagatcggggttttaggtttaaatggtgcgggtaaatcgactcttttacgcattatggcaggcgtagataaagagtttgaaggggaagctcgtccacaaccgggtattaaaattgggtatcttccgcaagagccaaaactcgagccacaacaaaccgtgcgtgaagcagtggaagaagcggtttctgaagtgaaaaatgcactgactcgtttagatgaagtgtatgcgctttatgcggatcctgatgcagattttgataaattagcggcagaacaagccaatcttgaagccattattcaagcgcatgatggacataatttagataaccaattagagcgtgctgcagatgcgttacgtttacctgattgggatgctaaaattgaacatttatctggtggtgagcgtcgccgtgtggcactttgccgcttattactcgaaaaaccagacatgctcttattagatgagccaactaaccacttagatgcggaatctgtggcatggttagagcgattcttacacgactacgagggtacagtggtagcaatcactcacgaccgttatttcttagataatgtggctggttggatcttagagcttgaccgtggcgagggcattccttgggaaggcaactattcttcttggttagagcaaaaagagaaacgcttagaacaagaacaagcaactgaaaacgcacgtcaaaaatccattgcgaaagagttagaatgggttcgtcaaaatccaaaaggtcgtcaagcgaaaagcaaagcacgtatggctcgttttgatgaattgaactctggcgaatatcaaaaacgaaacgagactaacgaactctttattccacctggcccacgcttaggcgataaagtgattgaagtgcaaaacttaaccaagtcttatggcgaccgtactttaattgatgatttatcattcagtattccaaaaggtgcaatcgttgggattatcggggcaaatggtgcgggtaaatctactttattccgtatgttgtcaggtcaagaacaaccagattcaggttctgtgacaatgggcgaaaccgttgtacttgcttcggtagatcagttccgtgattcaatggatgataagaaaaccgtgtgggaagaagtgtctaatggacaagatattctcactattggtaactttgaaattccaagccgtgcttatgtagggcgtttcaacttcaaaggcgtagatcaacaaaaacgtgtgggcgaattatcaggtggggaacgtggtcgtttacacttagcgaaacttctacaacgtggtggtaacgtgctattactggacgaaccaaccaatgacttagatgttgaaaccttgcgtgccttagaaaatgcgatcttagaattcccaggctgtgcaatggtgatttcgcacgaccgttggtttttagaccgtatcgcaacgcatattttagactacggcgatgaaggtaaagtcacgttctatgaaggtaacttctcagactacgaagagtggaaaaagaaaaccttaggcgatgcagccactcagccacatcgtattaaatataaacgtattgcgaagtaa

SEQ ID NO: 22278 - DNA, 384 bp, Haemophilus influenzae
gtgaattttgaccgcacttttcttacttttttgggagtgattatgttagttcatttacatatttttttcgcctttttaagtttggcattgttagtaattcgtggtgcaatgcagcttaatggtaaaaattggcgttcgataaaattattaaaaattttaccgcacttatcagataccttgctgattgtgtctggtgtcgtcattttatacctctttgcttttggtattgaatggtggttagtggctaaattcgcattactgattttgtatattgtgtttgctgcaaaatttttcagtaaaaaagtttctcaacccaaaagcattttcttttggcttgcttgcgtaagttttattggtgcgatgttaattgcctatttaaaataa

SEQ ID NO: 22279 - DNA, 1062 bp, Haemophilus influenzae
atgccatctcgccagcttcaaattttaatcagaaaaactttgccgcttgtgcctgatcacgtattaattatcggcgaaagtggcattgctttttctaaagcaacgaatttgctcgggcaagaatttgaacatattttatttgatggacgaaatggcattcatcttgaagcactggctattgcagctggaacactgaaaatgggcggcacactttgtttagtgttatctgattgggaaaatttatctcagcagcctgatcaagatagtttacgttggaatggaaatcagtcagctatcgccacgcctaattttatttatcatttcaaacagtgcattgaacgttatcatttccccattttaagagaggaaagtgcggttgaatttcctacggttttttattctaacgaacatcacaaaaatgctacgttagcgcaacaacaaattatcgagaatattttacaggccgagcaggatatttattttctaaccgccaagcggggaagaggaaaatccgcattattgggtatgcttgctaaccaaattcaagcaccagtttatctcaccgcaccgaataaaagtgcggtgcattccgttattgaattttcagaaggggacattgaatttattgcgccagatgaattggctttgacgttacaaactgaacccgaatttagtcaatctgcttggttgctggtagatgaagcggcgatgatcccattgccgttattgcaagaatattctcgatattttcaacatattgtctttagtactacaattcatagctacgaaggtacggggcgtggtttcgaattaaaatttaaacggaaaattcaccgcacttttcagcattttgagcttaaacagcctctacgttggcaagaaaatgatccgttagaacattttattgatgatcttttattgctaaatgccgaagatgattttcagcactttgactatagcaatattacttataacatagaggaaaacgctaaaaatctttccttcccctgcttgcgggggaaggtgcccgaagggccgaaggggggatttagatatagctag

SEQ ID NO: 22280 - DNA, 3441 bp, Haemophilus influenzae
atgaaaacggcttttttccaacctgatattccaacccaacccaatgatcacaaaattttaggcaatgtattaccaggagctgatgcattggcgattagtgaaatttcagagcaaaatcaaaatttaaccgtagtggtaacaccagatacacgaagtgcggtgcgtttatcacgtgttttatcggaattaagcagccaagatgtatgcctttttcctgattgggaaaccttaccttacgatactttttctccccatcaagaaattatttcctctcgtttaagtgcgcttttccatttacaaaatgcgaaaaaaggcattttcttattgccaatttcgacattaatgcaacgcctttgcccgccacaatatttacaacacaatgtgcttctgattaaaaaaggcgatcgtttggtcatcgataaaatgcgcttacaattagaagcagcgggctatcgtgctgtggagcaagtattagaacacggcgagtacgcagttcgtggtgctttgttggatcttttcccaatgggaagtgcggtgccttttcgccttgatttttttgatgatgaaattgattctattcgcacttttgatgtggatacgcaacgcactcttgatgaaattagctcaattaatcttttgccggctcacgaatttccaacggatgataaagggattgaattttttcgtgcgcaatttcgtgaaacttttggggagattcgccgagatcccgaacatatttatcagcaaatcagtaaaggtaccttgatttctggcattgaatattggcagccacttttctttgctgaaatggcgactttgtttgattatttgccggagcaaacgctgtttgtagatatggaaaataatcaaacgcaaggcgagcgtttttatcaagatgcaaaacagcgttatgaacaacgtaaagtggatccgatgcgtccgcttttatcgcctgaaaaattatggctcaatgttgatgaagttaatcgccgattgaaatcttatccgcgcattacatttaaagcggaaaaagtgcggtcatcggtacgccagaaaaatttacctgttgccgctctaccagaagtgactattcaatcccagcaaaaagaaccattgggacaattacgtcaatttattgagcattttaaaggaaatgtactgttttcggtggagacggaaggtcgccgagagactttgcttgatttgctttcaccgttaaaactcaagccaaaacaaattcaatctttagaacagattgaaaatgaaaaatttagcttgttagtcagctctcttgaacaaggttttataattgaacaatcgcttcctgttgcgattattggcgaagctaatttacttggcaagcgcattcaacaacgttctagagacaaacgtaaaacaattaatcctgatacgcttgtacgaaatcttgccgaactgaaaatagggcagccagttgtgcatcttgatcacggtgtggggcgttatggcggtttggtcaccttagatacaggtggcattaaagcagaatatttgctactaaattatgcaaatgaatcaaaactttatgtgccagtgacttcattacatttgattagccgttatgttggtggttctgatgaaagtgcaccattacataaattagggaacgaggcttgggcgaaatcacgccaaaaagcagcggagaaaattcgtgatgtggcggcagagttattagatgtttacgcacaacgtgaagcgaagaaaggctttgcctttaaatatgatcgtgaagaatttcaacaattttccgcaacctttccttttgaagaaacctacgatcaggaaatggcaattaatgcggtaatttcggatatgtgtcagcctaaggcaatggatcgccttgtttgtggtgatgtgggttttggtaaaactgaagtggcaatgcgcgctgcctttttggctgtgatgaatcataagcaagtagcagtgctagtgccaaccacactgttagcccaacagcattatgagaattttaaagatcgttttgcgaatttgcctgtgaatgtcgaagtgttatcgcgtttcaaaactgcaaaagaacaaaaacaaattctggaaaaccttgcagaaggcaaagtcgatatactgattggtacccataaattaattcaatcagatgtaaaatttaacgatcttggattgttgattattgatgaagaacatcgttttggtgtagggcaaaaagagaaaatcaaacagcttcgtgcgaatatcgatattcttacgctaacggcaacgccaattcctcgaacgcttaatatggcgatgaatggcattcgtgatctttccattatttccacacctcctgctcgccgattaagtattaaaaccttcgtccgtcagaatgacgatcttgttgtacgagaagcgattttgcgtgaaattctccgaggtgggcaggtttattatctccacaatgatgtcgcgagcattgaaaatacagcagaaaaactgaccgcacttgtgccagaagcgcgagtaattgtaggccacggacaaatgcgagaacgtgaattagagcgcgtgatgagtgatttttatcatcagcgttataacgtcttagtttgttcaaccattatcgaaacgggtattgatgtaccaacggcaaataccattattattgaacgagcggatcattttggtttggctcagttgcatcaattacgtggacgagtcgggcgttcacatcatcaggcttatgcttatttgcttacgccaccgccaaagatgatgacaaaagatgctgaacgccgtctagatgcgttggaaaatcttgataatcttggggctggttttatcttggcaacccacgatttagagattcgtggtgctggtgaattacttggaaacgaacaaagtggacaaattgaaagcatcggtttttcactttatatggaattattggatgcagcggttaaagcgttaaaagaagggcgagaaccatcattagaagaattgacgcaacaacaagcggatattgaattgcgtgtgcctgctttactgcctgatgattatctaggcgacgtgaatatgcgtttatccttttataaacgcattgctgcagcagagagtaaagcagaattagatgaattaaaagttgagttgattgacagatttggattattgcctgatgcaacgaaaaatttattacaaattacagagttgcgtttattggttgagccgttgaacgttgtgcgaattgatgctggaacacaaggcggttttattgagttttcagcaaaagcacaagtgaatccagataaatttattcaattaattcaaaaagaacctattgtgtatcgatttgatggcccattcaaatttaagtttatgaaagatctatccgataacaaagtgcggttagaatttgtggtggatttgttaagaacgattgctgcataa

SEQ ID NO: 22281 - DNA, 1401 bp, Haemophilus influenzae
atgaaaaaaacacgttttgtattaaatagtattgcacttggattaagtgtattaagcacatcatttgttgctcatgttgctcaagccactttgccaagttttgtttcagaacaaaacagtcttgcaccgatgttagaaaaagtacaacctgccgttgtcactctttccgttgaaggaaaagctaaagtagattctcgttctcctttcctagacgatattcctgaagaatttaaattcttctttggcgatcgttttgccgaacaatttggtgggcgtggagaatcaaagcgtaacttccgtggtttaggttctggtgtcattattaatgcaagcaaaggctatgttttaaccaataatcatgttattgatggagctgataaaattaccgtgcaattacaagatgggcgtgaatttaaagcaaaattagtgggtaaggatgaacaatcagatattgcattagtacagcttgaaaaaccaagtaatttaacagaaatcaaatttgctgattccgacaaattacgcgtaggcgatttcactgttgcaatcggtaatccatttggtttaggtcaaactgtgacatcaggtattgtttctgcattgggtcgttcaacaggttctgacagtggcacttatgaaaactatattcaaaccgatgcagcagtaaaccgaggtaattcgggtggtgcattagtcaatctaaatggcgaacttattggaattaataccgcaattatttctccaagcggtggcaatgcaggaattgcctttgcgattccaagtaatcaagcaagcaatttagtgcaacaaattttagaatttggtcaagtgcgtcgcggattgcttggtattaaagggggcgaactcaatgctgatttagccaaagcctttaatgtaagcgcgcaacaaggtgcatttgtaagtgaagttttaccgaaatctgctgctgaaaaagcaggacttaaagcgggcgatattatcacggcgatgaacggtcaaaaaatctcaagtttcgctgaaattcgtgcaaaaatcgcaaccactggtgcaggcaaagagattagcttgacttacttacgtgatggcaaatcccacgacgttaaaatgaaattacaagcggatgatagtagccaactttcctcaaaaactgagttgcctgcattagatggcgcaacattgaaagactacgatgctaaaggcgttaaaggaattgaaatcacaaaaattcaacctaattcgctagctgcacaacgtggtttaaaatcgggcgatattattattggtattaatcgtcaaatgatcgaaaacattcgtgaattaaataaagtgcttgaaactgaaccgtcagcagttgcacttaatattttacgaggtgacagtaatttctatttattagtgcaataa

SEQ ID NO: 22282 - DNA, 891 bp, Haemophilus influenzae
atgagctggattaaccgaatttttagtaaaagtccttcttcttccactcgaaaagccaatgtgccagaaggcgtatggacaaaatgtactgcttgtgaacaagtactttatagtgaagaactcaaacgtaatctgtatgtttgcccgaaatgtggtcatcatatgcgtattgatgctcgtgagcgtttattaaatttattggacgaagattcaagccaagaaattgcggcagatttagaaccaaaagatattttaaaattcaaagatttaaagaaatataaagatcgtatcaatgcggcgcaaaaagaaacgggcgagaaagatgcgctaattactatgacaggtacactttataatatgccaatcgttgtggctgcatcgaactttgcttttatgggcggttcaatgggttctgtagttggtgcaaaatttgttaaagcggctgaaaaagcgatggaaatgaattgtccatttgtgtgtttctctgcgagtggtggtgctcgtatgcaggaagcattattctctttaatgcaaatggcaaaaactagtgccgtacttgctcaaatgcgtgaaaagggtgtgccatttatttcagtattaacggatccgactttaggcggcgtatcagccagttttgcgatgttaggggatttaaatattgccgagccaaaagccttaattggttttgcagggccacgcgttattgaacaaactgtgcgtgaaaaattgccagaaggtttccaacgtagtgagtttctacttgagaaaggggcaattgatatgatcgtgaaacgttcagaaatgcgtcaaactttagcaagtgtactgagtaaattaacgaatcaaccttctccttttgtagaacctgaactcatttcagaagatgaataa

SEQ ID NO: 22283 - DNA, 2643 bp, Haemophilus influenzae
atgacggattcaatccaatcatctatcacccctgtcaatatcgaagaagaacttaaatcttcctaccttgactacgcgatgtcggttatcgttgggcgtgcattacctgacgttcgagatggtttaaaacctgttcaccgccgcgtactattctcaatggatcgcgaaggcaataccgccaataaaaaatacgtaaaatcagcgcgtgttgtgggtgatgtaatcggtaaatatcacccgcatggtgactccgccgtgtacgataccatcgttcgtatggcacaacccttctcacttcgctatatgttggttgatgggcaaggtaactttggttcaattgatggtgatgcgccagctgcaatgcgttataccgaagtacgtatgcaaaaaattacgcaagcattgctcacggatttggataaagaaaccgtcaatttctcgccaaactatgatggcgaattaatgattccagatgtattgccgactcgtattccagcactgttagcaaatggttcttctggtattgcggtggggatggcaactaacattccccctcacaacttaaacgaagtattaaatggttgtttggcttatattgacaaaaatgaaattaccattgatgaattaatgcaacatattccagggcctgacttcccaacggctgcgttaattaatggtcgtaaagggattgaagaggcctatcgcactggtcgtggtaaagtgtatgttcgtgctcgtgcaacggtagaaaccaacgaaaaaggacgcgagcaaattatcgtgtctgaattgccataccaagtaaataaagcaaaattagtcgagaaaatcgccgaattaattcgcgagaaaaaaatcgaaggtatcagcaatattactgacctttcaaataaagaagggatccgtattgaaattgatattaaacgtgatgcagtgggggaagtggtattaaaccatctttactcactcactcaaatgcaagtgacctttggtatcaatatggtggcattggatcacggtcagccacgtttatttaatcttaaagaaattattgaagcctttgttttacaccgccgtgaagtggttacacgtcgttctatctttgagcttcgcaaagcacgtgaacgtacgcatattttggaaggtttagcggttgctcgttctaatatcgatgaaatgattgcgatcattcgtaactctaaaaaccgtgaagaagccgcaacatcaatcagttcacgctcttggacgttacatagcgatattattaatcttcttgatgcttctgctcgtcctgatgagttagaagaaaatcttggtattcaaggcgaacaatattacttatcgccagcgcaagtaaacgcaattctagaacttcgcttacaccgtttaacgggcattgcgtttgaagaagttataaaagaatatgaagaattattagttaaaattgcggatcttcttcatattttaagtagtgcagaacgtttaatggaagtaattcgtgaagaattggaagaagtaaaagcacaatttggtgatgatcgtttaactgaaattaccgctgcttctggcgatattgatttagaagatttaatcgcacaagaagacgtggttgtgacgctttctcacgaaggttatgtgaaataccaaccactgactgactatgaagcacaacgccgtggcggtaaaggcaaatctgcaacgaagatgaaagaagaagatttcatcgaaaaattactggtagcaaatactcacgataccatcctctgcttctctagccgtggtcgtttatattggttgaaagtatatcaacttccgcaagcgagccgtggcgcacgcggtcgtccaattgtgaatattcttccgttacaagaaaacgaacgtattactgcaatcttgccagtttctgcttacgaagaagataaattcgtagtcatggcaactgctggcggtattgtgaagaaaatcgccttaaccgaatttagccgtccacgttcaaacggtatcatcgcattgaatttacgtgacgaagatgaattaatcggcgtggatattactgatggcagcaacgaaattatgttgttctcatcacaaggtcgcgtggtgcgttttgctgaaaatgccgtgcgtgcgatggggcgtttagcaacaggtgttcgcggtatcaaactggctttaacaaacgatatttctgacgatgaaagtgcggtagaaattgaagatatttctgatgacaacgctgaagcatcattagacttaaatatcgataaagtggtctcgctcgttgtgccaaaaggtgaaggggcaattttaaccgcaacgcaaaacggctacggaaaacgcacacaattaagtgaatacccaactaaatcacgtaatacaaaaggtgtgatttcgattaaagtgagtgaacgcaatggtaaagtcgttgccgcaactcaagtagaagaaacagaccaaattatgttgatcactgatgcaggaacccttgttcgcacacgcgtaagcgaagtgagcattgtagggcgtaacacgcaaggtgttcgcttaattcgtactgccgatgatgaacacgtagtaagtttagaacgtgtttgtgatgcagatgaagatgattctttggaagaaagcagttctgaagaataa

SEQ ID NO: 22284 - DNA, 2049 bp, Haemophilus influenzae
atgacaactcaaccccgtaaaattttagtcacttgcgccttgccttatgccaatggggcaattcatttaggccatatgttagaacatatccaagcggatatttgggtgcgttttcaacgtatgcgtggcaataaaatccattttgtctgtgcggacgatgcgcacggcacgccgattatgttgaatgctgataaacttggcattacacctgaagaattaattgccaaagcaaaagccgatcacattcgtgattttgcaggttttaatattagttttgataactatcattccactcacagcgaagaaaacaaacagctcaccgcagaaatttacaataaactcaaagccaatggttttattaagagtaaagttatttctcagttattcgaccctgaaaaaaatatgttcttgcctgatcgttttgtgaaaggcacttgcccgaaatgcaaagcagaagatcaatatggcgataactgcgaagtgtgtgcttctacttatagcccaatggatttaattaatcctcgttcagctgtttctggcacaacacctatcgtaaaagaatctgaacactttttctttgacttgcctgcatttgaagggatgttaaaagaatggactcgttctggctcacttcaatctgaaattgccaacaaaatgcaagaatggtttgagagcgatttacaacaatgggatatttcacgtgatgcaccttatttcggttttgaaattcccggcgcaaaagataaattcttctatgtttggttagatgcgccaatcggctacatggcttcattcaaaaatctatgcaatcgtgaaggcattgatttcaatgaattttgggctgaaggcagtgatgcagagctttatcatttcatcggtaaagacatcgtttatttccacagcctattctggcctgcaatgcttgaaggcagtggctaccgtaaaccgactaatgtgttcgctcatggctatgtcactgtggatggggcgaagatgtcaaaatctcgcggcacattcattcaagccagcacttatttgaatcatatcgatcctgaatgtttgcgttattactatgcagcaaaattaaatgatcgcattgaagatttagactttaaccttgaagatttcgtacaacgtgtcaatacggatattgtaaacaaattagtgaatttagcttcacgcaatgcgggctttattgcgaaacgctttgaaggcaaacttgcggataaactggaagacaaatcattatttgcagaatttaccgcccaagccgagcaaatcgctgcttattacgaaagccgtgaatacaataaaaccattcgtgagattatggcattaacagataaagccaataaatacattgatgaaaaagccccttgggtgattgcaaaagaagaaggcaaagaggcagaattgcaagccgtatgttcaatgggtattgagcttttccgcgtattgatgtcttacttaaaacctgttcttccaaaactagcagaacgtgcagaaaccttcttacaagctgaattacgttgggataatattcatcaaccattacttggtcatacccttgcaccgtttaaagccttattctctcgtttagagaaaaaacaaattgatgccgttgtggaagaaactaaagccttatttgcagcagccaataaagccgcagaaaaaactgaagcaaaaccaaccgcactttctgccgttgaacctattgctgaaaccatcacgattgatgatttcgctaaacttgatatgcgtgtagcaaaagtattgaaatgcgaagcggtgccagaatccaataaacttttacgttttgaattagatcttggtgatcatactcgccaagtcttctctggcattaaagcggcttacaataaacctgaagaattagaaggtcgttttgtgattatggtggcaaaccttgcaccacgtaaaatgaaattcggcgtgtctgagggaatgattctatccgcaggaacaggcggtagtgacttattcttactttctgctgatagcggtgtcactgcgggcatgcaagtaaaataa

SEQ ID NO: 22285 - DNA, 276 bp, Haemophilus influenzae
ttgcttacattttggcactggaaatggctagggattaagaataccgagttcaagtgtgtgaaaggcaagctctatttatccccaattaaggatttatttaacaatgaaattattgcttatgatttagtgcgaagcccgaattctgagcaaattacccaaatgatgaaacaagctgtagcaaggcttgcaggcgcaaaaccgattttacattccgaccaaggttggcagtatcagatgataggttatcaaaacatacttagggagaatggcatttaa

SEQ ID NO: 22286 - DNA, 1488 bp, Haemophilus influenzae
atgagtaaagaaattttactggcggcggaagctgtatccaatgaaaaattattaccacgtgagaaaatttttgaagcattagagagtgcgattgcgatttctactaagaagaagtttgaatatgaaacggatattcgcgtttcaattaatcccaaaacaggagaatttgatacttttcgccgttggttagtcgtagatgaagtaaaagtaccaacgaaggaaattactttggaagcggcgcaatttgatgatccaaatttgcaacttggagagtatgtagaagatcaaattgaatctattgcatttgaccgtattgcaatgcaaacggcacgtcaagttattagcactaaaattcgtgaagccgaacgtgcaaaagtggttgaacaatttcgtgaagaagaaggaaaaattgtaacaggcactgtaaaaaaagtaagtcgagacagtattattttagatcttggcaataaagcggaagcgatgattgcgcgtgaagatatgttaccacgtgaaaacttccgtccgggagatcgtgttcgtggggtactttataaagtaaatcctgaaggcaaaactgcacaattatttgtgacacgttctaaaccagaaatgttgatcgaattattccgtattgaagtgcctgaaattggcgaagaaatgattgaaattcgtggtgcagctcgtgatgctggctctcgcgctaaaattgcagtgaaatcaaatgataagcgaattgatcctgttggtgcttgtgtaggaatgcgtggtgcgcgtgttcaggtaattacgaatgaacttggtggcgagcgtgtagatatcgtgctttgggatgacaatcccgcgcaatttgtgattaatgcgatggcaccagcggatgtttcttctattatcgttgatgaagataatcattctatggatattgctgttgaagctgataatcttgctcaagccattggtcgtaatggtcaaaacgtgcgtttagcaacacaattaacgggttggacactaaacgtaatgacgactgatgagttaaatgctaagcatcaagcagaagataacaaagtgttaaatttatttattaacgcattagaacttgatgaagaatttgctcaaatccttgtggaagaaggcttcacaagtttagaagaaattgcttatgtgccaatgaatgaattgacagcaattgatggtttggaagatgaagatcttgttgaagagcttcaaactcgtgctaaaaatgcgattacagccgcagcagtagctgaagaagaagcactgaaaaaagcgaatgttgaagatcgtttattgaatttagagggaatgaatcgtcacgttgcaatcaaactagcagaaaaacaaattaccacccttgaagaactcgcagaacaaggcgttgatgatttaactgatattgaagaattaaccgcagaacaggccgcagatttaattatggctgcacgtaatatttgttggtttggcgaagaataa

SEQ ID NO: 22287 - DNA, 2490 bp, Haemophilus influenzae
atgactgaagatgttaaggctgatgcgccaaaaaaattaagcattcagcgcagaacaaaaacaacagtgagcagcaccacaactggcggtaaaagcaaagaagtacaagtagaagtacgtaaaaaacgcacagtaaaaactgatattgctcaacaagaagaagcaaaattaaaagcacagcaagaagcggaagcgaaaaaaattgctgaacaaaaagcagcagaagaaaaagctcgtttagaagctgaaaaagcaaaagctgaaactgctaagccagtaaaaagtgcggtagattctaaagctaaatctgttgagtctgaaaaagagaaacgtaaagcaggagaagcagaacttcgtcgtaaagctgaagaattagctcgtcaaaaagcagaagaacaagctcgtcgtgcagtagaagaagcgaaacgttatgctgaagcagatgattcagacaatgaatcttcttcagaagactattctgattacaatctaagttcaagatatgcacttgaagcagaagatgaagaagatcgtcgtaatgaaaatcgtggtcgtggcaaaaataaagtagcgaaagcgaaaaaaggcggtcgcgacgatgaaaatagcaaaaactcgaaaaacgagcgcgaatctaatcgtaaaaatcaaaaagacgctaagtttggtaaaggtaaaaatggcaaaaaaggtgccgcacttcaacaagcctttactaaacctgctcaagtagttaaatcggatgtagtcattggagaaaccattacggttgcagaacttgcgaataagatggcggtaaaagctacagagatcatcaaaatgatgatgaagatgggcgaaatggttactatcaaccaagttatcgaccaagaaaccgctcaattagtagcagaagaacttggtcataaagtgattcttcgtaatgaaaatgagcttgaagaagcggtattaggcgatcgtgatgtaaacgcagaaaaagtaacccgtgcgccagttgtaaccatcatgggtcacgttgatcatggtaaaacctctttacttgactatattcgtaaagcgaaagttgctgcaggcgaagcgggtggtattactcaacatatcggtgcgtatcacgtagaaatggatgatggcaaaatgatcaccttcttggatactccaggacacgcagcgtttacttctatgcgtgcacgtggtgcaaaagcaacagatatcgttgttcttgttgttgcggccgatgatggtgtgatgcctcaaactatcgaagcgattcaacacgcaaaagcagcgggtgcacctttagtggttgcagtaaataaaatcgataaaccagaagcaaatctagatcgtgttgagcaagaattattacaacatgatgtcatttctgagaaattcggtggtgatgtgcaattcgttccagtatcggcgaagaaaggtacaggggttgatgatttattagatgcaatcttacttcaatctgaagtgcttgaattgaccgctgtaaaagacggcatggcaagtggtgtagtcattgaatcttacttggataaaggtcgtggccctgtggcaactatcttggttcaatcaggtacactacgtaaaggtgacatcgtactttgtggttttgaatatggccgtgtgcgcgcaatgcgtgatgaaaacgggaaagaagtggatgaagcaggtccttcaattccagttgaattattaggtctttcaggcgtgcctgcagcgggtgatgaagcaactgttgtgcgtgatgagaaaaaagcacgtgaagtggcgttatatcgtcaaggtaaattccgtgaagtgaaattagctcgtcagcaaaaagcgaaacttgaaaatatgtttagcaatatgtctgaaggcgatgtggctgaattgaacgttattgtgaaagcggatgtacaaggctctgtagaggcgattgttcaagcgttaaatgaactttctaccaatgaagtaaaagttaaagttgttggttcaggtgtaggtggtattactgaaactgatgcaactttagctaccgcatctaatgccatcattgttggctttaatgttcgagcggatgcaacagctcgtcgtgtcattgaagctgaaaacattgatttacgctactactcaattatttatgaattgttgaatgaaattaaagcagcaatgagcggtatgttagagcctgaatttaaacaagaaattattggcttagctgaagttcgtgatgtattccgtcatccgaaatttggtgcaatcgcaggctgtatggtaactgagggtgtagtgaaacgtaacaacccaatccgtgtattacgtgacaacgtcgttatatttgaaggggaattagaatctcttcgccgtttcaaagacgacgtatctgaagttcgtaacggtatggaatgtggtatcggcgtgaaaaactacaatgatgtaaaagtcggcgaccaaattgaggtatttgaagtggttgaagttaaacgttcaatctaa

SEQ ID NO: 22288 - DNA, 3168 bp, Haemophilus influenzae
atgctcaacgaaaatgacatcgaacaacttacccttcaacgcctgcaatccctcggttgggaatatcgctacggtaaagacttgcctgttcatgagggcaagtttgcccgtggcgatttgagcggcgtagtctttgttgagcaactgcgtgaggcggtgcgtaaacttaatcctcagcttcctgaaagtgcggtggattctgtagtgaaatcggcaacgaaaagcgatattggcgacttggttgtgcgtaatcagacgttttataaactgctgcgtgatggcgtgcgggtcgaatatacgcaaaacggcgaacagaaaattgagatggtgcgtttggtggatttcgagcattggggaaacaaccgctttgttgccgtcaatcaattggaaatccgcagccgcaaaggaggtaaacggattcccgatattatcggctttgtaaatggtctgccgttggtggtatttgagctcaaaaatccgttgcgtgaatcggcggatttgttgcaggcgtttaatcaatttgaaacctataaagatgaaattgccgagctgtttgtttacaaccaagctctgattatttcagacggcattgtcgcccgtttgggttcgctttcggcagatttccaacgctttacgccgtggaaagtggtcgatgaaaaaaataaaagcgcgcgcttatattttgacgatgagttgcaaagcctgctcaatggcttaatgcagcctgaggatttattggactatatccgctatttcgtcttgtttgaacgggattccgttggcaaaaccattaaaaaaatcgcggcgtaccatcaatattacggcgtaaatgaagcggtagattccaccatttgggcgacttcagaaaaaggcgaccgccgcattggggtgatgtggcatacgcagggttcgggcaagtcgatttcgatgctgttttatgcaggcaaactgcttgcacagcctgaattgaaaaatcctaccattgtagtggttaccgaccgcaacgatttagacggtcagcttttccaaactttttcttcaggcaaggatttaatcaaacaaacaccgcagcaagtagaagaccgcgatcaactgcgccaactgctcgcacaaaatgaagtcggcggcgtgttttttactacgattcagaaattcgccctaaatgaggaagaaagccgcttccctattttaaatgagcgcaacaatattattgtgatcagcgatgaggctcaccgcagccaatatggctttacgcaaaagctgcataacggcaagtttcagacaggttatgctcgccatttgcgtgatgctttacctaatgcctcgtttattggttttacaggtacgccaattagccttgaagataaggacacgcaagatgtgttcggtcgttatgtgtccatttatgacttgcaagatgcggtggaagatggagcgactgtaccgattgtttatgatgatgctcgccaaattcgcttaaataaaaaagaccacgatgctttgtttgcagaaattgatgctctactagaagaggagccatcaacttccctgcgtttgcgggaaaaattactaggctcacaagagcgtcttatcgaattggccgcagattttgtgcaacattttgccaaacgcaatgaagtggtggacagcaaagcgatgatggtggtttccagccgtcaaatttgcgtggatttgtataatcagatcatcgctctgcaccctgaatggcattcggacaatattaacgaaggggcgattaaaattgtgatgacaggttcggcaagcgatacgcctgaaatgcaaaagcatatttacagtaagcaggaaaagcaaacgttagaacgtcgctttaaagacccgaacgatccgctgaaagtggtgattgtgcgtgatatgtggctgacaggctttgatgcaccgtgctgtaacactatgtatcttgataagccaatgaaagggcataacctaatgcaagccatcgcacgagtaaaccgtgtattcgctaacaaaagtcgtgaaaacggtgggcttatcgtagattatgttggtttggcaaaagaattacgagcagccacacagcaatacaccaactctacaggcaaaggtcaattagcggaagatgtgcaaagcgtgttctttaaaatgaaagaacagcttgaatttatccgaactttgtttgcgacaccaattgaaggaaaaacttttgatgttcaggctgccttagaaaaagataatccgaatgatcttttgatggcgattcgttttgccgccaaccatattttaagccttgatcaattatcgtttgatggcaaagcgcacgagcagcattggtttaataaaaaagaaaccgagccacgcaaaaaagcctttttgaaaacggcaggcttggtaaaaaaaggctatatgctgtgcggcacattggctgaagttgagccgtataaccaagaaatcgccttttatgatgccgtacgggcaattttaactaaacgtgaacaaaaaggcacaggcacaaatgaaagacagattttattgaaaaaattggtcaatcaaactgtgtattctgaaggcgtgattgatttattcgatctgctagaaaaaccacaaccacaaatcagtttgctttccgaggaatttttacaaactgtaaaaaatagcccaactaaaaatttatgggttagcgcgatggagcgttatttggcaagtgaaattaaagttaaatcaggcacaaacttaaccttgcaaaaagattttgaacggcgtttgaaggaagcattgaatcaataccacaatcacaatttgactgtggtagagattttggacgaactctttaaaatgagccaagatttccaagaacgtttagcattagggaaaaaactaggattaaccaaggaagaactagccttctatgaagctctatctcaaaatcaaagtgcaaaagatttgatgggtgatgaagtgctttctaaactggcgaaagaaatcacggaaacacttagaaaatcggtcacaatcgactggcagtacaaagaagcggtgcgggcaagaattagattactcgttcgacgtgccttacaaaaatataaatacccgcctgataaacaggaagaagcggtaacttatgtgattaaacaagctgaagaaattgctgaggatttaactggtttataa

SEQ ID NO: 22289 - DNA, 1380 bp, Haemophilus influenzae
atgagtgattggaaagagtattctctgggtgatatatcaagaaatatatcaagaaggtttgactttaatgcatacccaaatgttgtatttattaacactggggatgtattaaataataaatttctacattgcgagatatcaaacgtcaaagatttaccagggcaagctaagaaagccataaaaaaaggcgatattctatatagtgaaataagaccaggtaatggacgatatttatttgtagataatgatttagacaattatgttgtttccacaaaatttatggtaattgagcctaatgctaatattgtattaccagaattcctatttttactactaattagcaatgaaacaaccgaatattttaaaatgatagctgaatcaagatctggaacatttccacagatcacatttgattcggtttcaagtttatctttaaatataccagataaagaaacacaacaaaaaatccttgatattattaccccattagatgacaaaatagaactcaacacccaaatcaaccaaaccttggaacaaatcgcccaagcgctgtttaaaagctggtttgtcgatttcgatcccgtgcgtgccaaagcccaagccctttcggacggcatgagccttgaacaagcggaacttgccgccatgcaggcaatcagcggaaaaacacccgaagaactgaccgcactttcacaaacacagcctgaccgctacgccgaattagccgaaaccgccaaagcgtttccgtgtgagatggtggaggttgatggggtggaggttgatggggttgaggtgccgagggggtgggaaatgaaagccttatcagatttaggtcaaattatctgcgggaaaacaccatcaaaatccaacaaagaattttatggtgatgatgtgccatttattaagattccagatatgcacaatcaagtatttattactcaaacaacagataacttgagtgtagtaggtgcaaattaccaatctaaaaaatatattccagcaaaaagcatttgtgtaagttgtattgctactgtcggattggtttcaatgacatctaagccatctcatacaaaccaacaaattaattcaattattccagatgatgaacaatcctgtgagtttttatatttatcgttaaaacagccatcaatgacaaaatatctaaaagatttggcaagtggtggcactgcaactttaaatttaaacacaagcacattctctaaaatagagataattacaccatcaaaagaaattatctatatttttcaaaaaaaagttgtttctatttttgaaaagaccttatcaaattctattgaaaataagagactaactgaaataagagatttattgctgcctagattgttgaatggggaaatttaa

SEQ ID NO: 22290 - DNA, 1332 bp, Haemophilus influenzae
gtgccagcttctgcacgttggcaagccttacaagaagtctctattctcaacactggggcagaattgccttggggtggaaaattttctggtgtggcaaaactgattgacgatgccttcgatgccattgaaaaagacaacgaaaaactcaaaggcgtactccaacgcatcagcggctatgccgtaaacgaagacaccctgcgcgggctgattatcctcttctccgatacccactttacccgcccaacttacaacggcgagcccgtacatttaggcgcaaaagatattctcggccacgtttacgaatatttcctcagcagatttgctcaagccgaaggcaaacgcagtgggcaatattttacaccgaaatccattgtttccctgattgtcgaaatgctcgaaccctattcaggacgcgtgtatgacccagccatgggcagtggcggctttttcgtgcaaaccgaacgctttatcaccgcccatcaaggcaacatcaacaacgtttccatctacgggcaagaattcaacccgaccacttggaaactcgccgccatgaatatggcgattcgcggcattgattacgacttcggcaaatacaacgccgacagtttcacccagccacaacacatcgacaaaaagatggattttattatggcgaatccgcattttaatgataaagaatggtggaatgaatcccttgccgatgatccacgttgggcatacggcacaccgcccaaaggcaacgccaacttcgcttggctgcaacacatgatttaccacctctcgccaaacggtaaaatagcattattgcttgccaacggctctatgagcagccaaaccaacaacgaaggcgaaatccgcaaagccatcatcaatgccgacctggtcgaatgtatggttgccctgcccggccagctctttaccaacaccaaaatccccgcctgcatttggtttttaaaccgcaacaaaaagcgcaaaggcgaagtattatttatcgatgcccgccaaatcggctatatgaaagaccgcgtattgcgtgatttcaccgctgacgacatcgccaaaattgccgataccctccacgcttggcaaacatcagacggctacgaagaccaagccgctttctgcaaatccgcgactttagaagagattaaaaataacgacttcgtcctcacaccagggcgctacgtcggcactgcagaacaagaagacgacggcgtgccatttgcagaaaaaatgcaaaatctgaccgctcttttgaaggagcaatttgcaaaaagtgcggaattggaagctgagattaagaagaatttagggggattgggttatgagtga

SEQ ID NO: 22291 - DNA, 939 bp, Haemophilus influenzae
atgtctagacctcgtaaacgctggcgtgatgttgatggtgtgtttttgttggataaaccacaaggcatgtcatcaaatgacattatgcaaaaggtaaagcgtttatttcaagcgaacaaagccgggcatactggcgcgctcgatccgttggctacgggaatgttgccgatttgcttgggggaagcaactaagttttcacaatttttgcttgatgccgataagcgttatcttgttacggcaaaattaggcgaacgtaccgatacttccgatgcagaagggcaagtcgtggaaactcgtgaagttaatcttgaaactcagcaaattttgaccgcacttgaacaatttcgtggcgatattttgcaagtsccgacaatgttttccgcactaaaacataacggcaaaccgctttatgaatatgcgcgccaaggtattaccgttgagcgtgaggcacgtccaattacgatttttgaacttaattttattgaatataatgcgccttttttaaccttagaagtgcattgttcaaaaggcacttatattcgcaccttagtagatgatttaggtgaagtgctaggttgtggcgcgcatgtgacaatgttacgccgtacagccgtagcggattaccccgtagcagaaatgatgccaatcaatgagttacaactgctcgctgaaagttttccattaagtgaattagatcgtctattactgccaaccgataccgcagtaagtaaattgcccgctttgcatttggatgcagagcagagtaaagccattggttttggtcagcgagtgaaatttgctaacgaacagcaattaagtggtcaagtgcggttattttcagcggagaatttattcttaggcgtacttaatcgacgggaatattattcgcccacaacgattaattacacaatccgcataacttcattgcctttcctgtaa

SEQ ID NO: 22292 - DNA, 1944 bp, Haemophilus influenzae
gtggcattaattagtttaaccaatggatacctttcctttagtgatgcgcctttgttggatcacgcagaactacatattgaaccgaatgaatgtgtttgtttagttgggcgtaacggcgcaggtaaatcaactttattgaaaatcatcgcaggcgatgtgcttatggatgatggcaaaatccaatacgaaaaagatcttgtggtttctcgtttagaacaagacccaccgcgtaatgcacaaggcaatatttttgattatgtcgcggaaggcgtagggcatttaacggatttattgaaagaatatcatcagatttctgttcaattggaagaaaattacagtgatcaaattttaagtcaattagagcaagttcaggctaaattagaacacgctgatggctggcgatttgaaaataaaatcaatgaagtattgttaaaactaggtttaaatccaaacacaaaattatccgcactttcgggcggttggttacgcaaagcggcactagcacgtgcattggtgtgcgatcctgatgtgttattacttgatgaaccaaccaaccacttggatgtggaagctattgaatggctggaaaatttcttactggatttccaaggtagcattgtatttatttcccatgaccgttcttttattcgcaaaatggcaacacgcattgtggatttagatcgcggtcaattagtgtcttatccgggcaattacgatttatatttaactacgaaagaagaaaatctacgtgttgaagccttgcaaaatgaattatttgataaacgtcttgcacaggaagaagtgtggattcgccaaggtatcaaggctcgccgtacaagaaatgaagggcgagtgcgagcattaaaagtgatgcgtgaggaacgccgccaacgccgtgacgtaatgggaacagccaaattacagttagatacctcaagtcgttctggcaaaattgtctttgaaatggaagatgtgagctatgaaatcgcaggaaaaaccttgttaaaagatttttcaacaacgattttacgtggagacaaaattgcgcttgttgggccaaatggctgtgggaaaaccacgttcattaaattattgctgggggaaattcagccaacatcaggaaaaatccgttgtggtaccaaattagagattgcttattttgaccaataccgtgctgatttagatcctgaaaaaaccgtaatggataatgtggcagatggtaaacaagatattgaaatcaatggtgtaaaacgtcatgtgctagggtatttgcaagatttcttgttcccgccaaaacgagcaatgaccccagttaaagccttatcggggggagaacgaaatcgtttattactcgcaaaattattactcaaaccaaataatttattgattcttgacgaaccaaccaatgatcttgatgtagaaacattggagcttttagaagaaattttgacggattatcaaggcacattgttaattgtgagccacgaccgtcaatttatcgataatactgccacagaatgttatttattcgaaggtaaagggcatttgaataagtatgtgggagggttctttgatgctaaacagcaacaagccaatttctgggcaagtaaagcagtggaagagcaggctaaagcgaagaaatctgaaccactaaaagaagaaagtgcggtgaaaaatgaccgcacttctaagccgaaatccgtgaaactttcttataaagaacaacgagagctagaacaacttccacaactattggaagagttggaaactaaaatcaccgtacttcaagctgaaatagccgatccagcatttttccaacaagctcacgatattaccgacgctaaattaaaagcattggcggatactgaagccgaattagaaacagcatttttacgctgggaagaattagaagaaaagaaaaatttggttgaaggtaaagcttaa

SEQ ID NO: 22293 - DNA, 1434 bp, Haemophilus influenzae
atgaattacattcagttacagaggtttaatatgtctaaagtggcatcaattgttgatgtattacaagggaaagtggcgattggtgaaaccgtcactgtgcgtggttgggttcgtacccgtcgcgattctaaagcaggcttatctttcttagcggtttatgacggttcttgttttgatccaattcaagcgattattaataacgatattgaaaattacgaaagcgaaattttacgtttaacaacaggctgttctgtgattgtaaccggtaaagtcgttgaatcacctgcagaaggacaagcggttgaattacaagcagaaaaagtggaagtgacagggtttgttgaagatcctgatacttacccaatggcagcaaaacgccactctatcgaatatttacgcgaagtagctcacttacgccctcgtaccaatattattggcgcggtcgcacgtgttcgccattgcttatctcaagcaattcaccgtttcttccatgagcaaggtttctactgggtggcaaccccattaattactgcatcagacactgaaggtgcgggtgaaatgttccgtgtttctacacttgatttagaaaatcttccacgtagtgaaaatggaaaagttgatttcagccaagatttcttcggtaaagaatcatttttaacggtttcaggtcagttaaacggcgaaacctatgcttgtgcattaagcaaaatttatacttttggcccaacattccgtgcagaaaactctaataccacccgtcacttagcggaattctggatggttgaacccgaagttgcatttgcaaccttagcggataacgcaaaacttgcagaagatatgttgaaatacgtattccgtgcagtattagcagagcgtaaagacgacttacaattctttgaaaaacatgtagataaagatgttattactcgtttagaaaactttgtaaactcagattttgcgcaaattgactataccgatgccattgatgtgttattaaaatctggtaagaaatttgaattccctgtttcttggggcattgatctttcttctgaacacgaacgtttcttagcggaagaatatttcaaatcaccagttgtggtaaaaaactatccaaaagacattaaagcattctatatgcgtttaaatgatgatgaaaaaactgtggcggcaatggacgtgttagccccaggaattggtgaaatcatcggtggttcacaacgtgaagaacgtttagaggtgcttgataaacgcatggaagaaatgggattaaatccagatgattattggtggtatcgcgatcttcgtaaatacggcagtgttccacattctggttttggtcttggttttgaacgcttaattgtctatgtaactggcgtgcaaaatattcgtgatgtaattccattcccacgcgcaccaagaaatgcgaatttctaa

SEQ ID NO: 22294 - DNA, 522 bp, Haemophilus influenzae
atgttaaaatctcgggtcaaatcattatggctaataataggaaaaaatatgaaagttttagaaggctcagttgcagcacctaatgcaaaagttgcagtagtaattgctcgttttaacagttttattaatgaaagtttattagaaggcgcaattgatgcattaaaacgtatcggccaagtgaaagatgaaaatatcactatcgtgcgtaccccgggtgcgtatgagttgccattagttgctcgtcgtttagctgaaagtaaaaaatttgatgcgattgtggcattaggtacagttatccgtggtggtacagcacattttgaatatgtagcaggagaagcaagcagcggtttaggaaaagttgcaatggatgctgaaatccctgtcgcttttggtgtattaaccacagaaaatattgaacaggcgattgaacgtgctggtactaaagcaggaaataaaggtgcagaagcagccttaactgcacttgaaatggttaatcttattcaacaaattgatgcggcataa

SEQ ID NO: 22295 - DNA, 435 bp, Haemophilus influenzae
atgacagaacaaaaacaagtgaaaaagccttctgctcgtcgtcgtgcgcgtgagtgtactgttcaagccttgtattcttgggcggtatccggtaatactgcagaacaagtggaattagcctttgtgttagatcaagatatggatggggtagataaaccttacttccgtaaattatttcgtcaaacaatagaaaatattgaaaccgttgatttttcaatttcgccttatattgaccgcgcttttgatgagcttgatcctattgaaacggcaattttacgtttggctgtttatgaattacgctttgaattagatgtgccatataaagtggttatcaatgaagcgattgaagtggcaaaagtattcggtgcagatgaaagccataaatatatcaatggcgtacttgataaaatcgcaccagcattagggcgtaaataa

SEQ ID NO: 22296 - DNA, 1038 bp, Haemophilus influenzae
atggcgcgcgtttttaatgcgtgccttttcttttataagataggtggaaaaatggcaatgggtgaatttgatttaattaaacgatattttcagcaacaaatattagttgatgattccgttcaattatctattggcgacgattgtgcgctggtttccgtgccagagaattatcagcttgccattacgaccgatacaatggtggaaaatacgcattttttaccaaccatttcacctgaggacttggcttataaggcggttgcaacaaatttaagtgatcttgctgcaatgggggcacagccaaaatgggtttcactggcattaactttgccaaatgtagacgaaaattggatttcaacatttagccaaagtttattacacacgttaaaacaatacaacgtcacattaattggtggcgatactacaaaaggtaatttgtctattacgattacggcacaaggttttgtcgaaaaaaacaaaggaatttgtcggcataaagcacaaatcggtgatttaatttatgtttcaagcactttaggcgatagcgcggcaggtttaacacaaattttattgggcaaaagtgcggttgattctgatgatgtttttttgcaacaacgacatcttagacccacacctagaattgaacttgggcaggcgttaattggcattgctcatgttgccattgatctttccgatgggctaatatctgatttagggcatattcttgaacgaagtcaatgtagtgctgaagttgaattgactgcattacctctttcatcatcgattttaaataaatatgatcgcactcaagcggaacaatttgccttaagtggtggcgaagactatgaactttgttttaccataccgcccgaatataaagatgaattagaattacgcttgaaaaaactgaacgtgccttgcacttgtattggtaaaattaatgaaaagtgcggtgacttttctccccgttttttacgggatggaaaacctgtgaatataactttttcaagcggtttcgatcattttaaggaatcaaaatga

SEQ ID NO: 22297 - DNA, 813 bp, Haemophilus influenzae
atgacattaaaaattgcaatcgctggtgctggcggaagaatggggtgtcaattaattcaagcggttcattctgcggaaggcgtagaactaggtgcagcttttgaacgcaaaggatcatctttagttgggacggatgcgggagaattggcgggaattggtcatcttggcgttgcagtttcagacgatcttgaaagtcaaaaagataaattcgatttattaatcgattttacccgaccagaaggcacccttgaacatattgcattttgcgtagcgaataataaaaaaatggtgatcggtacaacaggttttgatgaaaatggtaaagtggcgattaaagcagcttcagataaaattgctattgtgtttgcatcaaatttcagtgttggcgtgaatttagtcttcaagcttttagaaaaagcggcaaaagtgatgggggattattgcgatattgaagtgatcgaagctcatcaccgtcataaagttgatgcgccatctggcactgcactttctatgggcgaacatatcgcaaaaaccttaggtcgcgatttaaaaactcacggagtcttctgccgtgaaggaatcacaggcgaacgtaaacgcgatgaaattggtttttcaactattcgtgcttcggatgtggtgggggaacactcggtttggtttgcagatattggcgaacgtgtagaaatttcccataaagcatcaagccgaatgactttcgctaatggtgcagtgcgtgctggtaaatggttagaaaataaggcgaatggcttatttgatatgaccgatgtattagatttaaataatttataa

SEQ ID NO: 22298 - DNA, 990 bp, Haemophilus influenzae
atgcaacatctgaacgagcttgttgagaaagcgaaattagcgattgaatccattcaggataaaagtttaacggctttggatgaaatccgtgtcgaatattttggtaagaaagggcatttcacgcaattaatgcaagagttgcgtaacgtgtcagctgaagaacgtcctgcgatgggcgcaaaaattaacgaagcaaaacaagctgcgttagaatttttaaatgcaaaaaaaacggagtgggaacaggctgaacttaactcaaaattagaaaaagaacgtgtagatgtcagtttacctggtcgcaaagttgaaaccggtggcttacacccagttaccatgacgattaatcgcgtaacaaaatttttctcagaacttggcttttcagttgaaaatggtcctgaaattgaaagtgattattacaacttcgatgcgttaaatattcctaaacatcacccagcacgtgccgatcacgatactttctggtttaatccagaattattacttcgtactcaaacttctggcgtgcaaattcgtactatggaaaaaatgcagccaccaattcgcattatggctccaggacgtgtatatcgtaatgactacgatcaaacgcatacgccaatgttccatcaaattgaactactttatgtggataaaaaagcaaatttcacagaattaaaaggcttattacacgatttcttacgcgctttctttgaagaagatttacaagtacgtttccgtccatcttatttcccattcacagagccttcagcggaagtggatgtgatggggaaaaacggtaaatggttagaagtgttgggctgcggtatggtgcatccaaatgtgttgcgtaatgttggtattgatccgaatgaatattctggttttgcagtgggaatgggcgttgagcgtttaacaatgttacgttataacgtaacagatttacgttcgttctttgaaaacgacttacgtttcttaaaacaatttaagtaa

SEQ ID NO: 22299 - DNA, 2388 bp, Haemophilus influenzae
atgaaatttagtgaacagtgggtaagagaatgggtgaaccctgcggtgtccaccgagcaattatgcgagcaaattaccatgcttggcttagaagtagatggcgtggaagccgttgcgggtacatttaatggtgtcgttgttggtgaagtggtggaatgtgcacaacatccagatgcagataaattacgtgtaactaaagtgaacgtaggcggtgatcgtttattggatatcgtgtgcggtgcaccaaattgtcgtcaaggcttaaaagttgcttgcgcaacagaaggtgcggtattacctggcgatttcaaaattaagaaaacgaaattacgtggtcagccatcagaggggatgctttgttcattttctgaattaggtattgatgttgaagctgatggtattattgaattgccacttgatgcaccaattggtactgatttacgtgaatatttagctttagatgataatgccatcgaaattagcttaacgccaaaccgtgcagattgtttgagcattgcaggtattgcgcgtgaaattggtgtggtaaataaacaactcgtaaatcaactgcactttgaagcagcgccagcaacaatttctgataaagttcaaattgatttacaagcaccagaagcttgcccgcgttatttattacgtgtgataaagaacgtcaatgtaaaagcaccatcgccaatgtggatgcaagaaaaattgcgtcgttgtggtattcgttctatcgatcctattgtcgatattactaactatattttgcttgagttcggtcagccaatgcacgcgtttgatgcggctaaagttacacaacctgttcaagttcgcttcgcgaaagagggggaagaattagtattattagatggctcaaccgcaaaacttcaatcaaatacgttattaattgctgaccaaaatgggcctttagcaatggcagggatctttggtggtgcagccagtggcgtgaatagtgaaacgaaagatgtgattttagaatccgcatttttcgctccattagcgattgcaggccgtgcaagacaatatggtttacatacggatgcatcgcaccgttttgaacgtggtgtggattttgaattagcgcgtaaagcaatggaacgagcaacggcattattacttgaaatctgtggtggtgaagcaggtgagatttgtgaagcaagcagtgaaactcatcttcctaaagtcaatacagttcaacttcgccgtagtaaattagatgcacttttaggtcatcacattgaaacaggaagcgtaacggaaattttccaccgtcttggttttgatgttacttatgcaaatgatatttggacggtaacttctgcaagctggcgttttgatattgaaatcgaagaagatttaattgaagaagtggcgcgtatttatggttataacagcattccaaacaatgcgccattagcgcatctctgcatgcgtgagcacaaagaatctgatttagatttagctcgaattaagaccgcacttgtggatgcagattatcaagaagctattacttatagctttgtggatccaaaaattcaaagtttattacatccacatcaagaagcacttgtattgccaaacccaatttctgtggaaatgtccgcaatgcgcgtgtctttaatcagcggtttattaggtgcagtgctttataaccaaaatcgccaacaatcccgtgttcgtttatttgaaacaggattacgttttgtgccagatgccaatgctgaatttggcgtgcgtcaagaatttgttttaagtgcggtgattactggaacggcaaaatctgaacattgggcaggtaaagcagagtctgtagatttctttgatcttaaaggcgatttagaatcagtactttctttaacagaaggtggtcatagagttcgttttgttgcaaaacaatttgatgcattacaccctggccaatctgctgctattgaattagatggtcaagaaattggttttattggtgcaattcatccatctattagccaaaaacttggcttaaatggcaaaacttttgtatttgaaattctttggaatgcaattgcggcacgtaatgtggtgcaagcaaaagaaatttctaaattcccagcaaaccgtcgtgatttagctttagtcgtcgcggatagcgtaccagcaggggaattaatcgcagcatgtaaacaagcaggtggcgaaaaattggtgcaagtgaacttgttcgatgtatatcaaggtgtgggcgtcgctgaaggctataagagtttagcgattagcttgactgtccaagataatgaaaaaacacttgaagatgaagaaattaatgcagtgatttcagcagtattagcggaggtaaaacaacgctttaatgctgaattaagggattaa

SEQ ID NO: 22300 - DNA, 408 bp, Haemophilus influenzae
atggcagagcaagcagagcttgatcttgttgaaattagcccaaatgcagagccgccggtttgtcgcattatgaactacggtaaattcctttacgaaaaaagtaaaaccgctaaagaacaaaagaaaaaacaaaaagttgtccaagttaaggaaattaaattccgcccaggcacagacgaaggtgactatcaagttaaattacgtagcttaatccgtttcttagaagacggtgacaaagcgaaaattaccgtgcgtttccgcggtcgtgaaatggctcatcaagacatcggtttagatgtgttagagcgcgtaaaaaatgatttagctgaaatttcagtggttgaatctgcaccaggtaaattagaaggccgtcaggctgtaatggtgttagcaccgaagaaaaaataa

SEQ ID NO: 22301 - DNA, 270 bp, Haemophilus influenzae
gtgcttccaagtaactttataagttcgcctgattatgttgttttaaacgaaaaatgcggagttattttaacaatgcctaaaatcaaaacagtacgcggcgcagcgaagcgcttcaaaaaaactgcttctggtggtttcaagcgtaaacaatctcacttacgtcatattttgactaaaaaaacaactaaacgtaaacgtcatttacgtcataaatcaatggttgcgaaagcagaccaagttttagtagtagcttgcttaccatacgcataa

SEQ ID NO: 22302 - DNA, 354 bp, Haemophilus influenzae
atggctcgtgtaaaacgtggtgttattgcaagagcacgccataagaaagttcttaaggctgctaaaggttattatggtgcacgttcacgcgtgtatcgcgttgctttccaagcggtgatcaaagctggtcaatacgcataccgtgaccgtcgtcagcgtaaacgtcaattccgtcaattatggattgcacgtatcaacgctgcagcgcgtcaaaatggtttatcttatagcaaatttatcaacggcttgaaaaaagcatctgttgaaatcgaccgtaagattcttgctgatatcgctgtattcgacaaagtagcgttcgctgcattagttgaaaaagcaaaatctgcactttaa

SEQ ID NO: 22303 - DNA, 1923 bp, Haemophilus influenzae
atgttatctgtattacacaaacttaaagagctgcgcattctttctcaaggtgattattattttgctaagttgatagctgataaacaatgtcatacggattatgcggaaccagtcaaaaatttagccatattattagccgcactttgtagttggcgttatacgcagggaaatacttgcagccaattagatcgctatttagaacataatttatttggcttggcttatcgcactacagaagaagattatttagctgaaattcatgaaaagattggttatttacccgttgaagattggcaaaatgcgttgtgcgggcatatggcatttacgcaagatcccgtcaatcaaattgcaccaatggcatttcaatttggcgcgttgtatttctatcgcgcttggcaagatgaatatcgcatcgtgcaatatataaaaaataccttaaaaaaataccgcactttagccttttcttatgatgaaattcatcaaaaattagagaaatatttccctgaaaaacaggaaaaaacagattggcaaaaagtggcagtggcgacagcgattaaaagtccattttcgattattacaggcggcccaggaacaggaaaaaccacgacagttacgcgtttattgctcgttctacaagaattatttgattgtaaattacacatcaaattggttgcgccgactggcaaggctgcatctcgtttggaagagtcgattaaaaatgcgttaggttttatgcaagaaaaaatgaatgtatcccattcacttttcaatgcgattccacaaaaagccagcaccttgcatagtttactgggcgtgaatgcctttaatgattacacacgatataacagccataaccctttgcagttggatgtattagttgttgatgaaacatcaatgattgatttaccaatgatggcaaaacttatcaatgcattaaagcccgaaactcgattaattttattaggcgatcaggcgcaattagcctctgttgaggcgggggctgtattgggggaattggctcaatttgttactcaaccttatagtcatgaacaagccgcatacttactagcaacaacaggctacaaagtagaaggttccgattgttcaaatccaatacgtgattgcttatgccatctaacagaaagtcgccgttttgataaagattcaggcattggcaagttgtccgaattcattcaaaaaggcaaagcagacgatagccttgagttatttgaccattatccgcaagaattgcactttaattccttaaatgatgaaggcgatgcggtcaatcaagtggtaaaaagtgcggtggaaaattaccgcactttcttaaaaatgttggacgatttacgtaaacaaaaaattgatcctaacgctaaaaatgaacaaggcatttcctatgccgaagctattcaagtgcaatttaattctgtgagatttttaaccgcacttcgtaataacaatttaggtgtcgaaaatctcaataaagaaattgcgttagcgttgcgagagcaaaaattgctttggttccgtaatgaacaagattggtatatcggcaagccaattatgattactgaaaacgatcataacgttcgcctttataacggcgatattggactatgcttggcaaatggcaaagtatggtttggcaatcgagaagtgctgacaaaccgaattccagcgcacgaacccgcttttatgatgacgattcataaatctcaaggttcagaatttaaacataccgtcatggtgcttccaacagaagtaaatccagtattgtcgcgagaattagttttcacgggtgtcactcgtgcaaaaaaagaacttactgtatttgctgatgaaaaaatatggaaaacagcaattcgccagaccgtcaaacgccagagcggattgggaaaattattggaagatttaaattag

SEQ ID NO: 22304 - DNA, 1806 bp, Haemophilus influenzae
gtggtcaatttttctagaaagagaccagccgtgagttcattattttctcaacaacaagctattgagcaatctttaaattggcaggcattacaacctgatttggtaattcaagattttcctttagaaccagtgaatttctgggcgttacaaccgaatgctacacagggtatcgatttatttttacgtcatccgacacgttccttgctaatgatgaaagtgggcgaacctgttgaatatgcggagttattacaaaattttatatcgcaaaatcatcataaagtgcggtcaatttttggtgtaaattatgtgatagagcagggcgactctttttcttttcctcatgtttatactgagccagcaaaatctttagatgataattttgctagtcaaggggaggcgttaagcgcattgtattgcgatcaattccagcttttcggtagttttcggattcatccacgttcacaagatattcaattagtgccgggattggtgcataaggctaatggtggcgttttgattttaagtgcggcaacattgttatctcaatttgatttatgggggcgattaaaacaaattctgcaaacccagacttttgactggtattcagcccatccatttaaaaatttaccttgtgatataccaagctatgcgctgaacttaaaagtgattgtacttggtaatcgtactgaattagccactttggctgagttagaagaaaatctttattctttcgccgattatgctgaaattgaaagttatatttctgtagctgaagtggaggaacaaaaaacttgggcgggttatgtacaacaaatggctcaagagcaaaatattgagctagattttcttgctttaaataaactctatcaattattagttcgtgaaagtgaaaatcgctttttaattaatgcatctcctctcaaattaaaagaaatattacaggatgcctcaacttttactgaaaaaacagcattaagtgcggtggattttgagggtatttttcaacaaaaattagcgcaatatggtttcttaaaagaacaaacttatgccgatattttaaacgagcaagtttatgtcgaaacgcaaggcgaaattgttggacaaattaatgggctttcggtaattgaatatcctggtacgccagtatgtttcggcgaaccttcgcgtattagttgtattgtgcaatttggcgatggggaagtgattgatgttgaaagaaaaaatgaactagcgggaaatattcacggtaaaggaatgatgattgctcaggcttgtctttccaatatcttagatttgccctcgcaattgccattttctgcatcattggtgtttgaacagtcttatggagaaattgatggcgatagtgcatctttggcgattttttgtgtgttagtaagtgctttagccgatttgcctttgcctcaacatatcgcaattacaggatcaattgatcaatttggacttgttcattctgttggtggtgtaaatgataaaattgaaggcttttttactatttgccaacgtcgtggtttgactggaaaacaaggtgtaatcattccaatgacaacaatccagcaactgagtttatctgatgacgtgaaaagtgcggtaaaaaatggcgagttttttatttatcctgtggaagatatttatcaggcttgtgaattgttatttgggcgtgatttgttagatgaaaacaaagattatacagaaaaaactgagtctttatctcgtcttattcaacgtcgtattgagggacgtgccgattctgaacgaaaaagtttttggcattttttccgctcctaa

SEQ ID NO: 22305 - DNA, 270 bp, Haemophilus influenzae
atgtctctaagtactgaaaaaaaagcagcaatcgttgctgaatttggtcgtgatgcgaaagataccggttcttctgaagttcaaatcgcattattaactgcacaaatcaaccacttacaaactcactttgcagagcacaaaaaagaccaccatggtcgtcgtggtttattacgtatggtttctcgtcgtcgtaaacttttagactacttaaaacgtactgatcttgctttataccaaagcactatcgctcgtttaggtttacgtcgctaa

SEQ ID NO: 22306 - DNA, 1440 bp, Haemophilus influenzae
atgaaaaaattatcttcaatttccaccgcacttggttcctttttactttcagtgagttttagccttccaaccttcgccaatattaatgtttcagatttaacacaaaaactgcctgaaggctctaacgtaggtttcatcgccaaaaatataaatcaaaaccaaattattgctgattataatggctcaacctttatgctttctgcaagcacacaaaaagtttttacagccgttgccgctaaacttgcattagacgatcaattccaatttgagaccgcacttttgagtaatgggaaaattcaaaatgggaatttagatggcaacttaatcgtgcgtttcacaggcgatcctgatctcacaagaggtcagctttatagcttacttgccgaattaaaaaaacaaggcatcaaaaaaattaatggcgatttagtattagatacctctgttttttctagtcacgaccgaggattaggttggatttggaacgatctcacaatgtgtttcaactctccaccagcagctgcaaatattgataacaactgtttttatgcggaactagatgcgaataaaaatccaggtgaaatagtaaaaattaatgtgcctgcacaatttcctattcaagtgttcggacaagtttatgtagcggatagcaatgaagcgccttattgtcagctcgatgttgttgtacacgacaataatcgctatcaagtaaaaggatgtttagcccgtcaatataaaccttttggcttaagttttgccgtgcaaaatacggatgcttatgctgctgagattattcaacgtcaattaagacaattaggtattgagttcaatggcaaagtcttgttaccccaaaaaccacaacaaggtcagctattagcgaaacatttatcaaaaccattaccagatttattgaaaaaaatgatgaaaaaatccgataaccaaattgccgattcattattccgagcggtggcattcaattactataaacgccccgcctcctttcaattaggcacattagcggttaaatccatattgcaaaaacaaggaattcgttttggtaatagcattttagccgatggttcgggtctatctcgccataatcttgtggcacctaaaacgatgctatccgttttagaatacatcgccaaaaacgaagataaactacatttaatggaaactttccccatcgcaggtgtagatggcacgatcagtgggcgaggtggattaattagcccgccattagtgaaaaacgtgattgctaaaactggttctttgaaaggcgtttataacctagctggctttatgacaaatgcgcgaggggaaaaagtggcatttgtacaatttattaatggctactcaactggcgatttagaaagcaaaacaaaacgtgccccattagtacaattcgagcgtaatttatataacgaactctataaatattaa

SEQ ID NO: 22307 - DNA, 1908 bp, Haemophilus influenzae
atggtcaaaaatctagtgctttgggtggtagtggcagtcattatgatgacagcataccaaagtttcaattcatcttcggtagaaaattctactgattatacaacctttgtttacgatgtaagcaacggacaagtgacagcggcacgttttgatgccaatgaaattacggtaacgaaaaccgatggttctaaatattcaaccgtaatgccaccacttgaagacaaaaaattgcttgatgatttattaagcaaaaaagtcaaagtggaaggcacgccatttgaaagacgtggttttttatcccaaattttaatttcttggttcccaatgttattccttgttggtgtatgggtattctttatgcgtcaaatgcaaggcggtggcggcaaagcgatgagctttggtaaaagccgagccaaaatgttgaatcaagatcagattaaggtgacttttgcggatgtggctggttgcgatgaagcaaaagaagaagtgggggaaatcgttgatttcttgcgtgatccgaataaattccaaaatttgggcggtaaaattccaaaaggtattttgatggtagggcctccaggtactggtaaaactttacttgctcgtgcgattgcgggagaggcaaaagttccattcttcactatttctggctctgatttcgtagaaatgtttgtaggtgttggcgcatcacgtgtacgtgatatgtttgaacaggctaagaaaaatgcaccttgcttaatcttcattgatgaaatcgatgcagtgggtcgccaacgtggtgcgggcttaggtggcggacacgatgagcgtgaacaaaccttaaaccaaatgctagttgaaatggatggctttagcggtaatgacggtgtaattgttattgcagcaactaaccgtccagatgtgcttgatccagctttaacccgtccaggccgttttgaccggcaagtagttgttggcttacctgatgtgaaaggtcgtgagcaaatcttaaaagtgcatatgcgtaaagtgtctgttgcgcaagatgttgatgcaatgacgttagcgcgtggtacgccgggctattctggtgcagatttagcaaatttagtcaatgaggcggctttgtttgctgctcgagtgaataaacgtacggtaaccatgcttgagtttgaaaaagcgaaagataaaatcaatatggggccagagcgtcgcactatgattatgacggataagcaaaaagaatccactgcttatcatgaagctggtcatgcgattgtggggtatttagtgcctgaacacgatcctgttcacaaagtgaccattattcctcgaggacgtgccttgggtgtgacattcttcttacctgagggcgatcaaattagtattagccaaaaacaattagaaagtaagctttctaccttgtatgcgggtcgtttagcggaagatttgatttacggcgaagaaaatatctcaacaggtgcatcaaatgatattaaagtcgcaactaatattgcgcgtaatatggtaacgcaatggggattctctgaaaagttaggtccgattctttatacggaagatgagggcgaggttttcttaggtcgttcaatggcgaaagcgaaacatatgtcagatgaaactgcgcattcgattgatgaagaagtgcgtgcaattgtaaatcgtaactatgcgagagcaagagagattttgatcgacaatatggatattcttcatgcgatgaaagatgcattagtcaaatatgaaactattgaagaagaacaaattaaacaattgatgaatcgcgaacctgtcacaccgccatcaggttggggagagccgaaaactcagcaggctgcttatgcaaattcaacaacgaatgatacaaagcccgaaagtgcggtagaaaataccgatgattttaatgtttaa

SEQ ID NO: 22308 - DNA, 828 bp, Haemophilus influenzae
atgaaactttacgcaaataataaatgtcttgatttaagcgtgcctcaaattatggggattcttaattttacgcctgattctttttctgatagcggacagttttttagtctagataaagcactttttcaagttgaaaaaatgctagaagagggggcgacaattattgatattggtggagaatccactcgtccgaatgcggatgaagtttctgaacaagaggaattgcatcgtgttgtgccagtagtggaggcggtgcgaaaccgttttgattgctggatttctgttgattcctcaaaagctgttgtgatgcgtgaagcggcaaatgttggaatggatttgattaatgatattcgtgctttgcaagagccgaatgcgttagaaacggcggtaaaactggctttacctgtttgtattatgcatatgcaagggcaacctcgcacgatgcaagcaaatccttattatgaaaatgtcgtgcaagatgtattggcttttttacaaaaacgtactaatgaatgcctttctgctggcattaaaaaagaaaatttaatttgggatatgggctttggctttggcaaatctgtacagcataattatcaattattacaaaatctgaatgaattttgtcagataggttatcccgtattagcagggttatctcgcaaatcaatgattggcgcagtgcttgataaacctgttgatcaaagaataattggcagtgcggcaggtgcgcttattgcagtgcaaaaaggtgcaaaaattttacgcgtacatgatgttgctgcaacatcagatatgctcaaagtttggcaggcaacagcaaatgcctga

SEQ ID NO: 22309 - DNA, 1338 bp, Haemophilus influenzae
atggcaaatcgtaaatattttggaacagatggtgtacgtggaaaagtaggtgcttacccaattacaccagatttcgcattaaaattaggttgggctgcgggaaaagtgttggcttctcaaggttcgaaaatggttttaattggtaaagacacccgaatttctggatacatgttggaatcagcccttgaagcaggtttggctgctgcggggttatctgctgcatttaccggccctatgccgacacctgcaattgcttatttaaccagaactttccgagctgaagcaggtatcgtgatctcagcctctcataatccttattatgataatgggattaaattcttttcagcaaaaggcactaaattacctgatgaaattgaagaagctattgaagcaatgttagagcaaccgatggattgtgtggaatctgctgaattaggtaaagccagccgtattaatgatgcagcaggacgctacattgagttttgtaaaggtacattccccgctcatttaggcttggaaggttataagatcgtggtagattgtgcaaatggtgcaacttaccatattgcccctaatgtactaagagaacttggtgcggaagttattgaaattggtacggatccaaatggtttaaacattaatgaaaaatgtggcgcaactgatgtgactgcattgcaagctaaagttgttgaaacgaaagctgatgttggtttggcttatgatggcgatggtgaccgcattatgatggtggatcatttaggaaataaagtcgatggcgaccaaattctctttattattgcgcgtgaagcattgcgctcaggtcaattaaaaggcggtgtcgttggcaccttaatgagtaatatgagcttagagattgcgttgaaaatgcttggtgttcccttcttacgtgcaaacgtgggagaccgttatgtattggaaaaaatggttgaaaatgattggacgcttgggggggagaattctggacatattatcattgcggataagaatacaacgggtgatggcattgttgcgtcattggctgtattggcggcgatggcacagcataaattatcattaaatgaattagcaagtgcggttaaattattccctcaagtgttaatcaatgtacgttttgcgggtggggaaaatccacttgaaagtgatgctgtaaaatctgttgccgcagaggttgaaaaacgtttagaaggtaaaggtcgtattttattgcgtaaatcgggtacggaaccacttattcgcgttatggtggaatgccaagatgctgaacttgcacaacaatgtgcagaagaaattgcagaagccgtgaaaaaaattaattaa

SEQ ID NO: 22310 - DNA, 1380 bp, Haemophilus influenzae
gtggaagctattgaatggttggaaaatttcttactggatttccaaggtagcattgtatttatttcccatgaccgttctgttattcgcaaaatggcaacacgcattgtggatttagatcgcggtcaattgcagtcttatctaggcaattacgatttatatttaaccacgaaagaagaaaatctacgcgttgaagccttgcagaatgaattatttgataaacgtcttgcacaggaagatgtatggattcgccaaggtatcaaggctcgccgtacaagaaatgaagggcgagtgcgagcattaaaagcgatgcgtgaggaacgccgccaacgccgtgaggtaatgggaacagccaaattacagttagatacctcaagtcgttctggcaaaattgtctttgaaatggaagatgtgagctatgaaatcgcaggaaaaaccttgttaaaagatttttcaacaacgattttacgtggagacaaaattgcgcttgttgggccaaatggctgtgggaaaaccacgttcattaaattattgctgggggaaattcagccaacatcaggcaaaatccgttgtggtactaaattagagattgcttattttgaccaataccgtgctgatttagatcctgaaaaaattgtaatggataatgtggcagatggtaaacaagatattgaaatcaatggtgtaaaacgccatgtactagggtatttgcaagagttcttgttcccaccaaaacgagcaatgaccccagttaaagccttatcggggggagaacgaaatcgtttattgctcgcaaaattgttgctcaaaccaaataatttattgattcttgacgaaccaaccaatgaccttgatgtagaaacattggagcttttagaggaaattttgactgattatcaaggcacattgttaattgtgagccatgaccgtcaatttatcgataatactgcgacagaatgttatttattcgaaggtgaagggcgtttgaataagtatgtgggtggattctttgatgcgaaacagcaacaagccaatttctgggcaagcaaagcggtggaagaacaggctaaggcgaagaaatctgaaccactaaaagaagaaagtgcggtgaaaaatgaccgcacttctaagccgaaatccgtgaaactttcttataaagaacaacgagagctagagcaacttccacaacttttggaagaattagaaactaaaatcaccacacttcaagctgaaatagccgatccagcatttttccaacaagctcacgatattaccgacgctaaattaaaagcattggcggatactgaagccgaattagaaacagcatttttacgctgggaagaattagaagaaaagaaaaatttggctgacggtaaagcttaa

SEQ ID NO: 22311 - DNA, 1140 bp, Haemophilus influenzae
atgcctgtcattcggcaggtggttttttacgactctttaacaggagaacaaacaaaaatgaaaaaatttgcaggtttaattactgccagcttcgtagctgcaactttaaccgcttgcaacgataaagatgctaagcaagaaactgcaaaagctacggctgctgctaatgacactgtgtatctctacacttggacagaatatgtaccagatggtcttttagatgagtttactaaagaaactggcatcaaagttatcgtttcaagcctagaatcaaacgaaacaatgtacgctaaactcaaaactcaaggcgagtctggtggctatgatgttatcgcaccttctaactacttcgtttctaaaatggcacgcgaaggaatgttaaaagaacttgatcacagcaaattacctgttcttaaagaattagatcctgattggctcaataaaccttatgataaaggtaacaaatactctcttccgcaacttttaggtgcgccgggtatcgcattcaataccaacacttacaaaggcgaacaattcacttcttgggcagacttatggaaacctgaatttgcaaacaaagttcaattattagacgatgcgcgtgaagtattcaacatcgctttattgaaaattggtcaagatccaaatactcaagatccagccattatcaaacaagcctatgaagaattattgaaattacgtccaaatgtactttctttcaattccgataacccagctaactcgttcatctcaggcgaagtggaagtgggtcaattatggaatggttcggtacgtattgctaaaaaagaaaaagcacctttaaatatggtattcccaaaagagggtcctgtactttgggttgatactcttgcaattcctgcaacagctaaaaattctgaaggcgcacacaagctgattaactacatgttagggaaaaaaacagctgaaaaattaaccttagctatcggttacccaacctcaaatattgaagcgaaaaaagcattaccaaaagaaatcactgaagatccagcgatttatccgtcagctgatatattaaaaaatagtcactggcaagatgacgttggcgatgcaattcaattctatgaacaatattatcaagaattaaaagcagcaaaataa

SEQ ID NO: 22312 - DNA, 1239 bp, Haemophilus influenzae
atgatttctcaaatagataaaacagaacttttagaacgatttttacattatgtgtcttttcacacccaatcaaaacctaatgcgaagcattcccccagctcagtcgggcaaatgaagttagccatgcagttacaaaaagaattaatccaacttggtttggagaatgttgaagtaagtaaatatgcagtggtaacagcatttttacccgctaatgatcctaacttaacgaaaaccattggtttagttgcgcatcttgatacgtctccacaatgtagtggtaaaaatgtacgcccagaagtgatagaagaatatcgtggcggagatattgcattaggtattggcgaggaatttattagccctgtttattattcttttatgcaaaaattagtcggacaaacgcttattgttactgatggaaccactttgcttggggctgacaataaagcgggaattgcagaaattatgaccgcactttccattcttcaaaaagagaatattccccattgcaatattcgtgttgcttttacgcctgatgaagaaattggtttgggaatccattatttcccaatggaaaagttttcctgtgattgggcatataccattgatgggggagaagtaggggaattagaatacgaaaactttaatgctgcaacagcaaaagtgcggtttttcgggcgaaatattcacacaggttatgcaaaaggaaaaatgctgaatgcactgactttagcttgtgaatttcagcaagtttttcctgttgatgaagtaccagaaaaaaccgatgggaaagtgggcttttatcatttagaagatttttctggcgatattgagcaagtagagcttacctatttgattcgtgattttgacgaacagaatttcgcacaaagaaaagcttttattaaaaatcaggtggaaaaatttaatgctaaaaaaggtttgaaaaagcctatagagttagaaattcaagatagctaccaaaatatgtatgatgtggtaaaaaacgttcctcaatcaattgaacttgctgatcgtgcaatgaaagcggtgggaattaaaccaaatcataagccgattcgaggcggtacagatggagcatttttagcctctaaaggtttagcatgcccaaatatttttactggcggctataatttccatagtaaacacgagttggtttctttacaaggcatggaaaatactgtccaagtaattatcgaaatgctgaaatgtaaagatttgtaa

SEQ ID NO: 22313 - DNA, 483 bp, Haemophilus influenzae
atgtcaaaaacatcaatcggactagataaagttcaatcagcagaattagccgataaacttaacgaattacttgcaacctaccaagttttctatactaatgtacggggctaccactggaacattaaaggcgtaaacttctttgcattacacgcaaaatttgaagaaatttatactaatttagttgctagagtagatgaggtggctgaacgtattttaactttaggttacacaccaaataatgcttacagccaatacttaaaaatatctcgaattaaagaagatattgcagtaagtgaggcacaagaatgtttatcaggcacattacaaggtctaaaaacattactagatcaacaacgtgaaattcttgcttttgcaaataacgctaatgatgaaggtactgcatcacaaatgagtgactatattaaagaacaagaaaaattagtatggatgttccaagcagcttgccaaacttgccataattaa

SEQ ID NO: 22314 - DNA, 1674 bp, Haemophilus influenzae
atgatgagccatacagagacatctttgggtgcagaaaatacccgcactcataattttattacccaaattattgatgaagatttagcttcgggtaaacataaaagcgttcatacccgttttccgccagagccgaatggttatttgcatattggtcacgcaaagtctatttgcttgaattttggcttggcaaaagaataccaaggtttatgtaacctacgttttgacgataccaatccagtaaaagaagacgtggaatatgtagattctatcaaagcggatgtggaatggttaggttttaaatgggagggcgaaccgcgttatgcatctgattacttcgatgcgctttatggctatgccgttgaattaattaaaaaaggtttggcttatgttgatgagctttctccagatgaaatgcgtgaatatcgtggtaccttaaccgaacctggtaaaaacagcccatatcgtgaccgcactattgaagaaaacttagcgttatttgaaaaaatgaaaaatggcgaatttgccgagggtaaagcaagtttacgtgcaaaaattgatatggcttcgccatttatggtcatgcgtgaaccagtaatttatcgtattaaattctctagccatcaccaaacaggtgacaaatggtgtatttacccaatgtacgatttcacgcactgtatctctgatgcgattgagcgtattacacactcaatctgtacattagaattccaagataaccgtcgtttatatgactgggtgttggaaaatatcagtattgaacgtccattaccgcatcaatatgaattctcacgtttgaatttagaaggcactttaacctctaaacgtaaattattgaaattggtaaatgatgaaatcgtggatggttggaacgatccacgtatgccaaccatttcaggtttacgccgtcgtggttatacaccagcttcgttacgtgaattttgtcgtcgtatcggtgtgactaaacaagataacgtcgtagagtattcagcacttgaagcctgcattcgtgaggatttaaatgaaaatgcaccacgcgcaatggcagtgattgatcctgttcgtgtggtaattgaaaattttgaaagcgaagcggttttaactgccccaaatcatccaaatcgtcctgaattaggggaacgtcaattgccgttcacgaaagaactttatattgatcgagctgacttccgtgaagaagcgaacaaacaatataaacgcttagtattaggcaaagaagtgcgtttgcgtaatgcttatgtgattaaagctgaacgtgtagaaaaagatgcaaatggtgaaatcaccacgatcttctgtacttacgatcctgaaactttaggtaaaaatccagcagatggacgtaaagtgaaaggtgtcattcattgggtttctgcggttaataatcatccagctgaattccgtttgtatgatcgcttatttactgtgccaaatccaggggctgaagatgatatcgaaagcgtgttaaacccaaattctttagtgataaaacaaggttttgtagagcaaagcctcgcaaatgcagaagcagagaaaggctaccaatttgaacgtgagggttatttctgtgcagatagtaaagatagccgacctgaacatttggtatttaacttaacagtaagcttaaaagaaggcttctaa

SEQ ID NO: 22315 - DNA, 2193 bp, Haemophilus influenzae
atgacaaccgcagtaacacaagcaattattgatggtttttttgatgcgagcaatggtgatccttttgctacgcttggtatgcacgaaaccgagcaaggaattgaaatccgtacgttattgccagatgccaatcgaatggtggtgattgagcgtgaaagtggtaaagaaataacggaactggattgtgtcgatgagcgtggattttttgttggtgttattccaaattgtcgtcaattttttgcttatcaattacaggttttttggggtaatgaagcacaaattatcgaagatccttatcgttttcatccaatgattgacgatttagaacaatggctactttctgaaggatctatgcttcgcccatatgaagtgcttggtgcgcattttatggaatgtgatggtgtgagcggggtgaatttccgcttgtgggcacctaatgcaagacgagtttctattgtaggtgatttcaactattgggatggtcgtcgccacccgatgcgtttccactcgaaaagtggtgtttgggagctctttttaccaaaagccagtttaggacagctctataagtttgaattaattgattgccatggcaatcttcgtttgaaggccgatccatttgcctttagttcgcaacttcgccctgatacagcttcgcaagtcagtgccttgccaaatgtagtggaaatgactgaagcacgcaaaaaagcaaaccaaggcaaccaaccaatttctatttatgaagtgcatttaggatcttggcgtcgtaatttagaaaacaatttttggctagattacgatcaaattgctgatgaattaattccttatgtaaaagagatgggctttacccatatagaatttttaccgctttctgaatttccgtttgatggttcttggggttatcaaccacttgggctttattcgccaaccagtcgctttggttcacctgaagccttccgccgtttagtaaaacgtgctcacgaagcaggcatcaacgtgattttagattgggtgccagggcatttcccaagtgatacgcatggtttagtcgcatttgatggcacagctttgtatgagcatgaagaccctcgcgaaggctatcatcaagattggaataccttgatttataactatgggcgtaatgaggtcaaaaatttcttatccagtaatgcactgtattggcttgaacgttttggcgtagatggtattcgcgtggatgctgtggcttccatgatttaccgtgattatagccgtgcggagggcgagtggattccaaaccaatacggcggacgtgaaaatttagaagccattgagtttttaaaacacaccaactggaaaattcacagcgaaatggcgggagcaatttctattgcggaggaatctacctcttttgcaggcgtaacccacccaagcgaaaacggcggcttgggcttcaatttcaaatggaatatgggctggatgaacgatacactggcttatatgaagcttgaccccatttaccgccaatatcatcacaacaaaatgacctttggaatggtgtatcaatatagcgaaaattttgtgctaccactttctcacgatgaagtggttcacggtaaatattcacttcttggcaagatgccaggtgatacgtggcaaaaattcgctaacttgcgtgcatattacggttatatgtggggctacccaggcaaaaaattactctttatggggaatgaatttgctcaaggcagagaatggaattacgaagaaagtttggactggttcttgcttgatgaaaatattggcggaggctggcataaaggcgtattgaagctggttaaagacctcaatcaaatttatcaaaaaaatcgaccgctctttgagctcgacaactccccagagggtttcgattggcttgtcgttgatgatgcggcaaattctgtgctcgcctttgaacgtcgcagttcaaacggagaacgtattattgtcgtcagtaactttacccctgtgcctcgccacaattaccgcatcggcgtgaatgttgcaggaaaatacgaagaaattttaaataccgattcgatgtattacgaaggttcaaacgtgggcaattttggttgtgtcgcaagtgaacaaatcgaaagccacggacgagaaaattcgatttcagtgtccattccgccgttagcaacagtttatttgagattgaagacgaaataa

SEQ ID NO: 22316 - DNA, 1980 bp, Haemophilus influenzae
atgttcaaaatctacaacaacggcaatcctattccaatgggatactcacaagcggtcgaaaacaacgtgcaaattaccaatttcgccctgttttccgctgcggcaataggcgtagaactttgcctttttgacgaacaaaatcaagaaacacgcttgccgatggtgcgtactgaaaatgtgtggcatttggcggtaactggcgtgaaaactggtacggaatatgcttttcgtattcacggcgaatttgccaatccgcagaaattgatactcgatccctatgcgaaagccgtgaatggtaaacctgatttaagtagcgaagaaagtcgttcttggttcttgctttcggataatcgcgacaacgcgcatcttgccccaagagcggttgtaatttcagaggaatttgattgggaaaatgacacttcacccaatacgccttgggctgaaaccattgtgtatgaattacatgttaaagggtttagccagttaaacgagaaaatccctgcggcgttgcgtggtacttatactggattagcacatcctgtgaatttggcgtatttgaaagaattaggcgtaactgcggtggagttgctgcctgtaaatttccatataaatgaaccgcacttacaggcacgaggcttacaaaattattggggatacaatcccttagcgatgtttgcggtagaacctaaatatgcggcaacaaataatccattggctgaatttaaaacgatggtaaaggcatttcacaaagcaggcattgaagttattttagacgtggtatttaaccattccgcagaatcagagcaaacttacccaacattcagccagcgtggtattgatgatcaaacttactattggcgcaacgatcaagggcgttatatcaattggacaggctgcggcaatatgctcaatttatcctctgatgtagggcgaaaatgggtggtggattgcctgcgttattgggtggagcaatgccatattgatggattccgttttgatttagccactgttttagggcgtgatacacctgatttcaactcgtcagctcagctttttactgacataaaaaatgagccaagtttacaaaatattaaattgattgccgagccgtgggatattggacattacggttatcaagtcggcaatttcccaagttattttgccgaatggaacgaccgattccgtgatgatctctgccgtttctggctatggaaaagtggcgaaattggtgcatttgcagaacgttttgcaggttctagcgatttatttaagaaaaatgaccgcttgccacatactacacttaattttattaccgctcacgatggttttacgcttaaagatttagtgagttataaccaaaaacataacgaaacgaatggcgaagaaaatcgtgatggtcgcaatgaaaattacagttataaccatggagtagaaggttctacagaatccctttctgaaccgcaaaaaagtgcggtggaaaataaccgcacttttgcacaaagtggattattaatgagtttattgctggcgaatggtacacctatgttgttagctggcgatgagttcggcaacactcaatatggtaacaataatgcttattgccaagataacgagattacttggctgaaatgggcaaattttaacgaagaattatttgaactgaccaaacaaacgattgcacttcgtaagcaaattggcagtttaaataaagatcaatggtggtcggatgagaatgtgcaatggcttaacattgtaggcgaaccgatgacagttgaagattggcaaaatcaacaaaccaaagcattacaggtggttttagacaatcgttggcttttgttgattaatgccaaagccgaaggtcaaatgtttcacttgcctaataggaaatggaagccccaaatcggcacacataatgtaacccttgaagcacaacaagccgaacttagttcaatgggcttttgtatgctgaatgacgaataa

SEQ ID NO: 22317 - DNA, 1539 bp, Haemophilus influenzae
atgttaattggtgtacctagagagctgcttgagaatgagagccgtgtggcggcaacgccgaaaacggttcagcaaatattgaaattgggctttgacgtgatcgtggaacacgatgcaggttttaaagctagttttgaagatcaagcatttttagaagcgggcgcgaagatcggtacgtcggctgaaatttggcaatcggatattatcttcaaagtaaatgcaccgacagatgaagaaattgctcaaatgaaggaaggggcagctctcgtgagctttatttggcgcatgcaaaatcctgagttaatgaaaaaactcaccgcgaagaaaattaatgtgttagcaatggatgcggtgcctcgtatttctcgtgcgcaagcattggatgcgctttcttctatggcgaatatttctggttatcgtgctgtcattgaagctgcgcatgaattcggtagcttctttactgggcaaattactgcagcaggtaaagttccaccagcaaaagtgttggttattggtgcgggtgtggctggtttggcggcaattggtgcagcaaatagccttggggcgattgttcgtgcttttgactctcgtcctgaagtgaaagagcaagttcagagtatgggcgcgagcttcttagaaattgatttcaaagaagaaggtggcagtggcgatggttatgcgaaagtaatgtcggaagaatttaaccgtcgtgcgatggagctttacgcagaacaagctaaagaagtcgatattattattactacggcagccattccgggtaaaccagctcctcgtttaatcaccaaagaaatggtggattcaatgaaaccaggttcggtgattgtggatttagcggctgcaactggcggtaactgtgaatatacgcaagcagggaaagttgttacaactgaaaaccaagtgaaagtgattggttatacagatttcccaagccgtttaccaacgcaatcttctcaactttatggcacaaacttagtcaatttattaaaacttttgtgcaaagagaaagatggcaatattaatattgattttgaagatgtggttcttcgtggtgtaaccgttgttcgtgatggggaagaaattccaccagcacaaattcaagtgtctgcacaaccaaaacaagaaaccaaagctgcaccagtggcagagaaaaaagaatctaaaccaacagatcctcgtgtgaaatacggtgtgatggctggtgttggcgtgttattcctttggttagcttctgtggcgcccgctgcatttttatcacatttcaccgtatttgttttagcttgtgtggtgggttattacgtggtttggaatgttagccatgcacttcacacaccattaatggcagtaacaaatgcaatttcaggcattattattgtaggtgcattattacaaattcgtcagccaacaggcaatctatttatcgatgcgttagcttttgtggcgattttggtggcaagcatcaatatttttggtggtttccgtgtcacacaacgtatgttagcaatgtttagaaaaggttaa

SEQ ID NO: 22318 - DNA, 2607 bp, Haemophilus influenzae
atgagtaaatccttggtgattgtggagtcgccagcaaaagcaaaaactattaataagtatttaggtagccaatatgtcgtgaaatcgagcgtgggacatattcgtgatttgccgacggttggttctagtacaggtgaaaaagctaaaccaatttcaaccaaaggtatggatgccgaagaaaaagcaaaaattaaggcagaaaaggaacgtaacgccttagttaaacgtatggggattgatccttatcacgattggaaagcaaattatcagattttgcctggtaaagaaaaagtggtttccgagttaaagtcgcttgctaaaaaagcagatcacatttatctcgcaaccgacttggatagagaaggggaagcgattgcgtggcatttacgtgaagtgattggtggtaacgatgatcgttttagtcgcgtggtgtttaacgaaatcactaaaaatgccattaaacaggcttttgaaaagcctgaacaattaaatatggatcgtgttaatgctcaacaaactcgtcgttttttagatagagtggtgggctttatggtgtcgccattactttggaaaaaagtagctcgcgggctttctgctggtcgagttcaatcagttgcggttaaattattagtcgaacgcgagcgtgaaattaaagcgttccagcctgaagaatattgggaagttgccgtccttacgaataatcaaaataaacaagctatacgtttagatgttacggattataaaggcaagaaatttgatccaaaaaatcaaaaagaagcacaaagtgcggtagattttctgaatgtttcagattacgttgtcacagatttggaaactaagccaacaagttctcgccctcgagcaccatttattacatcaacacttcaacaaacggcaagtactcgcttgggatttggcgttaagaagacaatgatgttagcccaacgtttatatgaagcgggttacattacttatatgcgtacggattcaaccaatttgagtcaagatgcgcttaatatggcgcgtagctatattgaaaatcattttggtgcacaatatttaccagaaaaaccaaatttctattctagtaaagaaaatgcgcaagaggcacatgaggctattcgtccatcagatattcgagcattgcctgaatctttagagggaatggaaaaagatgcggtacgcctttatgatttaatttggtgtcaattcttagcatgtcaaatgccacctgcacaatatgatagtagcacgctgaccgttaccgctggcgattataccttgaaagcaaagggcagaattttacgttttgatggttggacaaaagtattgccacagataggcaaaaatcctgaagatcaagaattgccttcagttactgtgtcagaaaaacttgctttaaaagaagtgcaaccaactcaacattttactaaaccacctgctcgttttactgaagcggctttagtaaaagaattggaaaaacgtggtattggcagaccttccacttatgcggcaattatttccaccattcaagaacgaggttatgttcgtactgaaaatcgtcgtttctatgcagaaaagatgggcgaaattgtgactgatcgcctcaatgagtcttttggtgaattaatgaattacgatttcaccgcgaatatggaagataccttagataaaattgcctctggttcagtaaattggaaaactgaattgaatcaattctttaaggatttttctagccagctttctaaagctgaattagatgaacttgaaggtggtatgcgcccgaatagccttgtggaaacagatattaaatgcccaacctgtggcagaaatatggcaattcgtacggcgagtacgggggtgtttttaggatgtacaggttatgcattaccaccaaaagagcggtgtaaaacgacgattaatttaattcctgaagcggaattattgaatgttttagatgaatcttcagaaaccaaagcattaatggatcgtaaacgttgtacaaaatgtggaacggcaatggacagctatgtaatcgatgcccatcgtaaaatccatatttgcggtaataatccaaattgtgatggatatttaattgaagaaggctcattcaaaattaaaggttatgatggccctgttgttgagtgtgataaatgcggtgcggatatgcatctaaaacttggtcgttttggcaagtatatgggatgtacaaattgtgataacacacgcaaaattttgaaaaatggcgaggtcgcaccaccgaaagaagagccagtacatttccctgagttaaaatgcgaaaaatctgatgcatattttgtattacgtgatggtgcgagtggtgtatttatgtcagcccataacttccctaaatcacgcgaaacacgcccagttaaaatcgctgaactagtgcaatatcgcgagcgtttacctgaaaaattagcttatttagccgatgctccacaaaaagacccagaagagaatgaagcgattgttcgttttagtcgtaaagagaagaaacaatatgtgacttctgaaaaagagggaaaagcgacgaaatggattgttgatttcaccaatggaaaatgggttgaacgaaagaaataa

SEQ ID NO: 22319 - DNA, 1932 bp, Haemophilus influenzae
atgccaattattactttacctgacggttcccaacgtcaattcgatcgtcctgtttctgttctcgaagtcgcacaagatattggtgcgggtcttgctaaagccactatcgcaggccgtgtaaacggagaacgtcgcgatgcgtgctatgttatcgagcaagatgcaacgttagaaattattactgcaaaagatgaagacggtttagagattatccgccattcttgcgctcacttgctcggacacgctattaaacaattattcccagatgtaaaaatggcaattggtccaactattgaaaacggcttctattatgatgtagatttagatcgctctttaacccaagaagatattgatgcaatcgaaaaacgtatgttggaattggcaaaaacaaattatgacgtcgtgaaaaaacgtgttacttggcaagaagcgcgtgatacctttgaaaaacgcggcgagccatacaaaatggcaattttagatgaaaacattgaacgtactgcaacgcctgcgttatatcatcacttagaatatattgatatgtgccgtggaccacacgtgccaaatatgcgtttctgtcagcatttcaaattacaaaaagttgctggtgcgtactggcgtggcgacagtaaaaacaaaatgttacaacgtatctatggtacagcttgggcggataaaaaacaacttgctgaatatttaacacgcttagaagaagcggcaaaacgtgaccaccgtaaaattggtaaagcattagatttatatcatatgcaagaagaagcaccaggtatggtgttctggcacaatgatggctggacaattttccgtgagcttgaaacgttcgtgcgtactaaattaaaacaatacgattatcaagaagtgaaaggcccatttatgatggatcgcgtattgtgggaaaaaacaggtcactggcaaaattacgcagatttaatgtttaccactcaatctgaaaaccgtgaatacgcaattaaaccgatgaactgcccaggccacgttcaaatttttaatcaaggtttaaaatcttaccgtgacttaccaatccgtatggcggaatttggttcttgccatcgtaatgaaccatcaggttctttacacggtttaatgcgtgttcgtggctttactcaagatgatgctcacattttctgtactgaagatcaaattgagagcgaagtaactagctgtatcaaaatggtgtacgacatttatagcacctttggtttcactaatatcgcagtaaaactttctactcgccctgaaaatcgtatcggttcagatgaaatgtgggatcgtgcggaagcaggtcttgctgcagccttagcacacaacggtcttgaatatgaaattcaagaaggtgaaggtgcattctatggtccaaaaattgagtttgcactacgagattgtttaggtcgtgaatggcaatgtggtaccgtgcaattagacttcgcattaccaggtcgtttagatgcaacttatgtagcagaagataatagccgtaaaacccctgttatgattcaccgtgcgattttaggttctattgagcgtttcattggtattattactgaagaatatgcaggtttcttccctgcatggttagcaccaacccaagcagttgtaatgaatatcactgatagccaagcagactatgtacagaaagtcgcaaaacagctttctgatgtaggtttacgcgtgaaaactgatttacgtaacgaaaaagtgggcttcaaaattcgtgaacatactttacgccgtgtgccttatatgctcgtttgtggcgataaagaaatcgcagaaggcaaagtggctgtacgtacccgtaaaggtgctgatttaggcacatttactgtggaagaatttgcggaaatcttaaaaaatcaagtaagaagccgtgaattaaagttattgaatgaagaataa

SEQ ID NO: 22320 - DNA, 2781 bp, Haemophilus influenzae
atgaaaaaaacaaccgcactttttttacttatcttttcactaattgcttgtcaatcattggaactatcgcccaataataatttaccttttgatccaaatattcagcacggtaaactatcaaatggtctgcaatattttgtattaaaaaatactgaacccaaagaacgcgtttatattcgattagtgatcaatgctggatctatgcacgaagatgacgatcaaaaaggcattgctcatttagttgaacatatggcatttaatggctcaaagaaatatccagaaaatcaaattattaatgcgttagaaaaacttggaatgaagtttgcacgagatattaatgctttcaccgattttgaaaatacagtctatactttaaatttagatagcaacaatcagcaaaaattagaattggcttttgatgtcatcaatgaatggatgaataatattacttttttgcctaaagatgtggatggcgaacgtggcgtagtacaagaagaatggcggagacgtttaagcccaatgctacgtattggcaataagaaaagtgctattgaaatggcgggttctcgttatgtgttgcgtgatcctattggagatatggatattattaaaacaatttcagctaaacgcgtcgctgatttttaccacaaatggtatcgaccagataatatgtcagtaattattgtaggcgatattgatacaaaacaagtagtaaaactattaaaacaaaatctatctcaagaaaacccaattactaaaacaacattggaaaaaattgattttaatattcctcttatcaacaaatggcgattagattctatttctgaacaaggcacaacaattccgagtattgaattaagtttttttgaaaatacaattgaaaccaatacattagcgagttataaacaggaattaattcagcaaattaccactcgattgcttaacttacgtttacagcaatgggaaaaggaaacagaaaatggcgtagattctgcaaatttttatcgcactcatttaggtaaagaaacactacaaagcattttttctctccagcttatagatacacaatattcaaaaacgatagataaattatttgcctttattgccagtataaaacaacaaggttttactcaaaatgaattaagcggtgagattaaacgcttaactcaactcaatgaaaaacaattaaatattcgttctggtagtttaaaaattgccgatgatctcattacttctgtggcaaataagcaagtggtattgagcgtaaatgatcgttatgaactcaataaacgttttttatctcaaattacattagctgatttacaacgcacgttaaatcaaaccttagcattaaaagcaaaattattattaatcactcaacctttgccacaaaaagccttgccttttgatgttgcagaaatagaaactcgttggaacaatgtaatggaaatgcaacaacaccaatgggatgaaaaaaaacaaatcgaaaaattaccgcacttaacatttaacacaggctcactttctcaagaaaaatactgggatcgcggcgatatttatgaatttcgtttaagtaatggaagtaaattgatctaccactatagtgacaaaactccaaatcaagtacattttcgtgctgttactcaaggtggtttacgttctatcccaaataaggactatcacttattacgtgctgccgttagtgtagttgatgaaacaggtgttggagaactttctctttctgcggttaatcaaattttttcgcgcgatccattggtgattgcaactgtgattgatgatgataaacaaggttttactggtgtatctaaacctaaggatttggaaaatttactgacattgttccgcttaaaattacgttcttctcctatatccgatcttgccttagaaaaatatcgacgtgaaacccgtgattatttcaaacagattgatttagaaacacaatttatgcaagccgtttcaaaactacgttttccaaatattgaaaccgtctatactcaaaaacaagcacaacaattatcatttgataaaaaccaattaaataacgcttatcaacattatattttagataaaacagattttacctattttattattggcgatattgaacttaatcaagtaaagaaattggcagaacgttatttagcttctattgaatcaaaaactcagatccgccattttgtcccgactattattcatacaccaactcaatcatttattatgaatggtttgaaagaaccgagagctgatgtagaaatataccttaccgcagataatacttggcgaacagaacaaaaatatttattcaatattcttgcggatattgtgcaagaaaaattacgcttaattctacgtgaaaaagtttctggtatttattctgtaaatagttggtttatgcaagatgtttatgcaccacaaattgaggggaaaattgaatttagttgcgaccctaagcgcgtggaggaacttacgtatcttacaaatcaggtactagatgacattataaaaaatggcattgatgaaaacttattacgtaaaaaactagcggaacaacatactcagattcgacgtgaatttgattctttagtttcaattgcttcaattattgaagaaagttactggcaacaagataatccagatgccatttatacctatcaacatttagatcagttagcgacaaaagccacaatagatgcgttggcgcaaaaagctctaaaaaaatcaggcagatttgtcagcatattaaaagcagcttcttattag

SEQ ID NO: 22321 - DNA, 4533 bp, Haemophilus influenzae
atgtctgatgtttttgaattagaaaatgaaatcgaattagagagcgatgaagtcattctggaaaatgaaaacgtcgaagaaatcgttgatgcacctataccttttagcatgacgacaaataatggtatagagcgtggtaaatttcgttctttaaccttaattaactggaatggtttttttgcccgtacttttgatttagacgagttagttaccacgctttctggtggtaacggtgcggggaaatcaaccacaatggctggatttgtgaccgcattaattcccgatttaacccttttacatttccgtaatacaacagaggctggttctacaggcggttctcgcgataaaggtttacatggtaaattgcgtccaggtgtttgttacgcagtattagataccattaattcacgtcatcaacgtattcttgttggtgtgcgtctgcaacaaattgcaggtcgtgataaaaaggttgatttaaaaacgttctcaattcaaggtgttgaattatctcaaaatccaaccgcacttttcactgaaacagtgggcgaacatcaagcacgcgtccttaatttaaacgaactcaaagataaaattgaaaatatcggtgcgcaatttaaacaatatcattccattaccgattatcacggcatgatgttcgatctcggtattattccgaaacgtttacgttcagcatcagaccgaagcaaattctataaacttatcgaagcgtctttatacggtggtatttccagtgcaatcacacgttctttacgtgactatttattgccagaaaatttaggtgtacgtaaagctttccaagatatggaaagtgcattgcgtgagaaccgtatgactttagaagcgattaaggtcacgcaatcagatcgtgatttattcaaacatttaattactgaaaccaccaactatgttgcttcggattatatgcgtaatgcgaatgaacgccgtggcaatattgaggctgcattagaatctcgtcgtgagtggtataaagcaaaagcagagcagaatttatctcaacatcgtttagttgatttaagtcgagaagtggctgaattggcagaaagtgaacgtactttagaagttgatcaccaaagtgcggttgatcatcttaatttagtgttaaatgctttacgtcatcaagaaaaaatcacgcgctatcaagaagatattgcagaacttaccgagcgtttagaagaacaaaaaatggtggttgaagatgcgaatgatgcgttagaagaaagccaagcccaatttgagcaaactgaaattgaaattgacgctgtacgatcccaattagctgactatcaacaagcattagatgcccaacaaactcgcgcacttcaatatcaacaagccattgcagcccttgaaaaagcgaaaacattatgcggtttagcggatttaagtgttaaaaatgtagaagattatcacgcagaatttgatgcgcatgcagaaagtttgactgaaaccgtacttgagcttgagcacaaaatgtctatttctgaagcagcgaaatctcagttcgataaagcgtaccaattggtatgcaaaattgcgggtgaaatgcctcgttctacggcgtgggaaagtgctaaagaattattacgtgaatatccaagccaaaaattgcaggcacaacaaacgccacaacttcgcacaaaattacatgaacttgagcaacgttatgcacaacaacaaagtgcggtcaaattacttaatgattttaatcaacgtgctaatttaagtttacaaacggcagaagaattagaggattatcacgccgagcaagaagcgttaattgaagacatttcagcaagactttcagaacaagtggaaaaccgttctacgcttcgtcaaaaacgtgaaaatttaaccgcactttatgatgaaaatgcgcgtaaagcaccagcatggctgacggctcaagctgcattggaacgtctagaacaacaaagtggcgagaggtttgaacatagccaagatgtgatgaattttatgcaatcacaacttgtgaaagaacgtgaactcacgatgcagcgtgatcaacttgaacaaaaacgtttgcatttagatgaacaaatttctcgtttaagtcagccagatggttcagaagatccacgcttaaatatgctggcagaacgttttggtggagtactgctttcagagctttacgatgatgtaacaattgaagatgcaccttatttctccgcactttacgggccttcgcgtcatgctattgttgtgcgtgatctcaatgctgtgcgtgaacaacttgcgcaattagaagattgccccgatgatttgtatttaattgaaggcgatcctaccgcatttgacgacagcgtattatccgcacaagaacttgagctaggtgttgtcgtgcaagtttcagatcgtgaattacgctattcaagattccctgaaatcccattatttgggtgtgcagcacgtgaaaaacgtttagaagaattacaaattgaacgtgatgaagtggcagaacaacatgcccaaattgcgtttgatgtacaaaaatgccaacgtttacacgaacatttcagccaatttgttgggttgcatttggcgttggcgttccagccaaatccagaagcgttaatgtctgaaattaatcgcgaacgcaatgaaattgatcgtgaattaaaccaatttaatagcggcgaacaacaattacgcattcaattagataatgcaaaagaaagactgcagttactcaataagttaattccacaactcaatgtattagctgatgaagatttaattgatcgtattgaagaatgtcgtgagcaattagatattgcagagcaagatgaatattttattcgtcagcatggcgtaacgttgtcacaattagagccgattgcaaatagtttacaaagtgatccagaaaattacgaaggcttaaaaaatgaattaactcaagcgattgagcgtcaaaaacaagttcaacaacgtgtatttgcgttagctgatgttgtacaacgtaaaccgcattttggttatgaagatgcagggcaggctgaaacttctgaactcaatgaaaaacttcgccaacgtttagaacaaatgcaagcacagcgagatacgcaacgtgagcaagttcgtcaaaaacaaagtcaatttgctgaatataatcgcgtattgattcagttacaaagttcttacgatagtaaatatcagctcttaaatgagttgattggtgaaattagcgatcttggcgtgagagctgatgatggtgctgaagaacgtgcacgtatccgtcgtgatgaattacatcaacaactttcaacgagccgtcagcgtcggtcttatgtagaaaaacaactcacattaattgaaagtgaagctgacaacttaaatcgtcttatccgtaaaactgaacgtgattataaaactcaacgtgaattagttgtggcggctaaagtgagttggtgtgtggttttacgcttatcacgtaactctgatatggaaaaacgccttaatcgccgagagctcgcttatttatctgcagatgagttacgttcaatgtcggataaagcattaggtgcgttgcgtacagcagtggcggataatgaatatttacgtgatagcctaagagtgtctgaagatagtcgcaaacctgaaaataaagtgcggttctttattgcggtgtatcagcacctacgtgaacgtattcgccaagatattattaaaacggatgatccaattgatgccattgaacaaatggaaattgagctttctcgtttaacggctgaattaactggccgtgagaaaaaattggcgatcagttctgaaagtgttgcaaatattatgcgtaaaacgattcagcgtgaacaaaatcgcattcgtatgctcaaccaaggtttacaaaacattgcgtttggtcaggtgaaatctgttcgtttggtagtgaatattcgtgatacccatgccatgttgttggacgcactttctggtcagcaagatgaatatcaagatttattcaacgacaaccgcatcaccttctctgaagctatggcgaagctctatcaacgcatcaatccacatattgatatggggcaacgcacagcgcaaacaattggtgaagaattgttagattaccgtaattatcttgagcttgaagtggaagtattccgtggtgctgatggttggttacgtgcagaaagtggcgcgctttctacgggtgaagctattggtacaggtatgtcaattctcttaatggttgttcaaagttgggaagaagaaagccgtcgaattcgtggtaaagatattgtgccttgtcgcttgttgttcttagatgaagcggcgcgtttagacggtaaatctatttctaccttattcgaactttgcgaacgtttagatatgcagttacttatcgctgcgccagaaaatattagcccggaaaaaggtacaacctataaactcgtacgtaaaatcgcaggcaaccaagagtacgtacacgttgttggtttacgcggattcggtgcgacagaataa

SEQ ID NO: 22322 - DNA, 1422 bp, Haemophilus influenzae
atggtaaaagatttcagcttttttatttacgattatgaaagttttggtgtaaatccagcaacagatcgccctgcgcaatttgcgggtattcgtacagatgctgattttaatatcattggcgaaccaataatgttttattgtaaacaaaccaacgattatttaccggctcctgaagccgtaatggtaacaggaattacaccacaagaatgtaatgaaaaggggctttcagagcctgaattcgccgcaaatatcttagcagaattttcccaacccaatacttgtgtcatgggttataacaatattcgctacgatgatgaaatgacgcgttatacgttttatcgtaatttcattgaaccttatgaatacagctggaaaaacggaaattcacgctgggatttgttagatttagtacgggcctgttatgccttgcgtccagaaggaattaattgggcttatgacgatgatggaatgccaagtttccgcttagaaaaactcactaaagcaaatagtattgagcatgaaaatgctcacgatgccatggcggatgtatatgcaactattgctatggcgaaattaattaaagaaaaacagcctaaattattccaatatttctttgaaaatcgcggtaaaaaagaaatcgaaaaattagttgatacaggcgcaatgacacctttagtgcatgtttctggaatgctagggaattatcgaggaaattgcacttgggttgcacctttagcttggcatccgacaaaccaaaacgcattaattgtgtgtgatttaactggtgatatcgataatttattagccaaaagtgcggatgaattacgagcagatttatatacaaaaaaattggaattagaagaaaggggagtttcatccgttccgttaaaacttgtgcatatcaataaatgtcctattttagcaccagctaaaactttgttaccagaaacagcaaatcgattgggtattgatcgtcaattatgcttggataatcttgcaaaattacgagcatcttttgatattcgtgaaaaagtggcggatatttttaatgaagaacgtcaatttgcatcgaatgataatgtagaaactgagttatacaatggcttttttagcaatgctgataaaaataatatggctattttacgtagtttacctgcagaaaaattatctgaacatggtttagcttttgaagataaacgtatccttgaattattgttccattatcgcgctcgtcatttttataaaaccctcacacgcgctgaacaaattaaatggaaaaaataccgacagaataaacttgaaaaaagtgcggtagagtttgaagcaagtttacaacgtttagtagaggyacattcagataattctgaaaaactatctttgctacaacaagtatatgaatatggtataaaattactaggttag

SEQ ID NO: 22323 - DNA, 948 bp, Haemophilus influenzae
atgctcacaaaaagtcggaaatattttaatcaaacatggattgaatcattattcaaacagactacggcattgtttgctttgcttgtgtttattttacttgctgctattttaatttctttagtcataggaagctgggaaagtattaaacgttttggtgggagttttctattagaaacatattgggatcctgtacaagaacaatatggggcaattattcctattttaggtacgcttattacggcgggtatcgcattatttatcgcagtacccatttcatttggtattgctatttttttaacggagctagctcccaattggctaaaacgtcctataagcattgcaattgaaatgctagctgcaattccttctattatttacggaatgtgggggttgtttgttttcgttccattatttcaagaacatattcagccagtactaattgacaatttggggaatttacctggattagaattatttttttctggcgtaccttttggtgttggtttatttacggcaggattagtgcttgccataatgatcattccttttattgcatccgtaatgcgggatgtctttagtatagtaccaccaatgttaaaagaaggtgcttatggattaggtgcaaccacttgggaagtggttcgacaagtgattgtaccacacactagaatagggcttgttgggagtgtgatgctaggattgggaagagcattgggcgaaacaatggctatcacttttattataggtaattcgtttcaattgcctaattccttattttcaccttctacctcaatcgcatctgctattgctaacgaatttaatgaagcaggtggattacaaaaatctgcattgatggaattaggattacttctctttgttatcacaactatggtattgattttatcaagattaatgattacaaaaatgcaacaaacaaaagggaaataa

SEQ ID NO: 22324 - DNA, 1002 bp, Haemophilus influenzae
atgcaacacaaccaattattagaacaactttatagcggacattcactttcaacctcagaaagcaccgctctttttaatgcagtcatccaaggtgagctttccaatgaacaaattgctgcaatgcttattgctttaaaagtgcggggagcaaatactgaggaaatttcgggtgccgttgccgcctcattacaaaatgccaaagcatttccatatccaaattatccttttgcggatattgtaggaacaggaggcaatggtcaaaacactattaatatttccactaccagtgcgattgttgcggcatcaatgggagcaaaaatagcaaaacatggcaatcgtagcgtgtcgagtaaatcaggtgctagcgatgtgcttaccgcacttagcgttaatgtgaacgtcacaccagagcaagctcgacaagcgttagatgaaattggtgtctgttttttatttgctcaacaatatcattctggtttccgtcatgttgcgccagtccgtgccgctttaaaaacgcgcactatctttaatattttagggccgcttatcaatcctgctcgcccaacttatcatttacttggcgtatatgcgcctgaattagtaaaaacctatgctgaaaccgcagttgccttagaacatcaacattcctttgttgtacatggttctggcttagatgaagtcgcattgcacggcgaaacacaagtggcagaaattaaaaatggcaaaattgaatatttcactttaacgcctgaagattttggcttaaaaacgcaatccctcgaaagtcttcgcggtggtgaaccacaagaaaatgcccaatatctgaccgcacttttacaaggtaaaggaaaagctgaacacgctaatgcggtggcggcaaacacggcattattattgaaattattcggttacgatgatttaaaacaaaatgtgcaaaatgtactggcgcatcttgtatcaggtaaagcctttgaaacattacagaaattaaccacatattaa

SEQ ID NO: 22325 - DNA, 1434 bp, Haemophilus influenzae
atgatgatcactcaagattttaccaaacccattgattccgctacggtgctacaaaaaatcgtgcttgataaagcacaatgggttaaagcaaaagaaaaggaatttcccctttcacaatttaaacaaaacattcaaaactctgaccgctctttttatgatgcgttagcaaaaggtacgcatcaaaagcccgcttacattttggaatgtaaaaaagcctccccttctaagggattaattcgtgctgaatttaatttggaagaaatcgccaatgtctataaacattatgcgtccgctgtatctgttctgacagatgaaaaatactttcaagggaattttgaattcttgcctttagttcgcgatatcgtaagccaacctgtgctttgcaaagattttatgattagcgaatatcaagtttaccttgctcgctactatcaagtggatgcaattttattaatgctttctgtggtaaatgatgagacttatcgtgtgctggcagatcttgctcattctcttggtatgggcgtattgacagaaaccagtaatgaagaagaatttgaacgtgcccttgcacttggtgcgaaaattattggtgtcaataatcgtaacttgcacgatttaacagtagatttaaatcgtgttgttgaactcactaaaaaatacgccgactgtattcctgctgatgtacgtattattagcgaatcaggcatttacaatcacaagcaaattcatcaattacaaaaggtggcgcatggtttcttaattgggagtagcttaatgggcaaccaagatttgaataatgcggttcgctcagtgatttttggagaaaataaagtatgcggtttaacgcgcgcgcaagatgtcaaaatcgtttacgaaaacggggcactttacggcggattaatcttcgcagaacattcaaaacgcagtgtgagtttacgccaagcgcaagaattagtaaccgctgcgccacttcgatttgttggtgtttttcagaatcaagaaattgactttatcgtcaaaatagccagccagttgcagctttatgcggtgcaattacatggtgcagaaactgaagcatttattactgcacttcgccagcaactaccaaaaaacacgcaaatctggaaagcgatttcggtcaatactgaagcccaaagtgcggtcgattttacagatgatttgaatgtggatcgttatatttttgatagccaaacagcgaaccaacaaggtggcacgggtaaaacctttgattggtcattaattcctgaaaatcttaaacacaagattattttagctggaggtatctcaccaaataatgtggaacaagccattgcgcaaggttgcttaggtttagatcttaattctggggtggaaagttctgcgggcgtcaaagatcaagaaaaagtgcggttagtttttaataatatttattaa

SEQ ID NO: 22326 - DNA, 2865 bp, Haemophilus influenzae
atgacacaaaaattcgaaatggcagaccgttttaatccgtctgcggtagaacaagccctttatcaacgttgggaagagagcggttattttaaaccgtctgaaaatgaaaatgcgccgagctattgcattgcaattccgccgccgaacgtaacaggttctctacacatggggcatgctttccaacaaaccttaatggataccttaatccgttttaaccgtatggaagggcataacaccttatggcaaacggggacagaccacgcgggtattgcgacccaaatggtggtggaacgtaaaattgcggctgaagaaggcaaaactcgccacgattatggtcgcgaagcgttcatcaataaaatttgggattggaaagcctattcaggtggcacaatcagccaacaaatgcgccgtttagggaactcaatcgactgggaacgtgagcgtttcacgatggacgatggtttatcgaatgcagtaaaagaagtgtttgttcgtttgcacgaagaagggttgatttaccgtggcaaacgcttggtaaactgggatccaaaacttcacaccgcaatttctgatttagaagttgaaaataaagaaagcaaaggctccctttggcatttccgttatccgttagcaaacgatgcaaaaacggcagatggtaaagattatttagtggtggcaaccacacgtccagaaactatgttgggcgatacggcggtggcggtacatcctgaagatgagcgttaccaatctttaattggtaaaactgttgttctaccactggctaaccgtgaaattccgattattgccgatgaatatgtggatcgtgaattcggtacaggtgtcgtgaaaatcaccccagcacacgatttcaacgactatgaagtgggtaaacgtcataatttaccaatggtaaatgtattgacgctgaacgcaaatattcgtgatgaagcggaaattatcggtactgacggcaaaccacttgctggctatgaagcgactattcctgcggattaccgtggcttagaacgttttgctgcgcgtaagaaaattgtcgcagattttgaagcactgggtttattagacgaaattaaaccacacgatttgaaagtgccttatggcgaccgtggcggtgtgccaattgagccgatgctaactgaccaatggtatgtaagcgtaaaaccacttgctgatgtggcaattaaagcggtggaagatggcgaaatccaattcgtgccgaaacaatacgaaaacctttacttctcttggatgcgtgatattcaagattggtgtatttctcgccaactttggtggggacaccgcattccagcgtggtatgacgcggaaggcaatgtttatgtcgcacgtaacgaagaagaagtgcggtcaaaatataacttagattctgcggttgaactcaaacaagatgaagacgtgttagatacgtggttctcatcaggcttatggacgttctctaccttaggttggccagagcaaactaaagagctcaaaatgttccacccaacggatgtgttaatcacaggttttgatatcatcttcttctgggttgcacgtatgataatgtttacgatgcacttcgtaaaagatgaaaacggcaaaccacaagtgccattcaaaaccgtgtatgtaacaggcttgatccgtgatgaacaaggtcaaaaaatgtcgaaatcgaaaggtaacgtgcttgacccaatcgatatgattgacggtattagccttgaagatttacttgaaaaacgtactggcaacatgatgcagccgcaattagcagaaaaaattgctaaagcgactcgcaaagaatttgctgaaggtattgcggctcacggtacagatgcattgcgtttcacattagctgcattggcttcaaacggtcgtgacattaactgggatatgaaacgtttagagggctaccgtaatttctgtaacaaattatggaatgcaagccgtttcgtcttaacaaatgaaaaattagatttaagccaaggcgagatcgaattctcattagcggatcgttggattcaatcggaattcaatcgcacagtggaaactttccgtagctcattaagccaatatcgtttcgacctttgtgccaatgcgatttatgagtttacctggaaccaattctgtgactggtatttagaattaactaaaccagtatttgcaaacggcaacgcagcacaaatccgtgcggcaagccaaaccttggttcacgtgttagaaaaattattacgtttagcgcatccgcttattccatttattaccgaagaaatttggcaaaaagtgaaaggatttgtcggcattactgctgacagcattatgttacaacctttcccacaagtggaagagagcggctttgatccagaagcagaagctgaaattgagtggttaaaagaagtgatcgttgcggtgcgtaatattcgtgcagaaagcaacatcgcaccaagtaaaggtttagatctgttattccgtaatttaagtgcagaaaatgcaaaaattctcgaaaaacagaccgctcttttaaaagccatggcgaagttagacaacgttcaagtgttagccacaaacgaaacagcaccacttgcggtagcgaaactcgtgggcaatgctgaattgcttgtgccaatggctggctttatcaataaagaagcagagcttgcccgtttaaccaaagagattgaaaaatatcaaaacgaagtgaaacgcatcgaaaacaaacttagcaatgaagctttcgtggctaaagcacctgaagcggttattgcgaaagaacgcgaaaaacaagcggaataccaatctggattagaaaaaatccaagagcagtataaagcgattgaggcgttgtaa

SEQ ID NO: 22327 - DNA, 435 bp, Haemophilus influenzae
atggcaaaaactgcgcaattttatattcttacggaaaattgtactttaactgtcgaagaaatagcctgtaatcttgctgcttcaatatggcgttcagggaaaaaagtactaattagttgcgaaagtgaggctcaagcgctagagattgacgagcgtttgtggcaacgagatcctaatgaatttgttccacataatttatcgggtgaggcaacacaatatcccacaccgattgagatttcatggcttggaaaacgaaatttacaacgccgcgatttgttaatcaatttgcaacaagaaatcccagattttagccatagttttacccaaattattgattttgtgccgaaagatgatgcgttaaaaacacaagctcgagaacgttataaacaattacgtctgcaaggttggaatctttctactgaaaacgtgggttaa

SEQ ID NO: 22328 - DNA, 825 bp, Haemophilus influenzae
atgacaaaaaaatacgacttacattgtcatagtaccgcatcagatggagtgttgagtccaaccgaattagtgcatcgtgcttatgcgcaaggcgtgaacgtgctggcattatgcgatcacgatacgattgcgggcattgatgaagctgagattgcagcgaaagaagtaggcattgaattgattactggagtagaaatttcgacaaattgggaagggcgagggatccatattgtaggattaaacttcgataaaactcatccaaaaatgaccgcacttttgcaaagtcaaaaagcattacgggaaaaaagagcggtggaaattggcgataaattagaaaaagcagggattcctaatgcttatgacggagcaaaagccttagccgatggcgaagtgacgcgtgctcattatgcacgttatttggtgcagattggtaaggtatctaatgatggtcaggcctttaaacgctatttagggcaaggaaaatcggcatttgttaaagctgaatgggctgatattcccacagcgattgagacaatccatgccgcaggtggtatagctattattgcgcatccattacgttataacatgacggggaaatgggtgcgtaagctgatagtcgattttaaggcttggggcggtgatggaatggaaatggcggattgtggtcaaacaaaagatcagcgtcaaatgcttgctcgttgggcaaaagaatttgatctgcagggatccgttggctccgattttcatttcccttgtggctggattgagttaggaaaaaatttagatttagttgatagcgttatcccagtttgggaaaaattttag

SEQ ID NO: 22329 - DNA, 1194 bp, Haemophilus influenzae
atgtcagacacacttcttaacccttattttggcgaatttggcggaatgtatgtacccgaaattttagtgcctgttttaaagcaattagaacaagcctttgtggaggctcaaaatgatcctacattccaagcagaatttgctgatttactcaaaaattatgcgggcagaccgaccgcacttactctttgtcgtaacttaaccaaaggtacaaaaactaaactttatcttaaacgtgaagatttattacacggtggtgcacacaaaacaaaccaagtgttagggcaaattttattggctaaacgtatgggcaaaacgcgtattattgccgaaacaggtgcagggcaacacggcgtggcaacagccctagcttgtgctatgttagatatgccgtgccgtgtttatatgggggcaaaagatgttgagcgtcaatcaccaaacgtgttccgtatgcgtttaatgggcgcggaagtgattcctgtacaaaaaggctcttgttctttaaaagatgcctgttgtgaagcgatgcgtgattggtcagcaaattatgaaaccacccattatttacttggaaccgctgcaggccctcaccccttcccgacgattgtgagagaatttcaaaaaatgattggcgaagaaaccaaacgtcaaattctcgaacgggaaggtcgtttacctgatacagtcattgctgctgttggcggtggctcgaatgcaattggtatgtttgctgattttattgatgaatcaaatgtgcgtttaattggtgttgagcctgcgggtaaaggtattgaaacgggcgaacacggtgcaccgctcaagcacggcacaacaggcatctacttcggaatgaaatcgccaattatgcaagataaagatggacaaattgaggaatcctattccatttctgcagggttagattttccctctgtcgggccgcaacatgcttatttaaatgagattggtcgtgctgattatgtatcgattaccgatgaagaagctctcaacgcattccaagaattggcaaaacatgaaggcattatccctgcattagaaagctcacacgccttggcttatgccttgaaattgattaaacaaaatcctgaaaaagaacaacttttagtggttaatctttcaggacgaggcgataaagatatttttaccgttgataaaattttaaatggaggagcaaactaa

SEQ ID NO: 22330 - DNA, 954 bp, Haemophilus influenzae
atggacgcaaccttaaatattgcgatagcagcagaatttgaattaagtgaaaaaattgtagagcgtttagaacaaagtgcgcttgaaattagcaaagtttctattgttgaaataataccttttgaagaagaacaaaatattcgttttcgaaataaaggcgttgaacaactttcgccaaatgaagtagagtgggctgattttaattatgtcttttttgcaggaaaacttgagcaagtttcccatattgcgcaagcagcagagcagggctgtattgtcattgatatgttaggcgtttgcagtgcactttcggatgtgcctgttgttgttccaacggtaaatgaatcacaattacttgaattgagacaacgtaacattgttagcttgcctgatccacaagtaagccaacttgctttaacgcttgccccgattttacaagaaacgaatcttaatcaagtgtttgtcacctctttattgccggcttcttatacggatgcggaaaccgtgactaaacttgcgggacaaacagcccgtttattaaatggtattccattggatgaagaagaaacgcgcttagcctttgatgtttatccgtatcaaacacctaatttatcgaatcaattacaacgaatttttccgcaattagatcgtgctacatttcatgcaatccaagtacctgtattttatggattggcacaaaaagtcaccgcactttcagattatgatttcgactatcagcctcaaaatagcgagcttatcgctttagaagaaaccttaattacgcctgtgcttaatggagaacaagaaaatggcgaagaatcagtaaaacttcatttaagtcaaataagtgcggtagaaaatggcgtagaattttggtctgtggcagatgaacaacgctttaatctcgccttactttcagtgaaattgttggaaggaatttatcagcaaggttattaa

SEQ ID NO: 22331 - DNA, 888 bp, Haemophilus influenzae
atgggtcacttttctgaagaattacaacaggttcaaactcgtatcaatcgctttttagaagctcaatttgaaggcattgaaagtcataatgcgcctttgcttgaggcgatgaaatacgcattattacttggcggtaagcgagttcgccctttcttagtttacgcaacaggtcaaatgcttggcgcagagaaacaaaccttagattacgctgctgctgccattgaagccattcacgcctattccttaattcacgatgatttacctgcaatggatgatgacaatttacgccgtggacatcctacttgtcatatccaatttgatgaagctacagctattcttgcgggcgatgcactgcaaagtttcgcatttgaaatattaaccaaaacaccgaatatttctactgaacaaaaactggctttaattcaaattttagcgcaaggcgctggtgtgcaaggaatgtgtttagggcaaagtttagatcttatttctgagcataaacagattagtttaagtgaattagaattaattcatcgtaacaaaacgggtgcattgctaattgccgcattgaaattaggtttcatttgttctccgcattttaccgacaaaaggttagaacaatccttaacacaatatgcggaagccattggtttagcctttcaagttcaagacgatattttagatattgaaggcgatagtgcagaaattggcaaacaggtgggtgccgatcttgatttagataaaagtacatatccaaaattacttggattaagtggtgcaaaacaaaaagcgcaagatctatatcaaagtgcgttgtctgaattagaaaaaattccttttgatacaaccgttcgtgcattagctgaattcattattaccagaaaaagttaa

SEQ ID NO: 22332 - DNA, 1878 bp, Haemophilus influenzae
atgactaacaatatgaacaattatcctcttttatctttaattaattctccagaagatttgcgtcttttaaataaagatcagctaccacaactctgtcaagaattacgtgcttatcttttagaatctgttagtcaaactagcggacatttagcgtcaggtttaggcactgtagagctaaccgttgcgctgcattatgtatataagacgccatttgatcagttaatttgggatgtgggacatcaagcttatccacataaaatcctaacgggtcgccgagagcaaatgtccacaattcgccaaaaagacggtattcatccttttccttggcgtgaagaaagtgaatttgatgtattaagtgttggtcactcctctacgtctattagtgcgggattaggcattgccgttgccgcagaacgagaaaatgcaggtagaaaaacagtatgcgtaatcggtgatggcgcaattactgcgggaatggcatttgaggcattaaatcacgcgggggcattgcatacagatatgttagttattttaaatgataacgaaatgtctatttcagaaaacgttggtgcattaaataatcatcttgcgcgtattttctctggctctctttactctacgcttcgtgatggcagtaaaaaaatccttgataaagttcctccaatcaaaaattttatgaaaaaaaccgaagaacatatgaaaggtgtaatgttttcgccagaaagtacattatttgaagaactcggttttaactatattggcccagtggatgggcataacattgatgaattagtggctacgcttacgaatatgcgtaatctgaaaggcccacaatttttgcatataaaaacgaaaaaaggtaaaggatacgcacccgcagaaaaagatccgattggtttccacggtgtacctaaatttgatccaatcagtggcgaattgcccaaaaacaatagtaaaccaacttattcgaaaatttttggcgattggctatgtgaaatggcagaaaaagatgccaaaattataggtatcacacctgcaatgcgtgagggttcaggtatggtagaattttcccaacgcttcccaaaacaatattttgacgtagcgattgcagaacagcacgctgtcacgtttgccacaggacttgcaattggcggatataaacctgtcgtcgcaatttactcgacatttttacaacgtgcttacgatcaattaattcacgatgttgccattcaaaatctccctgtgctatttgcaattgatcgagcagggatagttggtgcagatggggctacacatcaaggtgcattcgatattagctttatgcgttgcattccaaatatgatcattatgacgccgagtgatgaaaatgaatgccgtcaaatgctctatacaggttatcaatgtggaaaacctgcggcagtgcgctaccctcgcggaaatgccgttggtgtaaaacttactcctttagaaatgcttcctattggtaaatcacgtttaattcgaaaaggtcaaaaaattgcgattttaaattttggtactctattaccatccgctttagagttatcagaaaaactcaatgcaacggttgtcgatatgcgttttgtgaaaccgattgatattgaaatgattaatgtgcttgcacaaactcacgattatttggtcacattggaagaaaatgcaattcaaggtggagcgggatctgctgttgcggaagtactaaattcatcaggaaaatcaaccgcacttttacaacttggcttgccagattattttattccacaagcgacacagcaagaagcattggcagatttaggattggatacaaaaggcattgaagaaaaaattctcaactttattgcaaaacaaggtaatttataa

SEQ ID NO: 22333 - DNA, 639 bp, Haemophilus influenzae
atgtccagcgcatcaagtaaacgttcagtaatgacccttttttcaaataaagatgatatttattgccatcaggtaaaaattgttttggcagaaaaaggtgtgctttatgaaaacgcagaagttgatttgcaagctctaccagaagatttaatggaattaaatccatacggcactgtgcctacgttggttgatcgtgatctcgtattatttaattcacgcatcataatggaatatcttgatgaacgttttccacatcctccattaatgcaagtgtatcctgtttctcgtgctaaagatcgacttttaatgttacgtattgaacaagattggtatccaacccttgcaaaagcagaaaatggcacagaaaaagaaaaaacttcagcattaaaacagttaaaagaagaactattagggattgcaccaatttttcaacagatgccttattttatgaatgaagaatttggtttggttgattgctatgttgcaccattattatggaaattaaaacatttaggtgtggaatttacaggcacaggaagtaaagcgattaaagcttatatggaacgtgtgtttacacgtgattcttttttgcaatctgtaggtgaagctgcaccaaaaaatttaatggatgataaataa

SEQ ID NO: 22334 - DNA, 393 bp, Haemophilus influenzae
atggcagagaatcaaaactacggcacaggccgccgcaaaagctcttcagctcgtgtatttatcaaaccgggcagtggtaaaatcactatcaaccaacgtgaattagatgtttactttggtcgcgaaacagcacgtatggtagtacgtcagccattagagttggttgawttaactgataagttagatttatacatcacagttaaaggtggtggtatttctggtcaagcgggtgcaatccgtcacggtatcactcgtgcattaatggaatacgatgaaacattacgcccagcacttcgtgcagctggtttcgttactcgtgacgcacgtcgcgttgaacgtaaaaaagtgggtttacacaaagcacgtcgtcgtccacaatactcaaaacgttaa

SEQ ID NO: 22335 - DNA, 429 bp, Haemophilus influenzae
atgaaaacttttgtagcaaaaccagaaacggttaaacgcgactggtacgtagtagatgcgacaggtaaaactttaggtcgtttagcgactgaattagcacgtcgtcttcgtggtaaacacaaggctgagtacactccacacgtagatactggtgattacatcatcgttatcaacgcagacaaagtggcagtaactggtcgtaaagaaacagataaactttactactggcacactggctatgtaggtggtattaaacaagcgactttcaaagaaatgatcgctcgccgtcctgaagcagtgattgaaattgcggttaaaggtatgttgccaaaaggtccattaggccgtgcaatgttccgtaaattaaaagtgtatgcaggtggagaacaccaacacgcagcacaacaaccacaagtattagatatttaa

SEQ ID NO: 22336 - DNA, 879 bp, Haemophilus influenzae
atgagctacgcgaaagaaattgatacattaaatcaacatattgcagattttaataaaaaaattaatgtctcctttgaattttttccacctaaaaacgaaaaaatggaaacccttctatgggattcaattcatcgtttaaaagtattaaagcctaaatttgtgtcagtcacttacggtgcaaattcgggagaacgtgaccgcactcacggcattgtgaaagccattaaacaagaaactggcttagaagccgcaccacatttaactggaattgatgccacacctgaagaattaaaacaaattgcgagagattattgggatagtggtattcgccgtattgttgcgttacgcggtgacgaacctaaaggttacgcgaaaaaaccattttatgcgtcagatcttgtggaattactccgttctgtcgctgattttgatatttctgtagccgcttatcccgaagttcatccagaagcaaaatccgcacaagcagacttaattaatttaaaacgtaaaattgatgcaggtgcaaaccacgtcattacacaatttttctttgatattgaaaactacctacgttttcgtgatcgttgtgcatcaattggtattgatactgaaatcgtacccggtattttacctgttactaattttaaacaactccaaaaaatggcatcattcactaatgtgaaaattccagcgtggttagttaaagcctatgatggtttggataatgatccaactacacgtaatcttgtggcagcaagtgttgcaatggatatggtaaaaattttatctcgcgaaggcgtgaatgacttccacttttatacattaaatcgtagtgaattaacttatgctatctgtcatatgttaggtgtaagaccttaa

SEQ ID NO: 22337 - DNA, 324 bp, Haemophilus influenzae
atgataaattgtaatccgcacgtaaaatgtgcggatttttatttcgggaaattaaatatgctatgtgccatttataaaagtaaaaagaagttaggaagttacctttatgttgccaatagagaggatttttcttcagtgcccagcgttttactcgaacattttggtaaaccagaattagtgatgatgtttaatctgcttgggcgtaaagcactacacaatgtagattgtaatgaagtattggaaacaattaaacgccaaggattttacttacaaatagcaaaacaagatgatggtttatttaatagcttgagtgagatcaaataa

SEQ ID NO: 22338 - DNA, 1215 bp, Haemophilus influenzae
atgcttacattggatcaagctcgctcgaaaatgcttgaacagcttcccttcccgactcaaactgaatacctaaatttacaagaagccgccaatcgaatttgtgcagaagatattatttcgcctatcaatgttccctctttcgataactcagcaatggatggttatgctgtacgtttatcggatttacaacaatctttaaccctttcagtggcagggaaatcttttgcaggtaatccattccaagaggaatggccatcaaaaagtgcggtcagaattatgactggtgcgatgattcctgaaggcacagatgcagtgataatgcaagagcaagtaacactcaatgaagacggcaccatcacttttagtgaattacctaagccgaatcaaaacatccgtcgtattggtgaagatgtaaaaaaaggggatgtcgtattagaacaaggcgcacagctcaccccagtttccttgccattattggcctctctaggcattgcagaagtaaaatgctatcgtcaattaaaagtcggtgtactctcaactggcgatgaacttgtggaagtgggcaaaccattacaaagcggacaaatctatgacactaaccgtttcaccgtaaaattactgctagaaaaactacactgtgaagtcattgatttaggactattacctgataacgaagctgaatttgaaaaagcatttattgccgcacaaagccaagccgatttagtgattactagtggcggtgtttccgttggtgaagcggatttcactaaagcggtattggaaaaagtaggtcaagtaaatttctggaaaattgcaatcaaaccgggcaaaccattcgcttttggtaaattagaaaatgcttggttctgtggtttacccggcaatcctgtttctgcattagtaacattttatcaacttgttcagccattaatcgctaaacttcaaggccaaaaacaatggaaaaaaccaccgcacttttcagccattgctacaatgaatttgaaaaaagcagtgggacgtttagacttccaacggggtttttattacatcaatgaacaaggccaaattgaagtgcaatcagtaggtttccaaggttctcatctctttagtgcttttgtaaaaagcaattgttttatcgttttagaacaagaacgtggcaatgtctctgcgggcgaaacagtgacaattgagcctttcaatcatttattaggataa

SEQ ID NO: 22339 - DNA, 732 bp, Haemophilus influenzae
atgatcgaacttagtcacgaagaagaattgcgttataaccgtcaaattattcttaagagcgtagattttgacgggcaagaaaaacttaaagcaagcaaaatgctgatcgttgggcttggtggcttaggctgtgcagccagccaatatctcgcagcagcaggtgttggaaatttaacgctgttggatttcgatacagtttctctttcgaatcttcaacgccaagtcttgcactgcgatgctcgcttgaatatgccaaaagtggaatccgctaaaattgcactggaacaaatcaatccacatataaacatagagacgattaatgcgaagttagacgaagaaaaactcgcagaaatcattccgcactttgatattgttttagattgtacagacaatgtggaaatccgtaatcaattggatcgccaatgtaatcatatgaaagtccctcttatttctggcgcagcgattcggatggaaggtcaggtttccgttttcacttatgaaccaaatacgcctacttatcgtgatctcagcaaattatttagacaaaatgtattaagctgtgtggaagctggcgtgcttgcaccaatcgtcggtattgtgggctgcattcaagccttagaagcaattaaagtgcggttaaaaatcggtaagaatttgtgtggccgcctattgatgattgacggtttttcgatgaatatccgagaaattaaacttccaaccaatatggaataa

SEQ ID NO: 22340 - DNA, 588 bp, Haemophilus influenzae
atggaagaattattaagtgcggtaattattggcatcgttttaggttggctgtgcaaagattggttgcattttccaaatggttccaatctttacgtgcttattacgttgatcttttttgttgggattcagcttcgtaacaatggcatttccttgaaagaagtcttgctaaataagcagggtttaatgatgggggcaatttttaccctaagttctttaattgggggcgttatttcagcattttttctaagtatgccgattactcaaggtttagccttttcatcgggatttggttggtattctttatcaagtgttgtgctgacaaatgcttgggggccgatgcagggcagtattgcctttttcaatgatttatcgcgtgaaattttgagtttatttttaattccattgtttatgcaacattatcgctctacagctattgagattacaggcgcaacggcattagattgtacattgccgattattcaaaaatcaggtggaattgaagtgacgcctatcgccatttcttttggtatggtgacaaatttattaccgccgttgttgttagtttttttctcaagttttccaatttga

SEQ ID NO: 22341 - DNA, 1338 bp, Haemophilus influenzae; identical to SEQ ID NO: 22309

SEQ ID NO: 22342 - DNA, 828 bp, Haemophilus influenzae; identical to SEQ ID NO: 22308

SEQ ID NO: 22343 - DNA, 1146 bp, Haemophilus influenzae
gtgggtcgccaacgtggtgcgggcttaggtggcggacacgatgagcgtgaacaaaccttaaaccaaatgctagttgaaatggatggctttagcggtaatgacggtgtaattgttattgcagcaactaaccgtccagatgtgcttgatccagctttaacccgtccaggccgttttgaccggcaagtagttgttggcttacctgatgtgaaaggtcgtgagcaaatcttaaaagtgcatatgcgtaaagtgtctgttgcgcaagatgttgatgcaatgacgttagcgcgtggtacgccgggctattctggtgcagatttagcaaatttagtcaatgaggcggctttgtttgctgctcgagtgaataaacgtacggtaaccatgcttgagtttgaaaaagcgaaagataaaatcaatatggggccagagcgtcgcactatgattatgacggataagcaaaaagaatccactgcttatcatgaagctggtcatgcgattgtggggtatttagtgcctgaacacgatcctgttcacaaagtgaccattattcctcgaggacgtgccttgggtgtgacattcttcttacctgagggcgatcaaattagtattagccaaaaacaattagaaagtaagctttctaccttgtatgcgggtcgtttagcggaagatttgatttacggcgaagaaaatatctcaacaggtgcatcaaatgatattaaagtcgcaactaatattgcgcgtaatatggtaacgcaatggggattctctgaaaagttaggtccgattctttatacggaagatgagggcgaggttttcttaggtcgttcaatggcgaaagcgaaacatatgtcagatgaaactgcgcattcgattgatgaagaagtgcgtgcaattgtaaatcgtaactatgcgagagcaagagagattttgatcgacaatatggatattcttcatgcgatgaaagatgcattagtcaaatatgaaactattgaagaagaacaaattaaacaattgatgaatcgcgaacctgtcacaccgccatcaggttggggagagccgaaaactcagcaggctgcttatgcaaattcaacaacgaatgatacaaagcccgaaagtgcggtagaaaataccgatgattttaatgtttaa

SEQ ID NO: 22344 - DNA, 1038 bp, Haemophilus influenzae
atggatttaggaccaatttataatactagagacataaatgatggtaaggttattaatattgacaacccaaattataccaatccagtggcaataaagaaaaatgaaaataacaatgcctaccaatttaatcacttaaaaactttaggtctttatattcaaaataccacttattttacagataactttattataacgggaggacttcgttatgaatattttgatcaagttgttggtcgatcaacattaaagaatattagaagtggatatctggctcaaaaagacgggaaacttctctatcagttaggtagtgtttataaatttactccaaatattgcaacattttttaaccatgcagaatcattccgtccacaaaataatagaacgcttattattaatggcgaacttcctgctgaacagggtaaatcttttgaaacaggtctaaaatatgagaatgcatatttaaatgcaactgtagctttatttaatataaacaaacgtaatgttgcagaaacagttaatgttaatggcacaaatgaactacaaattgttggaaaacagcgttctcgtggcattgagtttgatctaaatggacaacttactgataatttaagtattgcagcaaactatacttacacaaaagtaaaaaacctagaaaatcacaacaataaattagctgttggtaaacaactttctggcgtaccaaaacatcaagcatcattattcttagcctataatatcggcgaatttgattttggtaatattcgtgtcggtggaggtgcgcgttatttaggttcttggtatgcctataataatacttatacaaaagcgtataaacttccacaggctattgtttatgatacatttattgcctatgacacaaaaatttcagggaaaaaagtatcctttcagttaaatggtaaaaacttatctaataaagtttactccccatcaacttcagggaatgcaagcagaacgcttattcctgttgcgttaggttatgctcgtgaagttatattaaacactaaaattgaattttaa

SEQ ID NO: 22345 - DNA, 1770 bp, Haemophilus influenzae
atgaactggcaaaccgaacttaataatagtttaaactggattttaaccgcacttttttgggtggtattgtgctttagcgtaacaatgttagccttaaaacaaactactttcggcaaaaaattctggtgtattgtctctccatcaatggataaaaaaacaagcattaaactaattttaatgttgttagtactatttataatgatattgttggaagtacgatttagtgtacttaattcatttttttacaatggattgtatagctcaatgcaagaattaaatattgagaaattttggttctttgcaaaactaaatgctctccttgtggtagcacaagttatacatgccattgctgattacttctttcaacaagtatttgaaattcgttggttggaaagctttaatgcaacacttgttaaacgctggctaaataagaaaaaatactatcgcctaaaatatgaacgagatttaccggataatatcgatcaacgtatcgaacaagatgcgagagaatttattaccagtacagtacaaattgtgcgaggcgtgattaactcggtgctcacgaccattgaatttacgattattttatggtcactttccggcgtattaactttattcggatttaatatcgaaaaaggcgttgttttcttcatttatgcctttattatttttgcaacactcatgtctgtttggattggtcgccctctaattaagctaaattttacaaaagagaaactcaatggcgattatcgttattccttaatccgtgtacgagacaatgcagaaagcattgctttttataatggcgagccaaaagaacaaactttcttacaacatcaattccgtcaaattattcataaccgttggtccattgtattaaaaatgttgggcttaaatagtttcaactctggagtaactcgcgtggccaaattattgcctttaatgttacaagcaccacgttttttttctggtcagataaaactaggagatatgcatcaaacagtccaagcatttaaccgattaatgaccgcactttcattcttccgcttgttctatgagcaattcacactctatcaagctcggttaaatcgtctttatggttttataacaaaaatggatgaattagataaacaaaacgttcatcatccttttcattgctctcatcgtgtcgccttaaaaaatttcggtattaaagatgaacaaggtcatgtactactcaataatttaaatattaatttagaaaatggagatgccctattgattcaaggtgcatctggaacaggaaaaacatcgctactaaaagcaattgcaggaatctatccttttgaaaccataggtattgcagagcatccatgcatgggaagtttattcctgccacaacgaccttatatgccgcagggtactttacgagaagcaatttgttatccaaatatcaatccaagtcacgcagaattggaacaaaccatgaaggattgtgcgctaggaaaatatatacacgcacttaatgtaaaaaatgactggcaagcgattttatcgcccggtgaacttcaaagagtggcgtttattcgtattttactcacaaaaccagatgtcgtatttctcgatgaaacgacttcagcattggatgaaacaaccgagaatttactctaccaaacaattaaagagcgtttgcccgaaatgatcattctcagcgtaggtcatcgtagcacattacagcaatttcataacaaacaactaaaattagatgtatgtttattatgtgaaaattag

SEQ ID NO: 22346 - DNA, 270 bp, Haemophilus influenzae
atgtctctaagtactgaaaaaaaagcagcaatcgttgctgaatttggtcgtgatgcgaaagatactggttcttctgaagttcaaatcgcattattaactgcacaaatcaaccacttacaaactcacttcgcagagcacaaaaaagaccaccatggtcgtcgtggtttattacgtatggtttctcgtcgtcgtaaacttttagactacttaaaacgtactgatcttgctttataccaaagcactatcgctcgtttaggtttacgtcgctaa

SEQ ID NO: 22347 - DNA, 1014 bp, Haemophilus influenzae
atgcagccagatagttaccctaaaattctctttggcttaacgctgttgcttgtgattaccgccgtgatttctttgggaatagggcggtattctttgtctgtaccgcaaattggtcaaattctgtgggcaaaagcgaccgcacttgagatcgatccagtgcagcaacaggtgatttttcaagtgcgtttacctcgaattttaaccgcactttgcgtgggtgccggtttggcattgagtggtgtggtattgcaaggcatttttcgtaacccgttagtgaatccgcatattatcggcgtgacctccggttcagccttcggtggcaccttggcaattttctttggattcagtttatacggcttatttaccagcactattttattcggcttcggcacgcttgccttggtttttctatttagcttcaaatttaatcaacgcagcttgttgatgcttattcttatcggcatgattttaagcggacttttttcagccctagtgagcctattgcaatacatttccgatacagaagaaaaattgccaagcattgtgttttggttgatggggagttttgccacctctaactgggaaaaactcctctttttctttgtcccgtttttgctgtgtagctcgattttgctcagcttaagttggcgcttgaatttactgtctttagatgagaaagaagccaaggctttgggcgtgaaaatggccccattacgttggttagtgatctttttaagcggttcgttagtggcatgccaggtggcaattagcggcagtatcggctgggtcgggctgatcattcctcatcttagccgtatgctggtaggtgccaatcatcaaagtttattgccttgcaccatgcttgttggggcgacttatatgttgcttgtggacaatgttgcgcgttccctatccgatgccgaaattccaatcagtattttgaccgcacttattggtgcaccgttgtttggtgtattggtatataaactaaaacgcggaggcatgaatgaataa

SEQ ID NO: 22348 - DNA, 1056 bp, Haemophilus influenzae
atgaaacttaaatcattgttaattgcctgcttgctcagttccctttctttttcagcattagctgatcgcattattacggaccaactcgatcgcaaagtgacaattcccgatcacattaaccgagccgtggtgttacagcaccaaactttgaatattgccgtgcagttggatgccacaaaacagattgtgggagtgctttccaactggaagaaacaactaggcaaaaactatgttcgccttgcaccggaactggaaaacatggcgatgccgggcgatttgaattccgttaatattgaaagtttgttggcgttaaaaccggatgtggtgtttgtgactaactacgcaccgtctgaaatgatcaagcaaatcagtgacgtgaatatccctgtggtagccatttccttgcgtactggtgaagtgggcgaaaaaggtaaacttaatccaaccttaactgacgaagataaagcttataatgacggcttaaaacagggcattgaactgattgccgaggtgtttgagaaaaaacaacaaggtgatgagttagtgaaagctgcctttgctaatcgtaagttgttggcagatcgcctaggcgacgtttctgccgataaacgtgtgcgcacttatatggcaaatccggatttaggcacttatggttccggtaaatatacggggcttatgatggaacatgcgggcgcttataacgtcgcagcggcaaccattaaaggtttcaaacaggtttctctagaaaatgtgttggaatggaatcctgcggtgattttggtgcaagatcgttatcctgatgtagtaccacaaattttgaacgatcaaggttgggcgaatattcaggcactgaaagataaaaaagtttttttgatgccggaatatgctaaagcctggggatacccgatgccggaagccttagcattgggcgaagtatggttggctaaagccctttatccgcaacgtttccaagacgtggatttggataaaatggtgaacgattattaccaaaaattctaccgcacttcttacaaacccgacaatgcagccagatag

SEQ ID NO: 22349 - DNA, 1431 bp, Haemophilus influenzae
atggctcaatattcagcagaatttaagcaagcaaaagtactcgtattaggcgacgtgatgcttgatcgttattggttcggcgcaaccaaccgtatttcaccagaagcaccagtaccagtggttcgtgtacaagaaaatgaagaacgcgcgggtggtgcagcaaatgtggcgatgaatattgcttcactcaatgtacccgttcagttaatgggattgattggacaagatgaaactggttctgcactttccctcttattagaaaaacaaaaaattgattgtaattttgttgcattagaaacccatccaaccattactaaattacgtattttatctcgtcatcaacagctgctccgccttgattttgaagaagatttcaataatgtagattgcaaggatttattagcgaagttagaaagtgcggtgaaaaattacggtgctttgattctttctgattacggcaaaggcacgcttaaagatgttcagaaaatgattcaaattgcacgcaaagcgaatgtgcctgtgttgatcgatccaaagggaactgattttgaacgttatcgtggggctacattattgacacccaatatgtctgaatttgaagctgttgtgggtaaatgcaatacggaagaagagattattgagaaaggtttaaaattaatttctgatattgaattaaccgcacttttggtgacgcgttctgaaaaaggcatgacattattacgcccaaatcaagagccttatcatttgccaactgttgcaaaagaagtgtttgatgtgacgggagccggtgacactgtcattagcgtattagcaaccgcattagcagatggacgttctttcgaagaatcttgttacctagccaatgttgccgcaggaattgtggtggggaaattggggacttcaacggtttcgaccgtggaacttgaaaatgcgattcatgctcgtcctgaaactggatttggcattatgagtgaagcagaattaaaagatgctgtcgcacaagctaaagcgcgcggtgaaaaaattgtgatgactaatggctgttttgatattttgcatccagggcatatttcttatttagaaaatgcacgcaaattgggcgatcgtctaattgttgcggtaaacagcgacgattctgttaaacgcttaaaaggtgaaagtcgcccaattaataatcttgaaaaccgtatggcggtattggctggtttggcatccgtagactggttggtgcctttcactgaagatacaccacaacgtttaatcggcgaaattctaccagatcttttagtcaaaggcggcgattacaaacccgaagagattgcaggcagtaaagaagtttgggcaaacggtggcgatgttaaagtgctaaactttgaaaatggttgttcaacaacaaatgtgattgaaaaaattaaattattgaaagattaa

SEQ ID NO: 22350 - DNA, 1221 bp, Haemophilus influenzae
atgagaagaactgtaattacaggctttgggattatttcaagtatcggtaacaacaaagaagaagtattggcttcattaaaagcagggaaatcaggtattgaagttgtgcctgagtttgtagaaatgaatatgcgtagccatgttgccggaacaatcaaattaaacccaagcgagcacattgatcgtaaagtgttccgttttatgggtgatgcagcggcttatgcttatctttctatgcgtgaagcgattgaggatgctggcttaacagaagatcaagtttctaatgatcgtactggtttagtgattggtgcgggtacgggttctgcacataaccagttagtggcttgtgatgcggtgcgtggtcctagaggtgtaaaggcgattggtccttacgcagtaacgaaaacaatggcatcaagtgtttctgcctgtttagctactccttataaaatccgtggtgtgaactattcaatgagttctgcttgtgcaacctctgcacattgtatcggtcatgcggttgagttaattcaattaggcaaacaagatgtggtttttgcaggtggtgcggaagaattatcttgggaatgtgcaactgaatttgatgcgatgggtgccgtttcaactaaatacaatgaaacgccagaaaaagcatctcgtgcttatgacgcaaatcgtgacggtttcgttattgcaggtggtggtgctgttgtggttgtggaagaattagaacatgcacttgctcgtggtgcaaaaatttacgctgaaattgtaggttatggcgcaacttctgatggttacgatatggttgcaccaagtggtgaaggtgcagagcgttgtatgaaacaagcaatggcaactgtcgataccccaattgattacattaatgtacatggcacatctacaccagtaggtgacgtgaaagaattaggtgcaatcaaaaatgtatttggtgacaaaatcccagcgatttcttcaactaaatcaatgactggtcactctttaggtgcggcgggtgcacacgaagcaatttacacgttattaatgttggataatgattttattgcaccaagtattaatatcgaaaccttagatgaagccgctgaaggttgcaacatcgttactgagacgaaagaaaatgcaggattacaaactgtcatgtcaaacagctttggttttggtggtacaaatgcgacattaatttttaaacgttataacggttaa

SEQ ID NO: 22351 - DNA, 804 bp, Haemophilus influenzae
atgaccaatcaaaatgttctacttaatatttctggagttaagtttgtattacggatccctaatgccgtaaatttatcacttataaatcgagaatatgaggcattcaataatgcacaggcatatcgtgctggcttgaatgtagaaactcccgtattagatgccaaaagtggcgtaaaactgactcgttatttagaaaatagtaatacgttaagccagatacaattaaacgaacaaagttgtttgtctcaagttgtgaataatttatatcgtttacacaatagtgaatttgtttttcgtaatgtatttagcgtattcgatgagtttcgccaatatttttcattgctagaaaacaaatccgctttttatcaagctgattcgagaatggataaactttcagctgtattttggcaatttgaagaaatcaataaagaggtaattttacgtccgtgccacaatgatttagtccctgaaaatatgttattacaagatgatcggctattttttatcgattgggaatattcgggcttaaatgatccgctatttgatatagctactatcattgaggaagctcatttatcgaaagaagctgctgattttctattagaaacctattgcaatcagacaaataaatatcacaagacagaatttcaaatcgctcacaaacggttaaaaatccatcgtttttgccaaaatgtattgtggtttttatggacaaaagtaaaagaagaacacggcgagaattttggcgattatgcgttaaaacgcttagacgcagcatttaaactgttagaggaattgccataa

SEQ ID NO: 22352 - DNA, 609 bp, Haemophilus influenzae
atgaatcacttaattatttttgctcatcctaattcagtgcgtagttttgggcgagcgattgccaatcgtattgagcaaattagtcaagaaaatggtgtaaatgtattttttcgagatctttatgaaatgaattttaatccaattttatctcatgaagaattgcagaatgctaacaatggtattattccagaagatattcagcaagagcatgattttattcttcaagcagatttaattacgttggtttatcccctttggtggatggggttcccagcaattttgaaaggctatttagatcgcgtattaagccatggctttgcttataaaacggaaaacggcgaatcagtggggttgctcaaaaataagcaaatgcagcaatttattacgattggcagtaatgttgataaatataaagaatttggtgtagataaatcgcttaatcattgtttgattaatggattattcaattattgtggaattgaaaatgtcgagtttgaattatttggagatattcatttaattgatgataaggcgcgtaaagcgatgattgaacttgctgctcaaaaaactcaagcaaaattgaccgcacttttaaaggaaaaagagtaa

SEQ ID NO: 22353 - DNA, 1143 bp, Haemophilus influenzae
atggatgctttcaaacagcaactggaacagcttagcgcaaaaaatcaatatcgttcaattccagatttagttcatcaaggacgatatattacgcgagaaaatcgcaaaatgctgaatatgtcatctaatgattatttaggtttggcatcaaatgaaaacttgcgccagtcttttttacagcaatatggcggtaattttccctcttttaccagttcttcatcgcgtttattaacgggcaactttcctatttataccgatttggaagagcttgtcgcacaacgtttccaacgggaaagtgcgttattatttaacagcggctatcacgccaatatcggcattttgcctgctttgacgacgacgaaaagtttgattttggcagataaattagtgcatgccagcatgattgatggcattcgtttaagccaatgtgagttctttcgttatcgtcataatgattatgaacatttgaaaaatctgcttgaaaaaaacgtcggaaaatttgaccgcacttttatcgttaccgaatctgttttcagtatggacggcgacgtggcggatttgaaacagcttgttcaattaaaaaaacaatttcccaatacttatctttatgtggatgaagcccacgccgtcggtgtttatgggcaaaacggattgggtattgccgaacgagctaatgtgatagctgatatagatttgttggttggcacttttggcaaggccttagcttcaatgggggcttatgtcgtctgtgatcaaatattaaaagaatgtttgattaatcaaatgcgtccattgattttttcaaccgcacttccgccctttaatgtggcgtggactcattttatttttgaacgattaccacaactttcaaaagaaagaacgcatcttgagcagttaagtgcatttttacgccaagaagtggaacacagaacgcaaataatgccaagccaaacttgcatcgttccctatattttaggcgagaacgaagcaacccttgctaaggcgaaagatctgcaagagcaaggttattattgtttgccaatcagaccgccgacagtacccaaaaacacatccagaatccgcctgtctctaactgccgatatgacggcagatgaagtgcggcagtttgcggtgcatttataa

SEQ ID NO: 22354 - DNA, 1293 bp, Haemophilus influenzae
atggtggatgaacaatcacttttagcttttgatacacaacatatttggcatccttattcttcagtttcttctgatatgccgctttatgcggtggaacgtgctgatggcgtgatgataactttaaaagatggtcgtcgtttgattgatggtatgtcctcttggtgggcggcgttgcacggttataatcatcctcgtttaaatgcggcggcacagaatcaattagcaaaaatgagccatattatgtttggcggatttacccatgacccagcggtggaattagctcaattattggtacaaattttgcccaatggattagataagatcttttttgctgatagtggttctgttgcagtggaagtagcgatgaaaatggctattcaatatcagcacgctaaaggagaagtgcaacgacaaaaatttgccactattcgttctggttatcacggcgatacttggaatgcaatgtcagtgtgtgatccaaccacagggatgcatcatttatttcatcatagcttacccgtgcagtattttcttcctcaacccaacattccatttaatgaatcttggaatgattgtgccattgaacctttagctgatttacttaagaaaaaaggtaatgaaatcgccgcactgattttagaaccggttgtgcaaggtgcgggcggtatgtatttttattcgccaacttatttagtgaaagcgcaagcgctttgtaaacaatatggtatattgctaatttttgatgaaattgccacgggatttggtcgaacaggaaaattatttgcagctgaacacgcaggcatttcgccagatattatgtgtatcggtaaagccttaacaggtgggtatttgactttatctgcaagcattacgaccactgaaattgcgcaaactatttgtagcggtgaggctaaatgctttatgcacgggcccacttttatggcaaatccgttggcttgtgcgattgcagcagaatctatccgtttattgttggaaagcccttggcagcaaaatattcagcgaattgagtcttccttaaaacaacagctttcgcctttatctgaaaaagattacgtcaaagaagttcgtgcattaggggcgattggggtggttgaaatgaaaagtgcggtaaatatgaaaactttagtcccacgttttgtggaacaaggtgtttggattcggcctttcggaaaattggtttatgttatgccaccatttgtgattaaagatgatgaacttcagaaattaacggaaggcatgattctggctttaactcaggaatatgaacattag

SEQ ID NO: 22355 - DNA, 1182 bp, Haemophilus influenzae
atgaattttcctatttctctttatattgcactacgttattggcgtgcgaaaagtgcggatcgttttgggcgattagtgactaatcttgcaagcctggggattgtgctaggtgtgatggcattgatcatcgtgctttcggtgatgaatggattagaaggttaccaaaaacaacaggtgctatcttctattcctcatgcgattgtgagcgaagagcagcctatttctacagaaaaaacgctagaaaatttaccgcactttgtccaaaaagccgtgccgatcaatacaacaaatgtgatttatcaaacggcaaaaggcgtaagtgcaggacaaattataggtattcaatcattttctgatgatcctttggttgaatcttttgatcagactaaatttaatgaaattttgcctagaggggagtttaaactggtcattggcgatcaactggcgcaaaaactgggcgtgaatattggggataaaatccgtttgatgattacggaaaatagccaatatacaccattcggtcgggtgccaatgcagcgtttatttactgttagcgatatttattatggttatggcgaagcatctggttacgaagcctttgctaatattacagatattggtcgcttaatgcgtattcaacctcagcaagcacagggctatcgtttatttctgaatgatccgttccaaattacagaactcccacaacatttcccgacacaaaaaatcacagattggcgtgtgcaaaaaggcgaatttttccaagcagtgagaatggaaaaaaatatgatgggtttgctgattagtttgattattgtcgtggcgatttccaatattgtcacctctttaagtttgatggtggtggataaacaaggggaaattgcgattttgcaaactcaaggcttaacaaaatcccaagtgcgttcagtgttcatttatcaaggattactggtgggatttgttggcacattactcggtgctattttaggtgttttagctacgttgaatttaacggacattgtaagtgcggtaaatccacaaggtgtttttttaccgacagaattatcctttgttcaaatgatttttgtcattggattttcgctgttactttccttgctttcaaccctttatcctgcttatcgagctgcgaaagtagaacctgcagcagctttgagatacgaataa

SEQ ID NO: 22356 - DNA, 855 bp, Haemophilus influenzae
atgcaaaataaaattgtaaaaattggcaatattgatgttgcaaacgacaaaccttttgtgctttttggcggaatgaacgtgctggaaagccgtgatatggcaatgcaagtgtgcgaagcttatgtgaaagtgacagagaaacttggcgtgccttatgtatttaaagcgtcttttgacaaagcgaatcgttcatctattcattcttaccgtggacctggcatggaagaaggattaaaaattttccaagaattaaaagatacattcggggtaaaaattattaccgatgtacacgaaatctatcaatgtcagcccgttgctgatgttgtcgatattattcaacttcccgcctttttggcgcgtcaaacagatctcgttgaagcgatggcaaaaacaggcgcagtgattaatgtgaaaaaaccacaatttttaagcccaagtcaaatgggtaatattgtggaaaaaatcgaagaatgtggtaacgataaaatcattctttgtgatcgtggaacaaattttggttacgataatttaattgtggatatgcttggctttagtgtaatgaaaaaagcctctaagggtagccctgttatttttgatgtaacccattcacttcaatgccgtgatccatttggggcagcatcgagtggtcgtcgtgcacaagtaaccgaattagcgcgttcaggtttagcagtaggcattgcaggtttattcttagaagcacatccaaatccaaatcaagcaaaatgtgatggcccttctgcattgccactttctgcgcttgaaggctttgtttcccaaatgaaagccatcgatgatttagtaaaatcttttccagaattggatacctcaatttaa

SEQ ID NO: 22357 - DNA, 879 bp, Haemophilus influenzae
atgaattataaagaatggctggcacaagcgattgcggatttagcaaaaaaaaatcccactgaaaatagtaaaattgatgcacttgtgcttcttcaacacgctactggcaaatcgcgtacgcaaatccttgcttttgatgatactgagattgatgaaaaagtgcggttaaaattgaccgcacttttagatcgtcgtctaaaaggtgaacctatcgcttatattcttggtgaaaaagaattttggtcgttgccattaaatgtctcaaaaggcacattgattccaagaccagatactgaaattttagtggaaaaggcattacaaattgcgttagaaaaactggaagaaaatccaccgcactttcgtattcttgatctcggcactggcacaggcgcaatcgccctcgctttggcttccgagcttgcgcccatttgccaaaagcggcatattccgctggaaataattggtgtggatcttatgtccgatgttgtggcattagctcaatctaatgcagaaagaaatcagctaaatgtagaatttttgcaaagccgttggtttgataatataacagggaagtttgatcttatcgtcagcaatccgccttatattgatgcgcaagatgaacatttgcatcaaggcgatgtgcgttttgaacccctttctgcattagttgccaatgatgaggggtatgctgatttacgtcatattattgaattagcatcgagttatttgaattctaatggcgtattattgcttgaacacggatggcaacaaggagaaaaagtgcggtcaattttccaagaaaatcattgggaaatggttgaaactgtgcgtgattatagcgacaatgagcgtgtcactttaggtttttggaagaagtaa

SEQ ID NO: 22358 - DNA, 1086 bp, Haemophilus influenzae
atgatgaaagattccattattgcaaaattagaaagtttaaaagaacgctatgaagagctagaagccttattgggcgatgtttctgtaattagtgatcaggataaattccgtgcgtattctaaagaatattcgcaacttgaagaagtggtgaaatgttttaatcgttggacgcaattaaatcaaaatattgaagaagctgaaatattgctcgacgatcctgaaatgaaagaaatggcacaaatggaaatcgaagaatccaaagcggaaattgaagaagtggaacaacaacttcaaattcttttactgccgaaagatcctaatgatgaatataactgctatttagaaatccgagcgggaacaggcggtgatgaagcgggtatttttgcgggtgatttattccgtatgtacagtcgttatgctgaaagtaaacgctggcgtgtagaaatgctaagtgctaacgaaagtgagcaaggcggttataaagaggtgattgttaaagtcactggcgaaggtgtgtatggtcagttgaagtttgagtctggtggtcatcgtgtgcaacgtgtaccaaaaactgaaagccaagggcgtatccacacgtctgcttgtaccgttgcggtaatgccagaattgcctgaatctgaaatgccagaaattaatccagcagatttgcgtattgatacttatcgttcatcaggcgctggtggtcagcacgtaaatacaacggattctgcggtgcgtattacacatattccaacaggtattgtggtggaatgtcaggatgagcgttcacagcacaaaaataaagcgaaagcaatgtcagtattagcgtcacgtattgttcaagcagagcaagaacgccaagccgcagaacaaacagatatgcgtcgtaacttattaggttcgggcgatcgttctgataaaattcgtacatataattatccgcaaggtcgagttacagatcaccgtatcaatctcaccatttaccgtttggatgaagtgatgaatggtaaaattgatgaactgattcagccgattattaccgaatatcaagcggatcagttggctgcattgtctgaacagaattaa

SEQ ID NO: 22359 - DNA, 1437 bp, Haemophilus influenzae
atgtctagaagactaagaagaacgaagattgtatgtactatgggcccatcaactgaccgtgataacaatcttgaaaaaattatcgcagcgggcgcaaacgtagttcgtatgaacttctctcacggtacacctgatgaccatatcggacgtgctgaacgtgtacgttctattgcgaaaaaattaggtaaaaccgtggcaatcttaggtgatttacaaggtcctaaaattcgtgtttctacttttaaagacggtaaaattttcttaaacgttggcgataaattcattcttgatgcagagttaccaaaaggcgaaggcactcaagaatccgttggtttagactataaaacgcttcctcaagatgttgtgccgggcgatattcttttattagatgatggccgtgttcaattaaaagtattatcaactgatggtgcaaaagttttcactgaagttactgttggtggtccattatcaaataataaaggtatcaataaattaggtggcggtttatctgcggatgccctaacagaaaaagataaagccgacattattaccgctgcacgcattggtgttgatttcttagccgtttctttccctcgttcaagtgcagatttaaattatgcacgtgaacttgctcaacaagcaggtttaaatgcaaaaatcgttgctaaagttgaacgtgcagaaaccgttgctaatgatgaagccatggacgatattattttagcctctgatgtaattatggttgcacgtggtgacttaggtgtagaaatcggcgatcctgaattagtcggtgtacagaaaaaattaatccgtcgttcacgtcaattaaatcgtgctgtaattacagcgactcaaatgatggaatcaatgattagtaacccaatgccaactcgtgctgaagtaatggacgttgcaaacgcagtattagatggaactgatgcagttatgctttctgcagaaacagcagctggtcaatatccttctgaaacagtggcagcaatggctagcgtatgtttaggtgcagaaaaaatgccaagcattaacgtttctcgtcaccgtatggataaagaatttgaaactattgaagaatctgttgcgatgtctgcaatgtatgcagcaaaccacatgaaaggtgtagcggcaatcgtcactttaagtagcacaggccgtactccattattaatgtcacgcattagctctggcttaccaatctttgctttatctcgtaatcaagaaaccctaaacctttgtgcactataccgcggtgtaacaccaatttatcacggcgaagaaagtcgtacagaagctggtgcaaaagcagcacctcaatcattaaaagaaaaaggttatttatctactggcgatttagtgctggtaacccaaggtggtcaaggtgcgacacaaactaacgtatgtcgtacattaattgttgaataa

SEQ ID NO: 22360 - DNA, 1515 bp, Haemophilus influenzae
gtggatttttccaccgttttttatttccttttttcaccgcacttttcacttaaatccaatagatatttgcggtatcatagacgacattctagtatcgaaataagtcctatggcatcacaacctcaaatcaaatcttcagacaaaaaaacagcacaagttagcattcctccgcactcaactgaggctgaacaagccgtgttgggtggcatcatgctgagcaatcaacattgggatggcattgctgaacgtgtgattgctgacgatttttatacttttcagcatcgtctaatttttacagaaatggaacatctaatgcgtaatcaatcgcctattgatttaattacgctagatcaagccttaagaagccgtggtgtaagcgatgaagtaggtggatttgcctatctagcagagctttccaataatactccgaacgccattaatattttggcttatgcagatatcgtgcgcgagaaagccatattacgagaacttatttcggtagggaatcgcattgctgaaaatagctattctcctaaagggcaagacattaagttaattcttgatgaggctgagcgtgaagtatttgcgattgcagaaaaacgtacgacttctagcgaaggcccacaaaatgtgatcaatgtgctagaaagtacgattgaaaaaatcgatattttaagcaaacttgaaaatcattcaggtgtaacaggtgttacgacgggctttaccgatcttgataaaaaaacggctggtttacaaccttctgacttaattatcgttgcggcacgtccgtcaatgggtaaaaccactttcgccatgaacctttgcgaaaatgccgcaatggcaagtgaaaaacccgttttagtatttagtttagaaatgccagcagaacaaattatgatgcgtatgatcgcttcccttgctcgcgttgatcaaactaaaatccgaacaggtcaaaatttagatgaaatcgagtggaacaaaattgccagcgtagtaggaatgttcaagcaaaaaaataatctttttatcgatgattcttcaggtctaacacctaccgatgttcgttcgcgcgcacgccgagtttatcgtgaaaatggtggattaagtatgattatggtggattatttgcaattaatgcgcgcaccagcattttcagataaccgaacactagaaatcgcagaaatttctcgctccctcaaagcactcgccaaagaattacaagtgccagtagtcgccctttctcagttaaatcgtactttagaacaacgtggagacaaacgccctgtaaactcagatttacgtgaatctggctctattgaacaagatgcagacttgattatgtttatttatcgtgatgaagtctataacgataactcggaagataaaggtgttgcagaaattattatcggtaaacagcgtaacggcccaattggtcgagtgcggttaaaatttaatggacaattttcacgcttcgacaatctcgccgaacaacgtgaatatcgagatgattattaa

SEQ ID NO: 22361 - DNA, 1083 bp, Haemophilus influenzae
atgaacgtaaaaccggcgacagcgaaaattagttcgcacgccttaaaacagaatttagaaataattaaacaaaaagcaccaaatagcaaaattattgctgtggttaaagcaaacgcctatggtcacggcgttgtattcgttgcttcaaccttagaacaaaatgttgattgctttggcgtggcgcgtttagaagaggctttagcattacgctccaacggcattactaaaccgattttattgcttgaaggttttttcaatgaacaagatttgcctattctagccgttaataatattgaaaccgtggtacacaatcacgaacagcttgatgctttaaaacgtgcgaatttaccaagtccaattaaggtttggttaaaaatagatacgggaatgcatcgcttgggcgttgctcttgatgaagtggattatttttatcaagaactgaaaaaactccctcaaattcaaccgcacttaggctttgtcagccatttcagccgagccgatgaactagaatcagattacacccaacttcaaatcaatcgttttttatccgtcacaaaagataaacaaggtgaacgtactattgcagcgtcaggcggcattcttttctggccaaaatcccacttagaatgtatccgcccaggcattattatgtacggcatttctccaactgatactatcggtaaagagtttggcttaacgccagtgatgaatttaacctcgtcattaattgccgttcgccatcataaacaaggcgatcctgtaggttacggcggtatttggacaagtccacgagataccaaaattggagtggtcgcaatgggttatggcgatggttatccgcgcgatgtgccagaaggtacacctgtttatttaaatggccgtcttgtaccaattgttggacgtgtgtcaatggatatgcttactgttgatttaggcgcagatagccaagatttggtaggcgatgaagtaattttatggggcaaggaattacctattgaaaccgtagctaaattcacaggcattttaagctacgagctaattacaaaattaacacctcgtgttataactgaatacgttgattaa

SEQ ID NO: 22362 - DNA, 1692 bp, Haemophilus influenzae
gtgcggttaaaatttcaattatttttaatgaaaggaaataccatgaaaaatattaacccaactcacacccatgcgtggaaatctctcgaagcacataaagctgaattgtcaaacatcaccatccaagatttatttaaacaagaaaaaaatcgttttgacgattattctttaacattcaataaccaaattcttatcgatttttccaaaaacaacatcaatcaaacaaccctttcacatcttcgccaacttgctcaagaatgcgcgcttgatagcgcaaaagaagcaatgtttaccggtgaaaaaatcaatcgtacagaaaatcgtgccgtactacataccgcactacgcaatcgcactaatacgccagtgcttgttgatggcaaagatgttatgcctgaagtcaatgctgtgctagctaaaatgaaagatttctgtcagcgtattatttctggcgaatggaaaggctatacaggtaaagccattacggatgttgtgaatattggtattggtggctctgacttaggcccttatatggtaaccgaagcacttcgcccgtataaaaatcatctaaatatgcactttgtttcaaatgtcgatggtacacatattgcggaaaccttaaaaaaagtcaatccagaaacgactcttttcttagtagcatcgaaaacttttacaactcaagaaaccatgacaaatgctcaaagtgcgcgtgattggttactaaaagcagcgaaagatgaaagtgcagttgcaaaacattttgcagcattatcaaccaatgctaaagatgtagaaaaatttggcattgataccaataatatgtttgaattttgggattgggttggcggtcgttactctttatggtcagctattggtctttcaattgcactatcaattggctttgaaaactttgaagcgttattaaatggtgcgcatgaaatggataaacatttcctctctactccaatcgaacaaaatatcccaaccactttagcattagttggtttatggaataccaatttccttggtgcgcaaacagaagctatcttaccttatgatcaatatttacatcgcttcgcggcttattttcaacaaggtaatatggaatcaaatggtaaatatgtggatcgtgatggcaatgtcattaaaaattatcaaactggccctatcatttggggagaacctggtacaaacggacaacacgcgttctatcaattaattcaccaaggcactactttaattccttgtgattttattgcgccagcccaaagacataacccattggcagatcatcacaataaattgctttctaacttcttcgcacaaacagaagcattagcattcggaaaaacaaaagaggaagtcgaggctgaatttgtaaaagcggggaaatctttggatgatgtgaaaaatattgttccatttaaagtattcactggtaataagccaactaattcgattctcgttcaaaaaatcacgccatttactttaggggcattaattgcgatgtatgaacacaaaatcttcgtacaaggtgtgatttttaatatctttagcttcgatcaatggggtgtagaactaggcaaacaacttgcaaacagaattcttcctgaattaacagattctgaaaaagtagcaagtcatgacagttcaactaatggattaattaatcaatttaaagcatggcgttaa

SEQ ID NO: 22363 - DNA, 1734 bp, Haemophilus influenzae
gtgaatattcaatctattctatccgataaaattaaacaagcgatgattcttgcaggtgctgatcaatcttgcgatgcgcttattcgtcaatcaggaaaaccacaatttggcgattatcaagccaatggcattatggctgcggcaaaaaaattaggtttaaatccacgagaatttgctcaaaaagttttagacaatcttcaactatctgatattgcagaaaaattagaaatcgcaggtccaggttttatcaatattttcttaaatccaacttggctaacaactgaaatttcagctgcactttcccacaaaaatttaggtattcaagctaccaataaacaaacagttgtgattgattattcatctccaaacgtagcaaaagaaatgcacgtaggtcatttacgctctacgataatcggcgatgctgtagccagaacccttgagtttttaggtcacaatgtcatccgagctaaccacgtaggcgactggggaacgcaattcggaatgcttattgcttatcttgaaaaaatgcaaaacgagcatgcgagtgaaatggaattacaagatcttgaagccttttatcgcgaagccaaaaaacactacgatgaagatgaagtattcgcagaaaaagcgcgtaattatgttgtgaaattacaaagtggagatgaatattgtcgaacgatgtggaaacgtttagtcgatatcactatgcaacaaaatcagcacaactatgctcgcttaaacgtgactttaaccgaaaaagatgtaatgggcgaaagtctttataatcctatgttaccaagcattgtaaaagatcttaaaaaacaaggtttggctgtggaaaatgatggtgcattggttgtttatttagatgaatttaaaaataaagatggcgacccaatgggtgtaatcgttcaaaaaaaagacggcggtttcctttatactacaaccgatattgctgcagcaaaatatcgttatgaaacattaaaagctaatcgcgcccttgttttttcagatactcgccaaagccaacatatgcaacaagcttggttaattactcgtaaagcaggttatgtaccagatagtttctcgttagagcataaaaactttgggatgatgcttggtaaagatggcaaaccatttaaaacccgtactggcggcacagtgaaattggccgatctattagatgaagccattgaacgcgccactgtattaattaatgaaaaaaataccaatttatctaatgatgaaaaagaagctgtgattgaggctgtcggtattggtgcggtgaaatatgccgatctctccaaaaaccgtactactgattacgtttttgattgggataatatgttaagtttcgaaggtaacacggcaccttatatgcaatatgcctacacccgtattcgttcgatctttaataaaacagatataaattcaaccgcacttttggctgcacctttaactattaaagatgataaagaaagaacgcttgctattaaacttctacaatttgaagaagccgtgcaaactgtcggaaaagaaggcacgccgcacgtgctttgtgcttatttatatgaacttgctggcatcttctcgtcattctacgaacattgtccaattttaaatgctgaagatgaatctataaaattaagtcgtttgaaattagcattattaacggaaaaaaccttaaaacagggtttaacgttactcggtattaaaaccgtagaaaaaatgtaa

SEQ ID NO: 22364 - DNA, 492 bp, Haemophilus influenzae
atgcgtagaattttatctgttttactcgaaaatgaatcgggagcattgtcgcgtgttgttggtttattctctcaacgtgcctttaatattgaaagtttgacggttgcaccaacggatgatccaacgctttctcgaatgaccattgaagctgtgggcgatgctcaggcattggagcaaatcgaaaaacaacttcataaattagtggatgtgtttaaagtggttaatttaagtgagcaggaacatatagaacgagaaattgttttagcgaaagtaagagcagtaggttcatctcgcgatgaaattaaacgattagcagatattttccgcggtcaaattgtagatgtaacaccaaagtcttacacaattcaattaagcggtacaaatgataaagttgatgcgtttatttctgcattgaaagaagaaactacattgttagaaattgttcgttctggattgattagtgtgtctcgtggagaaaagaatattctttaa

SEQ ID NO: 22365 - DNA, 1722 bp, Haemophilus influenzae
atgaagaagttatctggcgcagagatggtggttcaatctttacgtgatgaaggcgtagagtatgtatttggttatcccggaggcgcggtattagatatttatgatgcaattcatacgctgggtggtattgaacatattttagttcgccacgaacaagccgcggtgcatatggcggatggttacgcacgttcaacgggtaaagttggatgtgtgctagtgacttcggggcctggtgcaacaaatgctatcactggcattttaacggcttataccgattctgtgcctatggttatcatttcgggtcaggttatgagcaatttaattggcagtgatgctttccaagaatgtgatatgctgggtatttctcgtcccgttgtgaagcatagctttattgtcaaaaaggcggaagatattccatctactttgaaaaaagccttttatattgcatctacgggtcgtccaggtcctgttgttgtggatattccaaaagacactgtaaatcctaattttaaatatccttatgaataccctgaatatgtcgagttacgttcttataatccaacagtaaatggacacaaaggtcaaattaaaaaagcgttaaaagcacttttagtggcgaagaaaccaatactttttgtcggtggtggtgcaatcactgctgaatgtagtgagcagttaattcagtttgcacaacgtttaaatttacccgtgacttcctcattaatgggattgggtgcttatccaagtacggataaacaattcttaggtatgttgggtatgcatggtactttagaagcgaatacggcaatgcacgaaagtgatcttattttggggattggcgttcgttttgatgatcgtacgacaaataatttagaaaaatattgcccaaatgcaaaagtgattcatattgatattgatccaacctcaatttctaaaaatgtgccagtagcgattccaattgtcggaaatgcgaaaaatgtattggaagaatttttgggtttattgaatgaagagggattaaaatctcaaacagatcttgaaagttggtggcaagaaatcaaccaatggaaagcaaaaaaatgtttggaatttgaccgcacttctggcgtgattaaaccgcaacaagtcgtggaagcggtatatcgcctcacgaaaggacaagcttatgtggcttctgatgtaggtcagcaccaaatgtttgctgcgttacattatccattcgatgaaccgcgtcattggattaattctggtggtgcaggcacaatgggttttggttttcctgcggcacttggtgttaaattagctcatcctgaaggaactgttgtttgcgttactggcgatggtagtattcaaatgaatattcaagagctttctaccgcaacacaatatggcattcctgttgtcattatttgtttgaataatcatttcttgggaatggtaaaacaatggcaagatttgatttattctggtcgccattcgcaaacctatatgaattccttgcctgattttgcgaaattggcagaatcttacggtcacgtaggaataaaaattgctacccccgatgaacttgaaagcaaattgcaagaagcattcagtattaaaaataaattagtctttgtagatattaatgtagatgaatctgaacacgtttatccaatgcaaattcgtggtggtgcaatgaatgaaatgattttaagtaaacctcaagaggagacaaactaa

SEQ ID NO: 22366 - DNA, 837 bp, Haemophilus influenzae
atgatcgaaaaaaaaatattactcactgattgccctgatgataaaggcttaatcgcaaaaataactaatatttgttacaaacatcaactaaatattcttcataataatgaatttgtagattttgaaaccaaacatttctttatgcgcacagaattggaaggtatttttaacgaagctactttattagaagatctaaaatatagcttaccagaagaaacaaattgtcgattaattggcacccaacgtaagcgaattgtaattttagtcaccaaagaagctcactgcctcggcgatattttaatgaaaaattattatggtgcgcttgatgtagaaattgcagccgtaatcggcaatcacgataatttacgtgaacttgttgaacgttttaatattccatttcatttagttagccacgaaaacttaacccgtgtagaacacgacaaattactggcagaaaaaattgatgaatatacgccagattatattgttctcgctaaatatatgcgtgtgctaaaccctgaatttgtcgcacgttatccaaatcgagtgattaatatccatcattcattcttgcctgcttttattggtgccaagccttatcaacaagcctataaacgcggtgtaaaaattattggcgcaacggcacattttattaataacgaattagatcaaggcccaatcattatgcaaaatgtgattaatgtggatcatacttataatgcagaagcgatgatgcgtgctggccgtgatgtggaaaaaaccgtgttaagtcgcgcccttgatctcgctttacacgatagaatttttgtttataaaaataaaacggtggtgttgtaa

SEQ ID NO: 22367 - DNA, 1341 bp, Haemophilus influenzae
atgtctaacttcaattttgattttgccgaaaatgattttggcccactggcagccaagatgcgtccaacgagtctagaacaatattttgggcaaagccatttaattggcgagggcaagccactgcgaaaagctatccaagctggtcatatttattctatgattttttggggcccaccaggtacggggaaaacaacccttgcagaaatcatagcacaacgtattaatgcagaagtagagcgaatttctgcggtgacgagtggtatcaaagaaattcgtgaagccattgatcgtgcaaaacaaaatcgtcttgcggatcgtaaaactatcttatttgtggatgaagtccatcgttttaataaaagccagcaagatgcatttttaccgcacattgaagacggaaccgttatttttattggggcgacaacagaaaatccctcttttgagctaaataatgcgttgctttctcgtgcccgagtgtatgtgctgaaatcactcacaacggctgaaattgaacaagttttgcagcaagctgtagaagatcctaaacgtggattgggtaaagagcggttaattttagaagagaatttactgcaagtacttgccgaatatgttaatggggatgcacgattagctttgaattgcctcgaattaatggtggatatggcggatgaaacggaaaatggaaagaaaattgaccgcactttattaaaagaagtcttaggcgaacgccaagcgagatttgataaacaaggtgatcgtttctatgatttaatttctgcgctacataaatctgttcgaggttctgctccagatgctgcgctgtattggtatgcaagaattttaacggcaggtggagaccctttatatgtcgcgcgccgattacttgccattgcttcagaagatgtgggaaatgcagatcctcgtgctatgcaagttgcattggctgcttgggattgctttagtcgcgtgggggcttatgaaggggagcgagccatcgcccaagccattatatatctttcggtagcaccaaaaagtaatgcggtttatactgcatttaacactgcgaaacagcaagcgaaagatttgccagattacgatgttccaccacatttacgcaatgcgccgactaatttaatgaaagagctcggatatggcactgaatatcgttatgctcacgatgaacctaacgcttatgcggcaggcgaaaattatttcccacctgaattaaaagatactcaatattattttccgacaaatagaggtatggaaattcagattaaggaaaaactagaacggttacgtgagcaagataaaagtgcggtgaaaaaacggtataaataa

SEQ ID NO: 22368 - DNA, 1590 bp, Haemophilus influenzae
atggaagccgttcaattagacaaaaatcaagagcctaattataaaggttatagcggtagcttgattcatcctgcatttcaacagcaaacaacaaaacgtgaaaaaccgagtacaccattacctagtttggatttgcttttaaaatatccgccaaatgaacaacgcattacaccagatgaaataatggaaacctcacagcgtattgaacaacaattacgcaattttaatgtaaaagccagcgtaaaagatgtgcttgttggccctgttgttacgcgttatgaattagaattacagccgggtgtgaaagcatcaaaagtcacgagcatcgataccgatttagcaagagcattgatgtttcgttctattcgtgtggcagaggtgattccaggtaaaccttatattggtattgaaaccccaaatcttcatcgtcaaatggtgccattacgtgatgtattagatagcaatgaattccgtgatagcaaggcaactttacctattgctttaggtaaagatattagtggcaaaccagtcattgttgatttagcgaaaatgccacatttattggtagcaggttctacgggatcaggtaagtctgttggtgtgaatacgatgattctaagtttactttatcgtgttcaaccagaagatgtgaaatttattatgattgatcctaaagtcgtcgaactttctgtttataatgatattccacatttactgacaccagttgtaacggatatgaaaaaagccgctaatgcgttgcgttggtgcgtagatgaaatggaacgtcgttatcagttgctttcagctttacgcgtacgaaacattgaaggctttaatgaaaaaattgatgaatacgaagcaatgggaatgcctgtgccaaatccaatttggcgactgggcgatacgatggatgcaatgccaccagcgttgaaaaaattgagttatattgtggttattgtcgatgagtttgctgatttaatgatggtagcgggtaagcaaatcgaagaactgattgcacggttggcacaaaaagcacgagctatcggtatccatttaattttagccacacaacgcccctctgtggatgtgattactggtttaattaaagcaaatattccaagtcgcattgcctttacggtggcaagtaaaattgactcacgtactattcttgatcaagggggtgcagaagcccttttagggcgtggagatatgctttattctggacaaggttcatctgatttaatccgcgtacatggagcctatatgagtgatgatgaagtcatcaatattgccgatgattggcgagcacgcggtaaacctgattatattgatggaattttagaaagcgcagacgatgaggaaagttcagaaaaagggatatcaagcggtggggaattagatccactctttgatgaagtaatggactttgttattaatactggtacaacttcagtatcttctattcaacgtaaattcagcgtaggttttaaccgagcagcgcgtattatggatcaaatggaagaacaagggattgtcagcccaatgcaaaatggtaagcgtgaaattttatcgcatcgtccagaatactaa

SEQ ID NO: 22369 - DNA, 1428 bp, Haemophilus influenzae
gtgggtatacttacccacgggaagttatccacggcaaatacggagaataaaatggctaaagccccaaaaacagcttatgtatgtaacgattgtggtgcggagttttctcgttggcaagggcaatgttccgcttgtaaagcgtggaatacaattacggaagtgcggttaatttccacggcaaaatcaaaaaatgatcgttttagtggctatgcgggtgaaactcaggcaaaaattcaaacgctctctgaaattagtttgcaagaaacaccacgtttttccagtggttttagtgaattagatagggtactgggcggcgggatcgtaccgggtagtgcgattttaattggtgggcatcctggagcagggaaaagtacattgttactacaggttatgtgtggtttggcaaaaaatatgaccgcactttatgtaacgggagaggaatcattacaacaggttgcgatgcgcgcaagccgattgggattgccaagtgatcaattaaaaatgttgtcagaaacctctgtggaacagatttgtaatttagcggatcaattaaaaccgcaaattatcgtggtggattctatccaagtaatgcatttggcagatattcaatcatcgccaggcagtgtagctcaagtgcgtgaatgcgcttcttttctcactcgttatgcaaaaactcgccaagtggcgattattatggttggacacgttacgaaagacggaacccttgcagggcctaaagtgttagagcatgccattgactgttcattgttattagaaggcgaagccgattctcgttatcgtactttgcgtagtcataaaaaccgttttggtgcagtaaatgaattgggcgtgtttggaatgacagagcagggtttgcgcgaagtgaaaaatccatcggcgatttttttaagtcgcggagatgaaattacgtcaggcagttctgttatggtactttgggagggtactcgtcctcttttagttgaaattcaagctttagtagatcattcaatgctggcaaatcctcgccgtgttgcggtgggattagagcaaaatcgcttagcgctattactggcggtgttacaccgacatggtggcttacaaatggcggatcaagatgtttttgtaaatgtggttggtggtgtaaaagtcagtgaaaccagtgcggatttagctttgttgcttgcgttaatttcaagtttccgtaatcgccctttgccgcaagatttagtgatttttggcgaagttggattagcgggagaaattcgtcctgtgccaagtggacaggaacgtattagcgaggctgcaaaacacggttttaaacgtgctattgttccttttggtaacaagccgaaaagtgcggtcgaaaatatgcaggtttttactgtgaaaaaactcacggatgcgctcgctgtgttagataatttgtaa

SEQ ID NO: 22370 - DNA, 1059 bp, Haemophilus influenzae
atggagaatattatgttacaagaaattgaattaaaattggcgatttcgccacaaataggtattgaattgccacaatatcttgcaaaatttacgattttagaacatcaaaatttatttttgggtaacacctattatgattatcccgatcattttcttgctaaacaaaaaatggggttgcgtattcgtcaagaagatcaagaacttacattaacacttaaaactaacggtaaagttgttagtggattgcatagtcgcccagaatataatttaccattaatcgaaaaagaaacgccaactaatgcccaattaagagggctttatccttttgaacaattacctagctctacactacaacctattttctccacagattttaaccgcactttttggttagttgaatttcaacaatctaaaattgaagtggctttcgatcaaggcaaaattattgcaggcgaatatgagcaacctatcagtgaaattgagtttgaattgaaatctggcaatgtgcaggatctttttgattttgtggaaactttgcctttcgaaagagatatttattttagtagtgcaagtaaagcgaagcgtggttatttgctgggctcaaaacaatttttaacagattggctcaataaatggcgtgatttcttaaaagaagaacgagaagaaagtgcggtagatttttgtgcaaaatttaatgcggtgcttaaaatggaacagaaacttttggaagaaaccttatcattttctcccacactttttagccaagattttatgaaaacagtggagcgagtcggggcattttttaatctttatcattattatgatgaaaatgggaaaatcttagaagcgatggcaacagaaaaacaaaaagaaacgcgcttaccagctttgttagaaagcaatcagaaaatctttgttgaaattcgtgatttgattcgttttcatagtgaaacgaaagacaatgaaaaaactattgaaaaattgaccgcacttttgaaaagtcgagtttattttgagcgaatgatcaaattaatggaattatcttatgacctagggtag

SEQ ID NO: 22371 - DNA, 954 bp, Haemophilus influenzae
atgccagcttttattaaaaaggagttaattatgaaattacaaggcgctggactaggttatcgtcggaatttagctgaggattttttacaacttccctcaaataacgctattcaatttattgaagtcgcaccagaaaattggagtaaaatgggtggaatggcacgttatcaatttgatcaagcagcagaaagatttccgttagcagtacacggtctttcactttctttaggtgggcaagcaccacttgatcgcgaattactccgtaatacgaaagcattaattaatcaatataattcgtctttcttttctgaacatttaagttattgtgaatgtgaagggcatttatatgatttattacctatgccatttacagaagaagcagtaaaacacgttgcgcaacgaatacgtgatgtgcaagatttcttaggattacaaatttcattagaaaatacttcttattatttgcattctcctactagcacaatgaatgaagtggaatttttaaatgctatcgcacaagaggctgattgtggcattcatttagatgtgaataatatttatgttaatggtgttaatcacggattacttgatccttatatctttttagatcaagttgatgttaaacgtgttaattacattcatattgcagggcacgatgaagaacattctgctgcacaagttgtagagaattcagcaaatgaatcatttaataaagtaaaaggagcatatcgccatttacctgaattattaattgatacacacggagaagctgtaaaaggcactgtatgggatttactcgaatatgcctatcaacgactacctacgattcctccaacattattggagcgtgatttcaacttcccaccatttgcagaactttacgccgaagttgagcatattgcacaattacagcaaaaatacgctcacacagaggtaatgtcttatgctgcctaa

SEQ ID NO: 22372 - DNA, 1263 bp, Haemophilus influenzae
atggaaattattagtcaatatggttcttggttggtgtggatcacagcagtctttggcttttttatggcgttcggaattggagcgaatgatgtctcaaattcaatgggaacatcagtaggatctggtaccataaccgccaaacaagcgattattatcgcattaatttttgaatctgctggtgcctatctagcaggtggtgaagtaacacaaaccattaaaagtggtgtaatcgaaccaatacaatttgtcgatacgccagatattttagctctaggtatgctttcaaccttatttgcatcgggtgcttggttatttattgcaaccaaaatgggttggccagtttctggtacacacactattattggtgcaattattggatttgcctgtattacgattggccctagttctgtagattggtcaaagattggcagcatcgttggtagctggtttgtcacgcctgtcattgcgggtattttggcttatgcaatctttgcaagtacgcaaaaacttatttttgataccgaacaaccactaaaaaatgcacaaaaatatggcccttattatatggggataaccgtgtttgtactttgtatcgtgacgatgaaaaaaggcttaaaacacgtaggcttaaatctttcaaacagtgaaactttaatcatttcacttgccatcagtcttatcggaatgtttttcttccatttctattttaaaagcaaaatcttcactcaatcagcaaacaaaggcacttttggtgcagtagaaaaagtcttcagtattttaatgttattaaccgcttgtgcgatggcatttgcgcacggttctaatgacgtagccaatgcaattggccctctttctgcagtggtctctattgtaaatgaaggcggtaaaattgtttcaggtggagccttaacttggtggattttacccttaggtgcattaggtattgctgtgggcttaattactatgggacaaaaagtgatggcgactgttggatctgggatcaccgatttaacgccaagccgtggctttgccgctcaatttgctactgcgatgaccgttgtcgtggcatcaggcacaggcttacccatctcaacaacacaaacacttgttggagctattttaggtatcggctttgcacgtggtatcgcagcactgaatttaacggttatccgaaacatcattagttcttggattgtcacattaccagcaggtgcatttttcgccattattattttctatgtgctaagaacaatctttaattaa

SEQ ID NO: 22373 - DNA, 1251 bp, Haemophilus influenzae
atgaaagtttatttggttggaggggctgttcgtgatcaattattggggttacccgtaaaagatcgtgattggattgtggtaggcgcagaccccgctacgctactctctctcggttatcagcaagtaggcaaagattttccagtttttctcaatcctaaaacaaaagaagaatatgcgcttgcccgaacagaacgtaaatctagcgcaggttacacgggctttatttgtgatttctccccaacaatcacattagaacaagatttaattcgacgagatctcactattaacgccatggctcaaagcgaagacggtgaaattatcgatccttatggtggaaaacaagatttagaaaatcgaattttgcgccatatttctcccgctttttcagaagatcctttacgagtattgcgcgtggcacgctttgctgcccgttatcattccctcggttttaaaatcgcctcggaaacattagctctaatggcagaacttgcccaatcaggagaattacaacatctcacggcggaacgcatttggctagaaacagaaaaagccttaaacgaaaaaaatcctgaaatttattttgaaaccttacataaaacaggcgcattaagcgttttattttctgaaatcgatgccctttatggcgtaccaaatccagtaaaacatcatcccgaagtggatagttttattcataccatgttggtattaaaacaagcggttaatttgactgaaaataaccctatcctaaataaaagtgcggttcgttttgccgcaatttgtcacgatcttggcaaggctcttacacctcaaaatattcttcctcatcattatgggcatgaacaagctggcataaaaccgactagatcattgtgcaaacgcttgaaggttccaagttattttcaagaacttgcagaactgacttgtgaatttcacacgcatattcacaaagcctttgagcttcgagctgaaaccgtcataacgctgtttaatcgttttgatgtgtggagaaaaccacaacgctttcaagaatttctacaagtatgtctcgctgatactcgaggtagaacaggttttgaaactaaagactatccacaaatagattacatcaatcaattattacatgcggcaaatgaagtagatgtacagcaagttattgccgatggatttgagaaacaagcaatcaaaaatgaattgacgaaacgaagaatcttagcggttaaacaaacaaaaacgaattacccaacaaattaa

SEQ ID NO: 22374 - DNA, 948 bp, Haemophilus influenzae
atgcctgacattaaactcttcgcgggtaatgctacacctgaacttgcaaaacgtatttctgaacgtttatatatttcactaggcgatgcaacagtcgctcgtttcagcgatggagaaattcaagttcaaattaatgaaaatgtgcgtggtgcggatgtatttatcatccaatcaacttgtgcgccaaccaatgataacttgatggaattggttgtgatggtagatgcgttacgtcgcgcatctgctggtcgtattactgccgtgattccttatttcggctatgctcgccaagatcgtcgtgttcgttctgctcgtgtgcctattaccgctaaagttgtggcagatttactttcaattgttggtattgaccgtgtcttaacctgtgacctacacgcagaacaaatccaaggtttctttgatgttcccgtagacaacgtatttggttcgccagttttaattcacgatattttgaaaaaatctgatcttaaaaatccaattgttgtttccccagatattggcggcgttgtacgtgctcgcgctgtcgctaaattattaaatgatacggatatggctattattgacaaacgtcgtccacgtgcaaacgtagcacaagtgatgcatattatcggtgatgttgcagatcgtgattgtattttggttgatgatatgattgatactggcggtacgctttgtaaagcggcagaagcattaaaagaacgtggtgcaaaacgtgtttttgcttatgcaactcacgccgttttctctggtgcagcagccaaaaatttagccagcgatgccattgatgaagttgtagttactgacacgattcctctatcagaagaaatgaaagcgatcggtaaagttcgcgtgcttacgctttcttccatgctggcagaagctattcgccgcattagcaacgaagaatctatttctgcgatgtttaactaa

SEQ ID NO: 22375 - DNA, 1206 bp, Haemophilus influenzae
atgactgacattaataccgttctcgcggaactaaagcgtggtactgatgaaatcctttcagaagcggatttaatcgaaaaactgaaagaaaatcgcccattaaaagtaaaattaggcgcagatccaaccgcaccagatattcatttaggacatactgttgtattaaacaaattacgtcaatttcaacaactcggtcatgaagtctatttcttaattggcgattttactggaatggtgggcgatccatcgggcaaaaatgcgactcgtcctccacttagccgtgaagatgtattgcgcaatgcggaaacctataaagagcaaatttataaaattctcgatccacaaaaaaccaaaatcgtcttcaactctgaatggttaagcaaacttggtacagyaggtatgattcgccttgcaagcaactatacggttgcgcgtatgcttgaacgcgacgacttcaaaaaacgctttggaaacaaccaacccattgccatccatgaatttatttatccattactacaaggctacgattccgttgcattagacgcagatgtggaactaggcggtacagaccaaaaattcaacttacttgttggtcgtgaattacaaaaatcagcaggcaaaaaaccacaggttgcgattacactcccattactcgttggcttagatggcgagaaaaaaatgtctaaatcacttggtaactatattggcgtaacggaagcaccaagcgatatgttcggtaaagtgatgtcaatttctgatgaactcatgtgggattggtataaccttctttcattccgtccattaaacgaaattgcacaattaaaatcggaagtagaaaacggcaaaaatcctcgtgatgtcaaaatcttactagcaaaagaattaattgcacgtttccacaatgaagaggcagcaaacgctgcagaacaagaatttattaaccgtttccaaaaaggcgcaatgcctgatgaaatgcctgaatttacgttctctggcgaaatgggtttagccaccttattaaaagaagcaggtcttgttccttccacttctgaagcgattcgctctgctcaacaaggcggtgtaaaaatcaatggtgaaaaagtcgataacgtaaaagacaatgcaccgaaaggtacaaatgtttaccaagtgggtaaacgaaaatttgcgcgtgtacggttgaataaagtagatacagttaaataa

SEQ ID NO: 22376 - DNA, 615 bp, Haemophilus influenzae
atgtttactggaattgtacaaggcaccgcccccatccactccattaaagaaaaggctaattttagaacacaagtggtaaaattactacctgaaatgcgtaaagatctggaaattggcgcatcaatagcaaataacggcgtatgtttaactgtaactgaaatcaatggtgatctggttagctttgatctgatgcaagaaactttaaaaattacaaatctcggcacagtaaaagtgggcgattatgtgaatatagaacgtgctatgcaaatgggaacggaaattggcggacatttattatctggtcatatttattgcaccgcaaaaatttcagatattatcgctagtgaaaataaccgacaaatttggtttgaactgccaagtgcggatgtgatgaaatatattttaacgaaaggatttgttgcggtagatggcattagcctcactattggcgaagtaagagacactcaattctgtgtaaatttaatccctgaaactttacaacgaaccttaatggggcggcgtaaagtgggcgatattgtgaatatcgaaattgatccacaaacgcaagctattgtagatacggtagaaaattatttgcagtcaaaaaatttctag

SEQ ID NO: 22377 - DNA, 2610 bp, Haemophilus influenzae
atgttagccaaagcaaaatatagaaaagattacaaacaaccagattttacggtcacagatatttatttagattttcaacttgatcctaaacatactgtggtaaccgcaatcacaaaattccaacgcttaaataatgaagcgacttctttatgtttagacgggcatagcttccagttttcttctattaaatttaatggcgagccattttctgattatcaacaagatggcgagagtttaacgctcgatttaaaagacaaaagtgcggatgaatttgagattgaaattgtgacgttccttgtgccagccgaaaatacgtcattacaagggctatatcagtctggcgagggtatttgtacgcaatgtgaggcggaaggtttccgtcaaatcacttatatgcttgatcgtcctgatgtgctggcgcgttatataaccaaaattacggcagataaaaccaaatatccattcttactgtcgaatggtaatcgcattgcaagtggcgaattagaagatggtcgccattgggtggaatggaatgatcctttcccaaaaccaagctatttatttgctttagtggcgggagattttgatttattacaagataaatttattactaaaagtggtcgtgaagtggctttagagctttatgtggatcgcggtaatcttaaccgtgcaacttgggcaatggaaagtctgaaaaaagcgatgaaatgggatgaagatcgctttaatttagaatatgacctagatatttatatgatcgttgccgtcgatttcttcaatatgggcgcaatggaaaataaagggttaaatatctttaattccaaatttgtgttggcaaatccacaaacggcaaccgatgatgattatcttgccattgaaagtgtgattgctcacgaatattttcataactggacaggaaaccgtgtaacctgccgagattggttccaattaagtttgaaagagggtttaacggttttccgtgatcaagaattttcttcagatacaggttcgcgtgccgtgaatcgcattaataatgtgaaatttttacgcaccgtgcaatttgccgaagatgcaagcccaatgtcgcacccaattcgccctgaaaaagtgattgaaatgaataacttttacacggtgacagtatatgaaaaaggggcagaagtcattcgtatgttgcacaccttattaggtgaacaaggtttccaaaaaggcatgcaactttatattgctgaaaacgatggcaaagcggcaacctgtgaagactttgtttctgcgatggaacgtgcaaataacctcgatttaaatcaattccgccgttggtatagccaatcgggtaccccagaattattgattagtgatgcttatgacgaaaaaacgcatacttatcgtttaacggtttcacaatccacaccgccaaccgcagatcaaatggaaaaagtgaatttacatattccattaaaagtggcgctttatgatgcgaacggcacgaaacaaatgctacaacataatggcgaattgttgagtgatgtattaaatgtcactgaaaaagaccaagtctttgagtttcatggcatttatggtcgcccaattcccgcattgctatgtgatttttctgcgccagtaaaactggattatgattataaaacggagcagttattaggcttgcttaaatttgcagataatcaatttatccgttgggatgcggctcaaatgttatttgcgcaagaattgcgtcgtaatgttgtgcgtttccaacaaggcgaggctttagaaatttcgcctgaaattttgaccgcactttcttatgttctgaaccattatgagaaagatattgaattggcaaccttaattctcacactgccgaaagaaatggagtttgcagaaagttttaaaaccatcgatcctgatggtatttcagccgcaagagcatttatgcaagctcaaattgcagaatctttaaaagatgatttcttgcgtgtttatacccatattcgtcttaatgattatcaagttacgcaacaagacatcgccttacgtgtaatgcgtaatctttgtttaacttatttggcttacaccaatttgggcaataacctagtgcaaaaacactacaataatgcgaataatatgacagatacattggcggcattaagtgttgcaactaaagctgcattactttgcagagatgtgttattagctgattttgaacaaaaatggcaacacgatggattagtcatggataaatggtttgcattacaagccactcgcccagatgataatgtgttggaaattattcagttattaatggatcacccaagttttaattttaataatccaaaccgtttacgttcattagtaggtagctttgcaaatcacaacttaaaagcattccataatgtaagtggatcaggctatcgtttcttaacggatgtgttaatccgtttaaatgaaagtaatccgcaagtggctgcgcgtttaatcgagccattaattcgtttttctcgctttgatgcccaacgccaaacgctgatgaaacgtgctttagaacgcctaagcgttgtagaaaatctttcaaaagatttatttgaaaaaattgagaaagcgttgcagtaa

SEQ ID NO: 22378 - DNA, 717 bp, Haemophilus influenzae
atgaaactgcttatttctaatcagtacggtgctattgttatggcattggtgccttttatttacggcatgttacttgcgaatcctgtatgggcgcacatctttttattattaggatggttttcgctttatttgatgacttatccttttttgaatttgtttaaaggtaaaaatcttgagttatataaaaaatggtctgtgatttattttgctgccgcagtgatttttgcgattcccgcgttaatttataattggcaagtgttgtattttatgtttgccatgttaccgtttgttgcggtgaatatttatttcaccaagaaaaaagatgagcgcaatttatggaatgacttggcagggatcttaatttttgctctagctggaatgggatcctattacttttctgaccgaacttttgatgaaaaaatactttgggtggcgatttatccaacattattttttattggaacaacactttatgtaaaatcaatgatgcgtgaacgaaaaaatccacgttatttttgggcatcagtgatttttcacttattatgtgcgctgatttttgtggtttcgcaacaatttattttagcattagcttttgtgcctggattagtgcgagccgtttatttgcccactaaaaagctttctgttatgcaagttggactaatcgaatttgcgattactgccgtgttttttattttacttttagtagcaaccttgtaa

SEQ ID NO: 22379 - DNA, 405 bp, Haemophilus influenzae
atggaaaattggaccaatgaaatttgggtagcaattggcatcgcttttattgttggattatttattggttacattattgtgcgtttaaccaaaggatccgtaaaacatcaagctaaaacagaagctgaattaaaaacagtcaaaacccaacttgatacacaaaaggcgcaaatcgaaaaacatttcgcagaaagtgctgagttattcaaaaccttaattaacgattatcaaaaactttatcgccactacgcaacctcttccaataacttactgggcgaaaaagatcaaaaaggtttatttacccaacagttaattactgcaacagataaatctcaaaatgaacagcctagagattattcggagggtgcatcaggcttatttaaagaaaataaagaagaaaattaa

SEQ ID NO: 22380 - DNA, 288 bp, Haemophilus influenzae
atggcatttaaatttaacgctgaagttcgtacagcgcaaggtaagggtgcgagccgccgcctgcgtcacaatggtcaaattcctgcaatcgtttatggtggtagcgaagagccagtttcaatcatcttaaaccacgatgaattaaacaacgcacaagcacacgaatctttctattctgaagtgatcactttagtagtagagggtaaagaagttgcagttaaagtacaagctatgcaacgccatccattcaaaccaaaattggttcacattgacttcaaacgcgcataa

SEQ ID NO: 22381 - DNA, 1299 bp, Haemophilus influenzae
atgggaaaaagcgttgttatcttaggcgcacaatggggcgatgaaggtaaaggaaaaatcgttgatcttttgacggatcgcgtaaaatacgtagttcgttatcaaggcggccataacgcaggtcacacacttattatcaatggcgaaaaaaccgtattacgtttaattccatctggtatgttacatccaaacgtaacttgcttaattggtaatggcgttgtggtttcgcctgaagcattaatgaaagaaatgggcgaacttgaaagccgaggtattaaagttcgtgaacgtttattaatttcagaagcttgtcctttgattctgccttatcatgtggctatggatcacgcgcgcgaagcagcccttggcaaaaaagctataggtacaactggtcgtggtattggcccagcttatgaagataaagtagctcgtcgtggtttacgcgtaggcgatttatttaataaagaagcctttgccgaaaaactcaaaaacatccttgaatactataatttccaattggtgaactactacaaagttgaacctgtcgattatcaaaaaaccttagatgatgtaatggcaattgccgatgtaatcacaggtatggtggcagacatcactacaattcttgatactgcgcgcaaaaatggcgaacatattttatttgaaggcgcacaagggacaatgttagatatcgaccacggtacttatccgtatgtaaccagctcaaacacaacggctggtggtgttgcaacaggttctggttttggcccgcgtaatcttgattatgtacttggtatcattaaggcttactgtactcgtgtaggtggtggcccattcacgacggaattatttgatgatgtgggtgctgaaattgcgcgtaaaggtaacgaatttggtgcggtaacaggtcgtccacgtcgctgtggttggtttgatgccgtcgccattcgtcgtgcaatccaacttaactctatttctggtttctgtatgactaaattagacgtattagatggttttgatgaagtaaaaatctgtgttgcttacaaaatgccaaatggcgaaatcgttgaatatgcaccgttagcggcgaaagattgggaaggtgtagaaccgatttatgaaacattacctggttggaaagaaaatactttccgtatcaccgatgtaaataaattaccacaaaactgcattaactatattaaacgtattgaagaagtgactggcgtaccaattgatattctttcaactggccctgatcgtgtggaaacaatgattttacgtgaaccgttcgctgcttaa

SEQ ID NO: 22382 - DNA, 912 bp, Haemophilus influenzae
gtgatttttttcggtgttttgcttgcccgtttaaaatatggtaaaactaacgccgttttattcacaacgtatataggaagttctatgtcaaatttacaagcaattattgaagctgcatttgaaaaacgtgcagaaattacaccaaaaaccgttgatgcagaaacgcgtgcggcaattgaagaagtgatcgaaggattagattctggaaaatatcgtgtagccgaaaaaattgctggcgaatgggtaacacatcaatggttaaaaaaagcggtattgctatctttccgcattaacgataaccaaatcattgacggcgcagaaacaaaatattacgacaaagtggcattaaaatttgcggattacactgaagaacgttttactgaagaaggtttccgtgttgtgccttctgcaacggtgcgtaaaggcgcatatatttctaaaaactgcgtattaatgccatcttatgtaaacattggtgcttacgttggcgaaggcaccatggtagatacttgggcgacggttggttcatgcgcacaaattggtaaaaatgtgcatttatcgggtggtgtaggaatcggcggcgtgttagaaccattacaagctaacccaactattattggcgataactgttttattggcgcgcgttcagaagtggttgagggtgttatcgttgaagatggttgtgttatttcaatgggcgtattcattggtcaatcaaccaaaatttatgatcgtgaaacaggcgaaattcattacggccgtgtacctgctggttctgtggtggtatcaggtagccttccatcaaaatgtggaaaatatagcctatattgcgccgtgatcgtgaaaaaagtggatgcaaaaactttaggaaaagtgggcatcaatgaattattacgttctattgaagaatag

SEQ ID NO: 22383 - DNA, 1011 bp, Haemophilus influenzae
atggcaacaattaaagatgtggcaaaaatggctggtgtgtccaccacaaccgtatctcacgtaattaataaaacccgtttcgttgcaaaagatacggaagaagcggtgttatccgcaattaaacaacttaattattcccctagtgctgtggcacgcagtttaaaagtcaataccaccaaatccattggtatgattgtgacaaccagtgaagcaccgtattttgccgaaataatccattctgttgaagaacattgctatcgacaaggttattctttattttgtgtaacacacaaaatggatcctgaaaaagtcaaaaatcatttagaaatgttggcaaaaaaaagggtcgatggtttgcttgtaatgtgttctgaatatactcaggattcattggatttactttcatcattttccactattccaatggttgtaatggattggggcccaaatgcgaataccgatgtgattgatgatcatagttttgatggcggttatttagcaaccaaacatcttatagagtgcggtcataaaaaaatcgggattatctgcggcgaactcaataaaactaccgcaagaacgcgttatgaaggctttgaaaaagcaatggaagaagctaaattaacaatcaatccgtcttgggtactagagggtgcatttgagcctgaagatggctatgaatgtatgaatcgtttactgactcaagagaaattaccaaccgccctattctgctgtaacgatgtgatggcgctcggtgcaatatcagcactaacagaaaaaggcttgcgtgtgccagaggatatgtcaattatcggctatgatgatattcacgcctcacgtttctacgcgccaccattaaccaccattcatcaatcaaaactacgtttaggcagacaggcaataaatattctgttagaacgaattactcacaaagatgaaggtgttcaacaatatagtcgtatcgatataacccctgagcttatcattcgaaaatccgttaaatcgattttataa

SEQ ID NO: 22384 - DNA, 810 bp, Haemophilus influenzae
atgcccttattacaagtggaagatttaactaaaacttttaaaggtcacgccagtttatttggtcgaaatcaattcaatgcagtggataaagtgagttttacccttgaacgtaaacaaacacttgcaatcattggcaataatggctctggtaaatcaaccctagtgaaaatgatagcgggcattattccgccaacttctggtcgaattttatttaatgatcgagaattacaatatcaggatgcccaatctagagctaaacatattcgtatggttttccaagatgccaactctgcatttaatccacgtttaaatattggacaaatattagacgaaccattaagcctagcgacagattggacagaaacacaacgtaatgaaaaaatctttgagacgctctctcttgttgggctttatcctgattacacaaatctcaatattaagcatctttctattagccaaaaacagcgtgtcgctttggcacgtgcgctgattttagaacctgaaataattattatagatgatgcaattggtaatttagatgcctcggtgcgcattcaattactaaatttaacccttgatctgcagcaacgtttaggtatttcttatatttatgtagggcaagatctcggtgtaattaaacatattgcagatacgattatcgtaatggatgaaggaaaaatgattgaatatggcagccctcaaaatctttttactgatccacaaactgatgttactcgtcgcttagtcgaaagctattttggcaaaattttagatgaaaccgcttgggtaaaagacaaaaacgctcactaa

SEQ ID NO: 22385 - DNA, 810 bp, Haemophilus influenzae
atgaaaattgcattaggcattgagtataacgggcaaaattattatggttggcagagacaagaaaaagtccgcagtgtacaagaagaattagaaaaggcactttctcacattgcaaatgaaaaaattgaaatattttgtgctggcagaacggattctggcgtaagtggaacgggtcaggttgttcattttgaaaccaatgcggttcgtccagagaaggcttgggcttttggtacgaatgctcatttacctgatgacattgcagtgagttgggcaaaacaagtcgatgatgaattccatgcgagattttctgcaacagcacgccgttaccgctatattctttattgtaataaattacgctctgcgattttagcgggaggaataacccattgtcatttagatttagatgcggaaaaaatgcatcaggcagggcaatgtttacttggcgaacaggatttttcctctttccgtgcggcgcaatgtcagtctcatacgccttggcgtaatgtgcatcatttgaatgtgtctcgtatcggaaaatatattattgttgatattcaggcgaacgcttttgtgcatcatatggtgcgcaatattgtgggaagtttgattgaggttggtactggaaatcagccgattgaatggatgcaatggctgcttgagcagaaaaatcgtcagcttgccgcaccaacagcaaaacccgatggattgtatttggtggatgtgatttatccacaaaagtttgatattcctaaacgcccaattggccctttatttttagaggatggtttattaaatcgtcctttgaaataa

SEQ ID NO: 22386 - DNA, 798 bp, Haemophilus influenzae
gtgaaattaactttattagataagccatacaaaacatggaagctagtaataatctctaggatggtaatgaggggcaattgtctctataatgcgcaaaattttgagaatgaaaggataatttgtatgggaatgattattactgttgatggtcctagtggtgctgggaaagggacgctttgttatgcgttggctgaaaagttgggctatgcattgttggatagtggggcgatttatcgcgttactgcattggcagcgttgcaacgtaaaactgatctaacaaatgaaacagatttagcagaattagcacgtcatttagatattcaatttattcctcaaaatggcgaggtaaacatttttcttgcaggaatggatgtgagccgtttaattcgcacgcaagaagtggcagatgctgcgtcaaaagtagcagtctttcaaaaagtgcggtcagctttattacaacttcagcaagattttgcgaaaaatgatggattaattgcggatggcagagatatggggactgtggtattcccaaatgcacaagtaaaattatttttagatgcaagtgctgaagaacgtgcaaaaagacgctataaacagttgcaaaataaaggaataaatggtaactttgcacagattttagccgagataaaagagcgtgattttcgtgatagaaatcgtgaagttgcgccgctaaaaccagcagatgatgctttttattattctttaaattcttccatcatttcttgtgctttttttaccatatcttctgaaccaacaaatagtggaacacgttcatga

SEQ ID NO: 22387 - DNA, 876 bp, Haemophilus influenzae
atggctgaaaatcgttatgaactaaataaaaacttagcacagatgctcaaaggtggtgttatcatggatgttcaaaaccctgaacaagctcgcattgcagaagctgctggtgcagctgcagtgatggctttggaacgaattcctgcagatattcgtgctgttggaggtgtctctcgaatgagcgatcctaagatgatcaaggaaatccaaggagcagttagcattccagttatggcaaaagttagaattggacatttcgttgaggctcagattttggaagctattgaaattgactatatcgatgagagtgaagtgctttctccagctgacaaccgtttccatgtggacaagaaagaattccaagtaccttttgtatgtggtgccaaggatttgggcgaggccttgcgtcgtatcgctgaaggggcttcaatgattcgtacaaaaggagaaccaggaacaggagatatcgtccaagctgttcgccatatgcgcatgatgagtcaagaaattcgtcgcattcaaaatttacgtgaggacgagctctatgttgcggccaaagatttacaagttcctgtagaattggttcaatacgtccataagcatgggaaattgccagttgtcaacttcgcagctggaggaattgcaactccagcagatgcggccttgatgatgcaacttggcgcagagggtgtctttgttggttcaggtatttttaagtcaggagatcctataaaacgtgcgagcgctattgtcaaagctgtaactaactatcgaaatccacaaatcctagcacaaatctccgaagatttaggtgaagccatggttggtatcaatgaaaatgaaatccaaattctcatggctgagcgaggaaaataa

SEQ ID NO: 22388 - DNA, 528 bp, Haemophilus influenzae
atgctagaaaaattaggaattgaaagtgtcgaactgagaaatttaaaaaattttcaacaacattacagtgatttatcaggtttgattctacctggcggtgagtcaaccgccataggaaaacttttaagagagctgtatatgctggaaccgataaaacaagctatctcttctggctttcctgtctttggaacttgtgctggtttgattctgttggctaaagagattacttctcagaaagagagtcattttggaacaatggacattgtggttgagaggaatgcctatggacgccaattgggaagtttctatacagaagcagattgcaaaggggttggtaaaattcctatgacttttatcagaggacctatcatcagtagtgttggtaaaaaagtcaatattcttgcaacggtaaataataaaatcgttgcagcccaagaaaagaatatgctggtaacatcatttcatcctgaattaacaaataacttgagtttgcataaatactttatcgatatatgtaaagtagcataa

SEQ ID NO: 22389 - DNA, 852 bp, Haemophilus influenzae
atgactgatttaaccggaattttatacattgttgccacgcccattggcaatttacaagatattacccaacgtgctttagagacttttgctcaagtggatttaattgcagcagaagatactcgccatagtggacttttattgagccattacggcattaagaagccattttttgctttgcacgatcataacgaacaagaaaaagcgcatattttggtggaaaagctcaagcaggggagtaatattgccttgatttctgatgcggggacgccattaatcagtgaccctggttttcatttagtacgccaatgccgtgaagctggcattcgagttgtgcctttgccaggagcttgtgcggcaattaccgctctttgtgcatcggggattgcttctgatagattttgttttgaaggctttttacctgcgaaaagtaaagcacgcaaagataaattagaaaatatcgcagaagaagaccgcactttgattttttatgaatccactcaccgtattttagatacactagaagatatgcaagcggtgctaggggaagaacgatacattgtgttagcccgtgaaatgactaaaacttgggaaacgattacggggaatacgattaaaaatttacgcgaatggcttttagaagatcccaatcgtacaaaaggcgagatggttttgattgtggaaggcaaaccaaagtctgacaataacgatgaaatttcgccgcaagcggtaaaggcacttgagttaattgcagaagaattgccacttaaaaaagcagcagctatagttgctgagttgtatggttataagaagaatgctttgtatcaatttggattagcgcatttggaaaaataa

SEQ ID NO: 22390 - DNA, 2346 bp, Haemophilus influenzae
gtggatcgttttcataaaaacactatatcttgtgttttaaatcctgttttaaataacaacaagaaggctcatacaatgaataaaagtttaatggttacaaagcgtgacggtacgcaagaacaaatcaatcttgataaaatccatcgtgtgattacgtgggctgctgaaggactagacaatgtttctgtttctcaagtagaacttcgttcacatattcaattttatgaaggcattcgcacttcagacatccacgaaaccattattaaagcagccgcagatttaatcagcaaagattcgccagattatcaatatttagctgctcgtttagcgattttccatttacgtaaaaaagcctatggtcatttcgatccccctcgtttatacgatcacgtcaaaaaactagtacgtatggaaaaatatgatcaagcgttattagatgattatactcgtgaagaatgggacacaatggacggcttcatcgatcattggcgtgatatgacgttttcttatgcagcagtgaagcaattggagggtaaatatttagtacaaaaccgtgtgacgggagaaatctacgagtctgcacaattcttatatttgctggtttccgcaagtctattctctaaatatccaaaagaaacacgtttggattatgtaaaacgtttctacgatgccacatcgactttcaaaatttccttacctacaccaattatggcgggcgtgcgtacaccaactcgtcagttcagctcttgcgtattaattgaatgtgatgacagtttagattctatcaatgcaacagcatcagctattgtaaaatatgtttcacaacgtgcagggattggtattaatgcaggggctattcgtgcattaggtagcgaaattcgtggtggagaagcattccatacaggttgtattccattctataaatatttccaaactgcagttaaatcttgctcacaaggtggcgttcgtggcggtgcagcaacactttattacccaatttggcacttagaagcagaaaacttgctcgtattaaaaaataaccgtggtgtagaagacaaccgtgttcgtcatatggattatggcgtgcaattaaacaaattaatgtatcaacgcttaattaaaggcagcgagattactttatttagtccatcagatgtacctggactttatgaagcattctttgcggatcaagacaaatttgaagaactttacgtaaaatacgaacaagatccaactatccgtaagcgtactgttaaagcagttgaaatcttttctttattaatgcaagaacgggcatcaacgggtcgaatttacattcaaaacgtggatcactgtaatacccactctccgtttgatccacaagttgcaccagttcgtcaatctaacttatgcttagaaattgcattaccaactaaaccgcttcagcacattaacgatgaaaatggggaaattgcactttgtacactttccgcctttaacttaggtaaaattgaaaacttagatgaattagaagaacttgcggatcttgctgttcgttctcttgatgccttattagactatcaagattatcctgttgtggcagcaaaacgtagctcacttgcacgccgttcactcggtattggggtcattaactatgcgtattaccttgcgaaaaatggtgttcgctattctgatggttcagccaacgatttaacacaccgtacttttgaagccattcaatattatttattgaaagcctctatgaacttagcaaaagagcaaggtgcgtgtgaatacttcaatgaaaccacttatgcaaaaggcattttaccgattgatacctataagaaagatttagattccttaacacaagagcctctacattatgattgggaaagtttacgtaaagatattcaagaatttggtttacgtaactcaacattaactgccttaatgccatcagaaacatcatcgcagatttccaatgcgactaatggtattgagccaccacgcggtcacgtaagtattaaagcatcaaaagatggtatcttaaaacaagttgtacctgaatatgaaaatttaatggataactatgaattactttgggatattccaagtaatgacggctacttacacttagtcggtattatgcaaaaattcgtggatcaagcgatctctgcaaacacaaactatgatccaaaacgttttgaagacggcaaagtaccaatgaaagtgttgttaaaagatttattaaccgcttacaaatacggtttaaaaaccctttactatcaaaatacccgcgacggtgccgaagatgttcaagaagatcttgatgacggctgtgctggtggtgcttgcaaaatttaa

SEQ ID NO: 22391 - DNA, 1131 bp, Haemophilus influenzae
atggcatacaccactttttcccaaaataaaaacgatcaattaaaagaaccgatgttctttggtcaaaacgttaatgttgcgcgttacgatcaacaaaaatatgagacgtttgagaagctgattgaaaaacaactttcttttttctggcgtccagaagaagtagatgtatcgcaagaccgtatcgactacgcagcattgcctgaacacgaaaaacacatcttcatcagcaacttaaaatatcaaaccttattggattctattcaaggccgtagcccgaacgtggcattattgcctttagtgtcgattcctgaattagaaacttggattgagacgtggacattctctgaaaccatccactctcgctcttacacacatattattcgtaatattgtgaacgatccttctatcgtatttgatgacatcgtaactaacgaagaaatcatcaaacgcgcacaagatatttcatcttactacgatgatttaatccgtgatagccaactttatggcttatacggcgaaggcacttataccgtagatggcaaagaatgcgtcgtgactttacgtagtttgaaaaaacaactttatctttgcctaatgagcgtgaatgcacttgaagcaattcgtttctacgtttctttcgcttgttcatttgcttttgctgaacgtcgtttaatggaagggaatgcaaaaattattaaatttatcgcacgtgatgaagccttgcatttaacaggtacacagcatattttaaatattatggctgcaggtcaagacgatcctgaaatggcagaaattgcggaagaatgtaaacaagaagcctatgatttatttgttgcagcggcagaacaagaaaaagcttgggctgattatctatttaaagacggttctatgatcggcctcaacagagatattttagttcaatacgtagaatatattactaatatccgtatgcaagctgttggattgccactaccattccaaacacgttcaaatccaattccttggattaacgcttggttagtgtcagataacgtacaggttgcaccacaagaagtagaagtaagctcttatcttgtcggtcaaattgactcaaaagttgatacgaatgattttgacgatttttctctctaa

SEQ ID NO: 22392 - DNA, 2853 bp, Haemophilus influenzae
atggagcgaaaatattgcttcaaatatcataataaagaggtaattatgcagcaaaacaaggcgtttgatgattggttagccagcacagcattaggcggtgcaaatcaatcttatatagaagaactttatgaaagctatttgagtgatccacagtcggtggaggaaagctggcgaaaaacctttgattctttgccaaaaaccaccgcacttgaacagccccatactccagtgcgagattattttcgtcgcttagcgcgagaaaatcataatgaagcggtgacagtgatagatcctgcagctggtgcaaaattggtgaaagttctacaatttatcaatgcctatcgttttcgtggccatttagaggctaatcttgatcctctcaattattatcgttggaaagtatctttcgtccctgaattagattatcgccatcacggttttactgaacaagatctcaacgaaactttcaatataaatcattacgtttataaacgcgataccattaaacttggcgaattagctcaaatgttgaaagaaacatattgtggctcaattggcttggagtttatgcacgtgcaggatatggagcagaaaatgtggctccagagcaagatggaaagcctgttagataaaccgctttttacatctgaagaacgtgtcaattttcttcgtgaacttacggcagcagacggtttagaacgttatcttggtgcgaaattccctggggcgaaacgcttttctttagaaggaagtgatgcgtttattccattgatgaaagaaattattcgccattctagtcgtcaaggggtaaatgatgtggtaatgggaatggcacaccgtgggcgtttgaatatgctcgtgaatgtattaggtaaaaagcctgaaaatttattcgatgaatttgcaggtaaacattccagtgaacgtacgggggatgtgaaatatcatcaaggtttttcttctgatttcgccgtagatgataagcgagttcacttaacgttggcatttaatccctcccatttggaaatcgtaagccctgttgtgattggttctgttcgatctcgacaaactcgtatgaatgatacggaacatagcaaagtgcttgctattactgtccacggagattcagctgtggcaggacagggggttgttcaagaaacattgaatatgtcaaatacccgtggttatagtgtgggcggtactattcgcatcgtgattaataaccaaattggttttacgacatctaatcctaatgatacgcgctctacagaatattgcaccgatattgcaaaaatgattcaagcgccgattattcatgttaatggcgatgatcctgaagcggtggcatttgctgcgcgtatggcggtggaatatcgtaatttattcaaacgagatatttttatcgatttaatttcttatcgccgtcatggtcataacgaggcagatgaaccattagccactcaaccaatgatgtatagcatcatcaaaaaacatcctacacctcgtaaagtttatgcagatcgcttagtttcagaaggtgtgatgactgaagaacaagttaccgagatggcgaatgattatcgcgatgcgctagataatggcgatcgagtcgtatcagaatggcgagaaatggatacggcaaaaatggattggttgcaatatctcaattatgattggacagcaccttatgaaagcaaattttcacaggaacgttttttaacccttgctaaacgtgtatgtgaatatcctgaaagtttacgtgcgcatcctcgcgtagaaaaaatctataatgatcgtaaagcaatgtatcaaggcgaaaaattgctcgactggggtatggctgaaaccatggcttatgcaaccttacttgatgaaggtgttaatgttcgtttatcaggcgaagatgcgggacgaggtacttttttccatcgtcatgccgttgtgcataatcaaaatgatggtacggggtatgtaccattaacacatttacacgccaatcaaggtcgttttgaagtatgggattcggtactttctgaagaatctgttcttgcttttgaatatggctacgcaacaacagatccaaaaacgttaaccatttgggaagcgcaatttggcgattttgctaatggtgcgcaaattgttatcgaccaatttattagctctggcgaacaaaaatggggcagaatgtgtggtttagttatgttattgcctcatggctatgagggacaaggccctgaacattcttccgcacgtcttgaacgttatttgcaactttgcgcagaacaaaatatgcaagtttgcgtgccatcaacacctgcacaggtgtatcacatgttgcgtcgtcagtctttacgtaaaatgcgccgtccattgattgccatttccccaaaatctttactacgtcatccattggcagtgtccagtttagacgagttgattaatggaactttccaaacggtaatcggagaaattgatgagcttgatcctaaagatgtaaaacgtgtggtaatgtgttcaggtaaagtttattacgatttacttgaacaacgtcgtgcaaataatcagaaagatgtagcgattattcgtattgagcagctttatccattcccgcatgaggatgtgaagaaagcgcttgagccttatgcgcatgtcacggattatgtatggtgccaagaagaaccacttaaccaaggggcttggtattgcagcaaacataattttgaatcagcaattccagaatccgttaaactcaaatatgcagggcgtccagcttctgcttcgcctgctgtgggttatatgtcgcttcacactaaacagcaaaaacagttagtggaagatgcgttgagtttttaa

SEQ ID NO: 22393 - DNA, 1014 bp, Haemophilus influenzae
atgcaatccattcctattaaaaacgtaggagagtctcgcttagtcgatcctttccaacgtcaatattactatctacggctgtcgattaccgatcagtgtaattttcgttgtacttattgtttacctgatggttatcaacccgaagctaacaaaccaagtttcttaactttaaaagaaattacccatcttgctcaagcctttgctgaaatgggcacagagaaaatccgtttaacgggtggcgaaccgactttacgcaaagattttatttctattgctgaaagcattactaacattgatggcattcgtcaattagccgtcacgacaaacggctatcgcatggcaaaagatgtggctgattggaagaaagcagggattacgtctattaacgtcagtgttgatagtcttgatcccaaaatgttccatcaaattacaggtatcaataaatttgatgacgtgatgcgtggtatcgatcgtgcatttgaagtgggctacaacaaagttaaagtcaattcagttttaatgaaaaatctgaatgataaagaatttgaacaatttctcgcttgggttaaagatcgcccaattcaaatgcgctttatcgaactcatgcaaacgggcgaaatggatagtttctttgataaattccatctttctggacaagtcttagcggataaattgttgaaaaatggttggacattacaacacaaatcccatactgatggtcctgctaaagtattcacgcatcctgattatgcaggcgaaattggtttaattatgccttatgaaaagaatttttgcgcaagttgcaatcgtttaagagtgtcagcaaaaggtaaacttcatctttgtttatttggcgaagaaggcattgaattacgtgatttattgcagtcgcacgaacagcaaggtattttacaggctcgtatttttgccgcacttcaaggcaaacgtgaacatcattatttgcatatcggcgatactggtgtaagaaatcatttagcttctattggtggctaa

SEQ ID NO: 22394 - DNA, 672 bp, Haemophilus influenzae
atgtcttttgcccaacaaaaacttagcgaactcgctgtttcaattccaggtgcaactaaaatttttcgtgaatatgatttagatttttgctgcggaggttctgtattattagaagtcgcagcacaacaaaagaatcttaaccttgctgaaattgaaaaacgtttaactgatttacaacaaagtaaagcagaaaataatgataaagattggacttcggcatcttatgcggagatgatcgatcacattattactcgttttcataatcgccaccgtgaacaactccctgaattaattacattggcggagaaagtagaaaatatacatggtgatcgtgatgactgtcctataggcgtagtcgcacagttagaaaaaatttatgctgaacttagccagcatttaatgaaagaagaacaaattttgttcccaatgatcaaaatggggaattatgctatggcctcaatgccaattcgtgtaatggaaatggaacacgatgaagcaggacaagatgtggaagtgatcaaatcgcttactaataactgcacgccaccagcagatgcttgtttcagttggaaagccttatatagcggtattaatgaatttattgatgatttaatgcatcatattcatttggaaaataatattttatttccacgtgtattaaacgaaaaataa

SEQ ID NO: 22395 - DNA, 2157 bp, Haemophilus influenzae
atgaatattcggttaaatgctaaagtaatttctacaattcctgtttttattgccgtaaatattgcggcagtgggaatatggttttttgatatttcttcgcaatcaatgcctttgattctagggattattgcaggtggtttggtggatttggataaccgtttaactggacgattgaaaaacgtattttttacccttattgccttttctatttcttcctttattgtgcagttacatattggcaagcctatccaatatattgtgttaatgacggtgctgacatttattttcactatgattggtgccgtggggcagcgttatagcaccattgctttcggttcattagtggttgcgctttacaccacattaacttatatcccagaggtaaatgtatggtttattaaccctgtaatgattttatgcggtaccttgctgtatagcgtggtgactctgattgtttacctgtttttcccaaatcgccccgtgcaagaaagtgtcgctaaagcgttttgtgcgttgggcgaatatttagataccaaatcctgtttttttgatcctgacgaagtggctgagattgaaaaaaaacatcttaatttcgcgatgaaaaatgcgaatgttgtcacggcatttaatattgttcgcaccgcgcttttttatcgcattagagggcaacatcgccatcctcttactcagagaatgttacgttactattttgccgcacaagacattcatgagcgcgccaattctacgcattttgattatcaacaaataacggaaaaactaaaaaatacagatttgattttccgtattcaacgtttgttagaactacaagcacaatcctgtaaagaaattacggcgagtttgcgtgaaaataaaccctatcattttaataaacgtgtcgaacgtgcgcttttaggcaccttgcattcctttgatctatatcgagcacaacatcttaatgatcaagatgaactgattgatattcaaaccttgttagataatttacaaagtattaactggcaacttcgccagttagcacaagacacgacggttacagaacaattagctcaaattcatacggaacaaatcactgggttaaaaaatatcagtgcggtgatttttagccattttacttttgagtcaccgttgttccgtcatgcagtacgcttatctattgtggtatttttgtgctgtgcaattgttgagtttttccaatttaatcttggttattggattttattgaccactgtatttgtgtgtcagccaaattattctgcaactaaagtacgtttacgtcagcgcattatcggcacgatattaggcgtagtggtggggtctctattaccttatttaaatccaaccttagaattaaaactgggtcttgtggtgcttacaagcacgttgttctttttctttcgtagtaataattacagtttctcgacctttttcatcacactgcaagtattgctcagttttgatgtcatgggatttgatacggcagccgccttaatgcctcgtttacttgatacattacttggtgccgcgatttcatggtttgccgtatcttacttatggccagattggaaatatttgcaacttgataaagtgagccatcaagcattgcgtagtgatgcggtgtatttattgcatattattagccaattgcaatttggtaaaagtgacgatcttaaatatcgcatagcacgtcgcaatgcgcatcaatatgcagccgcactgagtacaacgctttctaatatgaataatgagccagtgaaatataaggcatatttacagaaaggttttgatttgctcaaacttaattattctctattaagctatatttcagcactgggagcttatcgcgacagaatgaaaaatttgcaacagaccgcacagtttttatctggtttttatcctgtggcaaagaaaattatttataccttagaacatattgaagaaatacctgaggctatttttaaccaacagcaagaaagtatcgaaacacatttaaaagaattggaaaaacaagagatgaccgcagaagaacgcgccgtctttagtttgccgtatcaacaattgaatttgattacccaactattgccacaattttatgggtattttaagaaagagataaactgtcagagtgcgggagcgttataa

SEQ ID NO: 22396 - DNA, 1056 bp, Haemophilus influenzae
atgttgcagattaatgtgaaaaaacagctcgggcaacttgccttgcaagcgaatatacaagtgccagatcaaggtgtaaccgctattttcggtttgtctggctcaggcaaaacatcgttgattaatcttgtcagtggcttgatacaaccagacgaaggattcatctgtttaaatgaccgcactttagtggatatggaaagccaagaatcattgccgacccacttgcgtaaaattggctatgtattccaagatgcacgcttatttcctcactacacagtgaaaggtaatttgcgctatggcatgaaaaacgtatcgcaagatgattttaactatattgtcgatcttctcggcattactcatttattaaagcgttatccgctcacgctttctggcggagagaaacaacgtgtggcaatagggcgtgcgctgctgactgatcctgatattttactgatggacgaaccactttctgcccttgatgttccccgcaaacgcgagctaatgcaatatttggaacgtctttctaaagaaattaatatcccgattttatatgttacacatagcttggacgaactgttgcgtttagctgatcgcgttgtgctgatggaaaacggcattgtgaaagcctatgacagagtagaaaaaatttggaatagccctatttttgccccttggaaaggagaaagcgaacagagcagtgtacttgccttgcccgttcatttgcataatccaccttataaaatgaccgcactttcgctaggcgaacaagtgctttggattcatcaagtacccgcgaatgtaggcgagcgagtgcgagtttgtatttatagttcagatgtttctatcactctgcaaaagccagaacaaacaagcattcgtaatattttacgtggcaaaattacacaaattgagatacaagattctcgagtggatcttgccgtattagtggaagggcataagatttgggcaagcattagtaaatgggcgcaaaatgaactgcgttttgctattgggcaagatgtttatgttcaaattaaagcggtgtcggtaatgtag

SEQ ID NO: 22397 - DNA, 765 bp, Haemophilus influenzae
atgaaaaaattaactaaaatttcaaccgcacttttaatcgcaggattaggcttttcttttgcggcatccgctaaagtgactgtatttgcagccgcttcaatgacagatgctttacaacaagttgcaaaagattacgcaaaacaaaatccgaaaaatgaagtagtgttttctttcgcttcttcttcaactttagcaaaacaagttgaagaaggcgcaccagcggatatttttgtatctgcaagcaataaatggatgaaatatctttctgaaaaagatttaaccgtaaaagaaaccgaaaaagttttagtgggtaatgatttagtcttaatcgcaccagcaaaaagtgcggtaaattctgtggatattgctaaaggtgaatggatcaatgcattaaaagatagctatttatctgttggcgatcctgcgcacgtgcctgcggggcaatatgcagaagaagcattaaccaaattaaatttatgggataaggtaaaagatcgtttagcgcgtggaaaagatgtgcgtggtgcattagctttagttgaacgtgcagaagcaccttacggtattgtgtacagcactgatgcaaaagttagtcaacaagttaaaacggttgcagtgttcccagctgatagccataaaccagttgtttatcccgtttctattgtaaaaggtcatgataatgcggattctcgcgatttcttgaaatatttagaatcagatgctgcgaagaaagtgcttgtagggtatggtttctctgcaaaataa

SEQ ID NO: 22398 - DNA, 885 bp, Haemophilus influenzae
atgttaagcattattgtgccttcttataatcgaaaagcagaagtgccagctttattagaaagtttaactcaacaaacatcgagtaattttgaagtgattattgtggatgattgctccaaagagagagtagttgttgaacaaagttattcttttccagttacagtgattcgtaacgaaaccaatcaaggtgcagcggaaagtcgtaatgttggtgcgcgtacatcaaagggcgattggttgctttttctcgatgatgatgattgttttatgccggaaaaatgtgaaaaagtactacaagtgattgagcaaaatccgaatattaattttatttatcatccagctaagtgtgaaatggttaatgaagggtttacctatgtgactcaaccgattgaaccccaagaaatttcgacagaacgtattttgttagccaataagattggtggcatgccaatgattgcgattaaaaaagagatgtttttaaaaataggtggattatccaccgcacttcgttctttggaagactatgatttcttgttaaaactgctacaagagccaagttttactccttataaaattaatgaaccactaacttattgtactttccataccaaacgctcaagtgtgtctacggataccactaatacgcaaaaagccattgattatattcgcgagcattatgtgaaaacggtagagcaagctcgtaattttgatattaacgcgagctatattttggcttatccccatattatgaatttatcgcgtaaagcggcaaaatattattttgatatttttaagaaaacaaaaagtattaagcaatttattattactttggttattttaatttcgccaaaattagctattaatttaaaacggttgggaaaataa

SEQ ID NO: 22399 - DNA, 1062 bp, Haemophilus influenzae
atgaaaaaaattggtttctttataatgaatatcggaagtgccgggggaacggagcgcgtttctattaatgttgctaatgctcttgctaaacagggatatgatgtttcttttattagcattggcggtaacaagccttttttccaagttgatgaaaaaattaatatttacgcaatgaataaattgccctattcattgaaaaaagattatttttctatcactaaaaaattaagagaattagttaaagaattacagctggataccttaattgtggttgatggtgcaattatgcttttttctgctttggcgttggttaatttaaatataaaacatattttatgggagcattattcttttaattttacgggcaatcgtctcgttcgcacgctcggtaaatatttagctgtaacaacttgcgataaaatagttacattgacagaagcagaaaaaacgctgtggcaagaaaaatttaaaacaaataatataattagtattgctaatccaaatacgcttttgccaaagaacaaattagcaaaattggaaaataaaactattctatctgtagggcatttattttcttataaaggttttgattatttattaaaagtttggcaagttttggcaaaaaaatatccagattggaatttaaaaatagtgggttctggcgaggaagaagaaaatttaaaaaatcttgctaaagcattggatattgaagattcagttaattttattcctcgtactaatgatgtttctttttattatgaaagcagttcaatttattgtttaccttcacaaacagaaggcttgcctttagtcgttattgaagcgatggcatttggcttacctattgttgcctttaattgttctcctggcgtaaagcaattagtggaacataaagaaaatggttttctttgtgaacaaaataatattgaagaaatggttaaaggtttagatttattaatcaataatcctgaactttatctacaaatgtcagacaaatctcgtttaatgagtgaagattatggcattgagaaaattattgaagaatggaaagggattttataa

SEQ ID NO: 22400 - DNA, 1476 bp, Haemophilus influenzae
atgaaatatcaagcaaaaaataccgcactttctcaagccactgattgcattgttttaggcgtctatgaaaataataaattttcaaaaagttttaatgaaatcgatcaattaacccaaggttatttaaacgatttagtcaaatcaggtgagctcactggcaaattagcccaaaccgttttacttcgtgatcttcaaggtttatctgctaaacgcctattaatcgttggctgtggcaaaaaaggagaactcacagagcgtcaatataaacaaatcatccaagctgtattaaagacactaaaagaaaccaacacgcgtgaagtcatttcttatttaactgaaattgaattaaaagatcgcgatctttattggaatatccgctttgccattgaaacgattgaacacaccaattatcaatttgatcatttcaaatctcaaaaagcagaaacctctgttttagaatctttcatcttcaatacggattgtgctcaagcacaacaagctatttctcacgccaatgccattagctcaggcataaaagcagcacgcgacatcgcaaatatgccaccaaatatttgtaatccagcttatcttgctgagcaagcaaaaaatttagcagaaaattctaccgcactttcattgaaagttgtggatgaagaagaaatggcaaaacttggaatgaacgcttatcttgccgtctcaaaaggctctgaaaaccgtgcttatatgtctgttttaacattcaataatgcgccagataaaaacgccaaacccattgtacttgtaggcaagggattaacctttgatgcaggcggtatttcacttaaacccgccgcagatatggatgaaatgaaatatgatatgtgcggtgcagcctctgtcttcggcacaatgaaaaccattgcacagttgaacttgccattaaacgttattggtgttttagcaggttgtgaaaatctgccagatggcaatgcttatcgcccaggcgatattcttaccactatgaatggtttaaccgtagaagttcttaatactgatgcagaaggtcgattagtgctttgtgatacccttacttatgttgagcgttttgaacctgagcttgttattgatgttgcaaccttgactggtgcttgtgtggttgcactagggcaacacaatagcggcttagtttctacagataacaatcttgccaatgcactactccaagccgcaacagaaaccactgacaaagcgtggcgtttaccattaagcgaagaatatcaagagcaacttaaatcgcctttcgccgaccttgccaacattggtggtcgctgggggggcgcaattacagcgggtgcatttttgtctaatttcacgaaaaaatatcgctgggcacatttagacatcgctggtacagcttggttacaaggtgcaaataaaggtgcaacaggtcgccctgtttcgctattaacccaatttttgattaatcaggttaaataa

SEQ ID NO: 22401 - DNA, 1728 bp, Haemophilus influenzae
atgatttctggcattctcgcatctccaggtattgcctttggtaaggcacttgttcttaaagaagaaaagattgttcttgatacacaaaaaattactgatgatcaaattgacgcagaagtcgctcgattttatgaagggcgtaacgcggcggtagaacaacttaattcaattagagaacgtgcattaatttctttaggcgaagaaaaagcggcaatctttgaaggtcacttgatgattcttgaggatgaagaattagaagaagaaattcttgattatcttcgttcaaataaagtgaatgcaggcgttgcggcgagtaaaattttagatcaacaagtgacaatgttatctgaaattgatgatgaatatttgaaagaacgtgcaggcgatattcgggatattgctaaccgtttagttaaaaatattttgggaatgtacattgttgatcttggtgatattcaggaagaatctattcttgttgcttatgatctgactccctcagaaacagctcaacttaatcttgaaaaagtattaggggttgtcactgatattggtggtagaacctcacatacttctattatggctcgttctttagaattgccagcgattgtcggcacaaataaagtgactaaattagtcaatacgggcgattatttaattttagatgctatcaataaccaagtttatattaatccaacagcatctcagattgatgaattaaaagcacttgaagcgaaaatttctgaggaaaaagcagagttagctaaattaaaagatcttcctgcaatcacattagatggacataaggttgatgtggttgcgaatatcgggacgattcgtgattgtgacggcgcagaacgtaatggagcggaagggattgggttataccgaactgaattcttatttatggatcgtgaacagcttcccacagaagaagaacaatttattgcctataaacaagtggtagaagcaatgaacggacgtttaacagtgattcgtactatggatattggtggcgataaagagctttcatatttagatttaccaaaagaaatgaatccattcttgggatggcgtgcgattcgcattgcattagatcgtcgtgaaattttaaatgcacaattacgtgcggtgttacgtgcttcagcttttggtaaattggcggtgatgttcccgatgattatttctgtagaagaaattcgggaattaaaagcggttattgaaacattaaaagcggaattacgtgaagaggggagactgtttgataataatatccaagttggtgtaatggtcgaaaccccctctgccgcggtaaatgcaaaatttttagcaaaagaagtagatttctttagtatcggtactaacgatttaactcaatatactttggctgtagatcgcggtaatgagtttatttcccatctttataatccgatgcacccctctgtgcttggtttaattaaacaagtgattgatgcctctcacgcagaaggaaaatggacgggaatgtgtggggaattagcaggggatgaacgtgcgactttattattgcttggtatgggattagatgaatttagtatgagtgcgatttctgtacctcgaattaaaaaattaatccgtaatgtaaattttcaagatgcaaaagtgcttgctgatactgcattacaaaaaccgaccgctgcagaaattgatcaattaattgaagaatttttgctggaaaattcattaaattaa

SEQ ID NO: 22402 - DNA, 258 bp, Haemophilus influenzae
atgtattcaaaagatgtggaaattattgcgtcaaacggtttacacacgcgccctgctgcacaatttgtgaaagaagcgaaagcattttcttctgaaattacagtaacctctggggggaaaagtgcaagtgcaaagagcttatttaagttgcaaacattagctttaacgcagggaacaatacttaccatttctgctgatggagaagacgagcaacaggcagttgaacatttagtcgcgttaattccaactttagaataa

SEQ ID NO: 22403 - DNA, 1068 bp, Haemophilus influenzae
atgctgagtatttttgttacttttcttggcgcgtttttaacattgattgtgatgcgaccacttgccaattggattggattagtcgataaaccaaactatcgtaaacgtcatcaaggcacaattccactaatcggtggcgcatcgctttttgttggtaatctttgctattatctgatggaatgggatcaacttcgattaccgtatctttatttgttcagtatttttgttttattggcgattgggattttagatgatcgctttgatattagcccttttttaagagcaggcattcaagcaatattggcgattttaatgatcgatcttgggaatatttatcttgatcatcttggtcaaattttagggcctttccaattaacgcttggttcaattggtttgattattaccgtctttgccactattgcgattattaatgcctttaatatgattgatggtattgatggattgcttgggggactctcttgtgtttcttttgcggcgattggtattttaatgtatcgagatgggcaaatggatatggcgcattggagttttgctttaatcgtatcgattttaccttatttgatgctcaatctagggattccatttggaccaaaatataaggtgtttatgggggatgccgggagtacattaattggctttaccattatttggattttgttattaagtacgcaaggaaaagggcatcctatgaatccagtaaccgcactttggattattgcgattcctttgattgatatggttgcgattatttatcgccgtgtacgtaaaggtaaaagcccattccgtccagatcgtttacatgttcatcatttaatggtaagagcgggtttaacatcaagacaagcctttttattgattacgtttgtttctgcagtttgtgcaactatcggtattttaggggaagtttattatgtgaatgagtgggcgatgtttgttggctttttcattttatttttcctttatgtctattcaattacgcatgcatggcgaattacccgttgggtaagaagaatgaaacgtcgtgccaaacggttgaagaaagcataa

SEQ ID NO: 22404 - DNA, 786 bp, Haemophilus influenzae
atggaaataaatagggaagaaagtgatttaacaaaatatgtaaaaattaccaatgatactgatttaacagctagtggaacagctcaaaataatgacgctaaaattgagaattctcggttaagtattgctattgggcataatgcgttagttaaagattcagatacgaaatatacacacccaaaggataagacacctgataatcctgccgcatcaatagctgtgggggcaaatgctaatgtaacagaatctccgtactcaatagccttaggaaagaatgctaaggttcttaattctgagtatagtttagccgcaggaactaatgcaaaagtagaaaaatcagaaaaagcaattgttcaaggtgttgaagctaatgcaacgaattcaaatatttctattgttactgatttcgcagcaaaagcagaaaattccaaagatgtgattgtattgggaagtaagacagaatcaataagatcaaacagtacggtagctttagggaatagaactagcgtgacagattccgatagtgcttttgttggtggcgatcacgcttcagcgacaacttctgcaggggctttagtattaggaaatggtgctaaagcgaaaacagtttcacttactgctgataatggtgttttaaaagctggcgataaaaccatttttacagaagataactttaaaatgcttttgaaacaactttatacttttgaagatggcttgaaaacaaaagaaaaaaatggaaaaaccgttgtttcattagataaagaaaccattaagcaaatggcctga

SEQ ID NO: 22405 - DNA, 2592 bp, Haemophilus influenzae
atgctgttttctccgacactatcttctcttttaacgccaagtgcggtcaaaattgaacgagaaaatctcaagcaatttgagctagagaatttttcttgttattccatttttgagcttattgaaaatcgctgtgatttttatgatgccttattgattcaactttggcaggaaataggattaagtgaacagcaaggcatttctttaattgcggtgggcggttatggacggcgtgagatgtttcctttgtcggatttagattttttgattttagttgagcaaaccccaagccatgagattgaagaaaaaattactcaatttatccaatttttatgggattgtggctttgaggtgggaaatagtgttcgaaccttagaacaatgcgaattggaaggaaaacaagatattacgattgccaccaatttattagaagcaagatttctcactggaaatcgaccgcactttgatgtactaaatgaattggtaaaacgtgcagatttttggtcgaaagaggatttttttaatgccaaagtgcaagagcaaatagaacgttatcagcgttatcacaatacggcttataaccttgagccagatattaagttcagccctggtggtttgcgtgatttgcatttgttgtattgggtggcgttgcgccattctggggctttgacccttgaggctattttacaaagtggttttatttatcctcaagaatatcagcaactacaagaaagtcgtgcatttttatttaaagtgcggttcgctttgcatttgattttgaaacgttacgataatcgtctgttgtttgatcgccaaattaaagttagtgaattgttgggctttcgaggggaaggcaatccagctgtggaaaaaatgatgaaatgttttttccaagcattgcaccgaatttcgcttattagtaatttgttgattcagcattatcgagaaaatgtgctttcatcaaatcaggatactgtgattgaccaattagacgatgattttcaactgattaaccaatccttatgtttgcgtaatagctttgtttttcaagaaaaaccagcgcgaattttagatctattcttttatttaacgcagtacgaacatgtcaatattcattctgatactttgcgtcaattacaaatttccttagagcaattatcacaaaaattatgcgaaattcctgcagctcgagaaaaatttctacgtttgtttaatcaatctaatgcgattaagcgtgcgtttatgccgatgcaccaatatggtgtattaacagcttatcttccgcaatggcaagccattgagggattaatgcaatttgatttgttccacatttatacggtggatgaacatacattgcgcgtgatgttgaaattggaaagttttctgccaaagggaagtgctcaagaacatcccattgctcatcgaatttttagccaactttctgaccgcactttactttatattgcggcgttgttccacgatattgcaaaagggcgaggcggtgatcacgcagaacttggcgcagaagatgtggcagactttgcgcaattacatggtttagatcgtcgagaaattgatacccttgcttggctagttcaatcccatttgctgatgtcaattacggcgcaacgccgtgatattcatgatcctgaagtcgtaatgaattttgcggaagccatgcaaaatcaagttcgattagattatctgacctgtttaacggtggcggatatttgtgcaaccaatggtaatttatggaatagctggaaacgttcgctttttgcctctttatatgaatttactgaacagcaattttcacaaggcatgaaagaattgcttgattactcagaaaaatcggcagaaaaccgaaaacttgcacaacaaattttaacgcaggattattctgatattacgtcaatctctattgagaaattatggactcgttgtccagaagattattttgtgcgtaatacgccaaagcaaatcgcctggcatacaagtttgctggtggatttcgttgaggcattattagtgaaaattagtaatcgcttttcacttggcggcacggaagtgtttatttattgccaagatcaaccgcacttatttaataaagtggtgagtaccattggcgccaaaaaattcagtatccacgatgcgcagattattacgacacaagatggttatgtttttgatagctttatcatcacagaacttaacggagaattggttgaatttgatcgtcgccgagaactagagcaagccctaacagtagctcttcaaagtgaaaaattacccgcactttctattgtgcctaatcgccagcttcaacattttactgtacaaaccgacgtgcgttttttacaggaaaacaaaaaagaacatactgaaatggaactggttgccttggataaagcagggttattagcccaagtgagccagatttttactgagttaaatctaaatttattaaatgcgaaaattaccaccgtaggcgaaaaagccgaggacttttttattttgacgaatcaatttgggcaagctcttgcaagagaggagagggaaagattgaacagtgttattattcagcaaattaggtaa

SEQ ID NO: 22406 - DNA, 567 bp, Haemophilus influenzae
atgatctgcaccccaaaagttggactaaataaccaactaactaaggtgcagttttttatgaccaaatacaattttcttttcaagcaacaagtcatcgaattttatcttcaaaatgataaaaatagttcacttacccgcaggcattttcaacttgccgaaacaacattagaacgttggattaaccaatttaatcatagtggaatcaatgggctagccttgctgggtaagaagcgaaattactcacctgaatttaaacttaacgtgatacaagcggttaaaaatgggaaattttctgcagaagccgcttgcttacattttggcattgccaattcaggtgttgttagccaatggttgcaagcctttgaaaaacaaggtataaacggcttaatccccaaacctaaaggtcgcccaaccatgaaactccaatatcctaaaatgccgcctaaaccgaaaacacgagaggaagaactagaattggaaaatctccgactacgtgcggagaatgccattctaaaaaagttgcaagagctcaaccaacaaaaaatgcagaaaaagccgctatcgtaa

SEQ ID NO: 22407 - DNA, 651 bp, Haemophilus influenzae
gtgacgtttaagctaagagaaaccattaaaattaaccataaaaaagtgcaacgtattatgcaatggttggggcttaagggaaaatgcaagacacaaaaatatcgttcttatcaaggtgaagtcgggcatattgcggataatctgttacaacgcgattttacggcaacacagcctaatgaaaaatggacaaccgatattaccgagttcaagtgtgcggaaggcaagctctatttatccccaattaaggatttatttaacaatgaaattattgcttatgatttagcgcgaagcccgaactttgagcaaattaccagaatgatgaaacaagctgtagcaaggcttgaaggcgcaaaaccgattttacattccgaccaaggttggcagtatcagatgataggttatcaaaacatactcagggagaatggcattcaacaaagtatgtcaaggaaggggaattgtttatataacagtgcgatggaaagcttctttgggagattaaaaacggaatgttattacggcaaacgatttgaaacgttcgaacaactggaaaaaacgattcatgaatatattcattattacaaccatgaacgcattcaggggaaactaaaaggactcagccctgtgaattacagaactcagtccttgaactaa

SEQ ID NO: 22408 - DNA, 2346 bp, Haemophilus influenzae
atgacttctcaacactccgctaaaaaatcatcgaaaaacacgccaaaaaataaccgcacttttaaaggttttttacttaaatttagcttcactgcacttgtcttaacgattttttacggcggttatctcgattggcaaattcgttctaaaatggacggtcaaatttggcatttgcctgcggaagtttatagtcgattagaaagtgtgaaaattgccgataatctcgcttttgatgaagtcattcaaattttattagataacgaatatcgccaaacgaccatggttgccgcccctggcgatttcaaattagaagatgatagcattgtagtgcttcgccgcgcttttcctttccccgataaagcagagcctcagcgagttttgcgcttgcgttttagccataataagttatctcgcattgaagatttagtgacggtcaaaactgttgatgaatttcgtcttgcaccaaagttgattgcgatgttgcaatcagacaacgaagatcgccttgctattcctttacaaaattatccccgtttattaattgatacattaattttaacggaagatcgccgcttttatgaacataatggcattaatccagtggggattttacgtgcattaattgcgaatattcgtgctggtcaaacggtacagggcggaagtacgctcactcaacaattagtcaaaaatttatttttatcgcgcgaacgcaccattacacgcaaagccaacgaagccttgatgtcattggttttagattggcgttacgataaaaaccgaattctcgaaacctatctcaatgaaatttatctcgggcaaaatggcgatacgcaaattcacggttttgaattagccagccaattttattttggtcgttcgattcgtgaaattagcttagatcaaattgcccttttagtggggatggtcaaaggcccttcactttataatccgtggcgtaatccacaaaacgcactcgaacgtcgcaacattgttttaaggctaatgcttgaacataaaatgatcggcgatgaactttatcaattattaagtcagcgacctttaggtgtgcaaaagaaagggcaaatctcgcgtaaataccctgcatttattcaaactttacaagcagatttacgccgtaagctgggcgaacacaaaatatcgagcttacttggcgcacgtattttttccacaatggatttaaaacaacaagctcaagcagaaaatgcagtgggcaataccgtttcgcaattacaactgaaaatgaaaaatccccatttagagggagcgatgattataacggattatcgcacaggcgaaattcgtgcagtagttggcggtttacaaacgcaatatgcaggctttaatcgtgcattaatggcaaaacgtcagattggttctttagtaaaaccttctatttatttgaccgcactttctaacccagaacagttccgtttgaataccccaattaataaccaaccaataacaattaatgtcaaaggtagcccgccgtggcagccacgcaactatgacaaaaaatatagtgattctgtaatgttaatggatgccttagcccgttctttaaatattcccactgtaaatattggtatgaaagttggcttgagcaaagtcattgacacgcaaaaagcgatgggctgggacaacgtggaaattcctaaagtgcctgcgatgttgctcggttcttataccatctcgccttatgatgtcacaaaactttatcaaacccttgccaatcaaggtgggagaattgcgcttacaaccgtcgatagtattgcagatcgtcaaggtaacctaatttttcaacacgataaaagtgcaaaacaagtggtgccacaagaagcggcattccaaaccttatttgcaatgcaacaaactgttgaacgtggtacagctcgcagtttgcaaaaggattacgctgatttacatttagcaggcaaaacaggcacaaccaatgaatcacgcgatacgtggtttgtgggaattgacggaaaaaatatcagcaccgtctggcttggtcgcgatgataatggcgaaacaaaactgactggtgcttctggcgcattgcaaatttataaagattatttaaaccgtacaaatattgaaaaattagcaattactccccctacaacagtgaaatgggtggggataaatcaatacggtgactgggattgtgagagttatcgaacaattcctatttggctaaataatggtcagaatttctgtggcgaaacatcatctccctctctcacgccaacaactgaaacagaaacaccaccacaagaaagcctgtgggacgtattggataatcccaatccacccgctcaataa

SEQ ID NO: 22409 - DNA, 774 bp, Haemophilus influenzae
atgaaatataccttgatcaaattaggagaattgttgatgaaaaaaattgatttaaatgcagatattgcagagggttttccttttgatgaaagtttattgcagttgctttcttctgcaaatgttgcctgtggcttacacgctgggggtgcaaaggaaatgcaaagtgcggtcaaatttgcgaaagaaaataaggtgcgtattggtgcgcatcctagttttcctgatcgcgaaaattttggtcgtacggcaatggcgttgtcttcacaggaattaatcgcacatttgcgttatcaattgggggcattaaaagcgatttgtgatggcgagggggcggtaattagttatgttaaacctcacggtgcgttatataaccaagcagcaaaagatgaaaaaatagcgcgtttaattgcacaaaccgtttatcaatttgatccgaatttgaaattaatggggttagcaggcagtttaatgttgcgcatcgcagaggaagaaaaattgcaaacgatttctgaagtttttgccgatcgacattatatgcctgatgggagtttggtgcctcgttctcaaccaaatgcaatggtggaatctgataaggaagccattcaacaagtgttacaaatggtaacaaaggggcaagtcaatgccattgatggaagccttgtgcctgtaaaagcagaaagtatttgcttacacggcgataatcaacattctttacaatttgctaaacgcattgtggaagaattagaaaaaaatcatatcaaaataacggcataa

SEQ ID NO: 22410 - DNA, 1980 bp, Haemophilus influenzae
atgtttcaagataatcctctactcgcacaacttaaacaacaaatccacgacagcaaagaacaggttgagggcgtggtaaaaagcacagataaagcctacggttttttagagtgcgataaaaaaacctatttcatcgcaccgccatcaatgaaaaaagtgatgcatggcgacaaaatcaaagccactattgaaaaacaaggcgacaaagaacaagccgagccagaagccttaattgagccaatgctcacacgttttatcgcaaaagtgcggttcaataaagacaagaaattacaagtgctggtggatcacccaagtattaatcaacccattggcgcacaacaggcgaaatcggtaaaagaagaattgcaagagggcgactgggtcgtcgcaaatttaaaaacccatccattacgtgacgatcgctttttctacgccacaattaatcaacttatttgccgagctgacgatgaattagccccttggtgggtcacattggcacgccacgaacaatcgcgctatcccgtgcgaggcgcagaaccttatgaaatgttagatcaaaaaacacgcgaaaatctgaccgcacttcattttgtaaccattgattccgaaagcacaatggatatggacgacgccttatatatcgaacccatagcacaaaacagcacacaaacaggctggaaattagtggtcgccattgctgacccaaccgcttacatcgccttagattctcaaatagaacaagaagccaaacagcgttgcttcacaaattatttaccgggctttaacattccaatgttaccccgtgaattatctgatgaattatgttccttaatcgccaatgaaacccgccccgcgcttgtctgttatatcgaaaccgatcttacaggcaacatcacagccaaaccgcattttgtttccgcttatgttcaatctaaagccaaactggcttacaacaaagtgtcggattatttagaacaggcagacaatgcatggcagccagaaatgccagaaacagcacaacaaattcactggctacatcaatttaccaaagctcgcattcaatggcgcaaaacccattccttattctttaaagaaaaacccgattatgcctttgtgctggcagaaaacggcaaagtacaagaaatcaaagcagaatatcgccgtattgccaatcaaattgtggaagaagcaatgattattgccaacatctgcgccgcccaatttttacacgaacaggcaaaaacaggcattttcaacacccatagcggttttgataaaaaattcttagagaacgcacacaatttcttaatggcaaatttagccaatgaacaaaatcaaactgaactggcagaacgttattcagtagaaaacttagcaaccttaaacggctattgccaaatgcgccacgatattgaacccatcgaaagcgattatttagaactgcgtttacgccgttatttaactttcgccgaatttaaatcagaattagcaccgcactttgggctggggctagagggttacgccacttggacatcgcccatccgcaaatattcagatatggttaatcatcgcttaatcaaagccgtgctggcaaaacagccttatgaaaaaccacaaaatgacgtgttggcacgtttgcaagaggctcgccgccaaaatcgcctcgtagaacgtgatattgccgattggctatattgccgttatcttgctgacaaagtggcatcaaatgctgaatttgaggcggaagtgcaagatgtaatgcgtgcaggcttacgcgtacaactgctcgaaaatggtgcatcgctatttattcctgccgccacgctgcacaacaacaaagaagaaatacaactaaaccctgacgaacttgccctctatataaaaggcgaacgcacttacaaaataggcgacatggtaaaagtgaaactcacagaagtgaaagaagccacacgcagtattgtgggcgaaatacttcaataa

SEQ ID NO: 22411 - DNA, 888 bp, Haemophilus influenzae
gtgcggttggttttcttagaaatattggtcggctttgtacaaagacaaattttcgcttatactacgcaagttttttacgctaacaacataggaaaaattatgggtttcttaacaggtaaacgcattttagtcacaggtcttgcaagcaatcgttccattgcttacgggatcgcaaaatcaatgaaagaacaaggcgcagaacttgctttcacttatttaaacgataaattacaaccgcgcgtagaagaatttgccaaagaatttggttctgatatcgtgcttcctttagatgtggcaaccgatgaaagcatccaaaactgctttgcagaattaagtaagcgttgggataaatttgatggttttattcacgcaatcgcatttgcaccaggtgatcaattagacggcgattacgtaaatgcggcaactcgtgaaggctaccgtattgctcacgatattagtgcatacagcttcgtggcaatggcacaagcggcacgtccttacttaaatccaaatgctgcattattaacgttgtcttacttaggtgctgagcgcgcaattcctaactacaacgtaatgtgcctagcaaaagcctctcttgaagccgcaacacgcgtaatggcagcagatttaggcaaagaaggtattcgtgtgaatgcaatctctgcaggcccaatccgcaccctagccgcatcaggcattaaaaacttcaagaaaatgctttccacctttgaaaaaaccgccgcattacgtcgcactgtcactatcgaagatgtgggtaactcagcggcatttttatgctctgacttagcctctggcattactggcgaaatcgttcacgttgatgcaggtttcagcattactgcaatgggcgaattaggcgaagaataa

SEQ ID NO: 22412 - DNA, 1584 bp, Haemophilus influenzae
atgagttatccattagaagaagttaataaacgtcgcacttttgcgattatttcccaccctgatgcgggtaaaacaacgattactgaaaaagtacttttatacggcaatgcaattcaaactgcaggttctgtaaaaggcaaaggttcggcggctcacgcgaaatctgactggatggaaatggaaaaacaacgtgggatttcgattaccacttctgtgatgcaatttccttataatgattgtttagtgaatttgctcgatacccctggacacgaagatttctctgaagatacttaccgcactttaaccgctgtggatagctgtttgatggttattgactctgccaaaggggtggaggaacgtacgattaagttgatggaagtcacacgtttacgtgatacgcccattattacgtttatgaataaactcgaccgtgatattcgtgatccgatagaattgttggacgaggtggaaaatgtgttgaaaattcgttgtgcgccaattacttggccaattggctgtgggaagttgtttaagggcgtttatcatcttgcaaaagatgaaacctatttatatcaatcagggcagggttcaaccattcaggcagtgcgtgttgttaaaggcttgaataatcctgaattagatgttgctgttggcgatgatttagcacaacagcttcgtgaggaattggaattggtgcaaggcgcaagtaatgaatttgagcaagatgcctttattaagggcgagcttacccctgtatttttcgggacagcattaggcaattttggggtggatcattttcttgatggcttaacacaatgggctccgaaaccgcaatctcgtcaagcggatacaagaacggtggaaagtgcggaagaaaaattcagtggttttgtgtttaaaattcaagctaatatggatcccaaacaccgcgaccgtgttgcctttatgcgtgtggtttcgggcaaatatgaaaaaggcatgaaactaaaacatgttcgaattggtaaagatgtggtgatttctgacgcactcacctttatggctggcgaccgtgctcacgccgaagaagcttacgctggtgatattattggtttacataatcacggtacgattcaaattggcgatacgttcacgcaaggcgaaacgctgaaatttacaggcattccaaattttgcaccagagttgttccgtcgtattcgtttgaaagatccgcttaaacaaaaacaactgttaaaaggcttggtgcaactttctgaagagggtgcagtgcaagtgtttcgtccattattaaacaacgatttaattgtgggggctgtgggtgtgttgcagtttgatgtggtggtttcgcgtttaaaaactgaatataacgtggaagcgatttatgaaaatgtgaacgttgccacggctcgttgggtggaatgtgccgatgagaaaaaatttgaagaatttaaacgcaaaaatgagcaaaatttagccttagatggcggcgataatttaacctatatcgcgccaacaatggtaaatctaaatttagctcaagaacgttatcctgatgtcgttttttacaaaactcgcgaacattaa

SEQ ID NO: 22413 - DNA, 1146 bp, Haemophilus influenzae
atgattatttcatcagctagcgattatcgtgaagcggcgcgtcgccgtgttcctccctttatgttccattatgccgatggcggttcttatgccgagcaaacacttgcgcgtaatgtgagtgatttggaaaatattgctttaagacaacgtgtcttaaaagatatgtctgaattggatactagtatagaattatttggtgaaaaactttcaatgccaactattcttgcaccagttggggcgtgcggaatgtatgcgcgtcgtggagaagtacaagcagcacaagcggcggacaataaaggtgtgccgtttaccctttcaacagtatcaatttgtccaattgaagaagtcgcccctgcgattaagcgtccaatgtggtttcagctttatgtgttaaaagatcgtggttttatgaaaaacgcgcttgagcgtgcgaaagcagcaggctgttctactttagtgtttacggtcgatatgcctactccaggtgcacgttatcgtgatatgcactcaggtatgagcgggccttacaaagaaattcgccgtgtattacaaggctttacacacccattctgggcgtatgatgtgggtatcaaaggcaaaccgcacaccttgggtaatgtttcaacttatatgggtagacaaataggtttagatgactatattggctggctaacagaaaactttgatccatcaatttcgtggaaagatttagagtggatccgtgagttttgggaaggtccaatggtcattaaaggtattctcgaccctgaagatgcgaaagatgcggtgcgtttcggtgctgatggaattgttgtttcaaatcacggtggccgtcagttagatggcgtgctttcaagtgcaagagcgttgccaccaattgccgatgcagtgaaaggggatattaaaattattgccgattcaggtattcgcaatggtttagacatagtccgtatgttggcattaggggcagatgcaacaatgttaggtcgagcatttgtttatgctttaggggcagaaggtcgtcaaggtgttgaaaatatgctcgacattttcaaaaaagagatgcacgtagcgatgacattaaccagcaatcgtactattgccgatattaaaccagaggctttggttgatctaagtaaactttaa

SEQ ID NO: 22414 - DNA, 810 bp, Haemophilus influenzae
atggataaaaaagaaaaacgcccaacagtgctcttttttgattctggagtgggtgggtttagcgtatatcgtgaagccaaaaaactattacccaattggcattatctctattgctttgataatgcgggattcccttattcagaacgcaaagaagaaagtattattcaccgaactttagcggcgtgtcagcttattaatcaacgttatccattagatgcaatggtgatagcttgcaatacagcgagtactgttgtgcttccgcctttgcgagctgcttttgatattcctatcattgggactgtacccgctattaaacctgcatcagaaataacaaagacaaaacatattggtttattagctacaaaggggactgtaaaacgtcattatatcgatgagttgattgataaatttgcgcaagattgtattgttgagagactgggaacgacaaaattagtcgaaattgcggagcaaaaaattcgtggtcattccgttgatctcattagtttaaaagatgagttatcttcgtgggcaggcatggcagatttggatacattagttttaggttgtactcactttcctctcatcaaagatgaaattcagttatgcttgccacaagttaaatattttatggaaccgagcgcagcaattgctaaacggatcaaatatttacttgatgataaaaatctacaagcgcaaaatgaaaaatataatcaaatgttttgcaccgcacattttcccgaagaatctcaatttaaaaaagctttacatctatggggatttgaatctttggaagtaatcaaaatagattaa

SEQ ID NO: 22415 - DNA, 2034 bp, Haemophilus influenzae
gtgattgcaagagatgcgcacgaaggacaatttcgctccagcggcgaaccttacattacccatcctgtggcggtagcctccattattgctcaacttcacttagatcacgaagcggtaatggctgcgcttttgcacgatgttattgaagatacaccttatacggaagaacaactgaaagaagagttcggtgccagtgtggctgaaattgtggacggtgtatcaaaactcgataagttgaaatttcgtactcgccaagaagcacaagtcgagaattttcgcaaaatgattttggcgatgacgcgtgatattcgcgttgtgttaatcaagcttgctgaccgcacgcataatatgcgcacgcttggttcgttacgaccagataaacgtcgccgtattgcgaaagaaacgcttgaaatctattgtccgcttgctcatcgtttaggtattgagcatatcaaaaatgaattagaagacttatcttttcaagcaatgcatccacatcgttatgaggtgttaaaaaaactcgttgatgtggcgcggagtaatcgacaagatttaatcgaacgtatttcacaagagattaaagtgcggttagaaaactcaggcatttttgcccgagtgtggggacgtgaaaaacatctttacaagatctatcaaaaaatgcgcataaaggatcaagaattccactctattatggatatttatgcgttccgtgtgattgtgaaaaatgttgatgattgttatcgcgttttggggcaaatgcataatctttataagccacgtccaggccgagttaaggattatatcgcggtacctaaagcaaatggctatcaatctttgcaaacttcaatgattgggccgaaaggtgttcccgtagaagttcatatccatactgaggatatggaacaagtcgctgaaatgggcattactgcgcattgggtttataaagaaaatggtaaaaacgacagtacaaccgcacaaatccgagtacaacgctggttgcaaagtttggttgaaattcaacaaagtgtaggtaattcgtttgagtttattgagaatgtaaaatcagagtttttcccgaaagaaatttatgtttttacgccaaaaggtcgaattgttgaattgccaatgggcgcaacagcagtagattttgcttatgctgtgcattcagatgtggggaatacttgtgttggcgtaaccgttgagcataaaccttatccactttcaaaagcccttgaatcagggcaaacagtcaatatcattactgatccaaatgcgcatcctgaagtcgcatggttaaattttgtggtaacggctcgtgcgaaaacacggattcgccattatctcaaacagcgttgtgaagaggatgcggtgaaattaggcgaagttgagcttaatgtagcattacagccgcataatttaggtgatttttctattcaacaaattagaactgtattagatgctttagccctttcttctttagatgaattattacgagaaattggtttaggtaatcagtcagcctccatgattgcgcatcaatttgtgggcgtgccgttagaatctgctaatactaagaatctcgaatttgaatcaaaaatactcactattgcaccaatgcaagtgggtaaaacacaatttgctcaatgttgccatccaatcctaggtgatcctattgtgggatgttgtacagaaaaaaatacagttgtggtacaccatcaacattgtgcaagtttgaaaaatgcttgtcgtcaatcgttggctaagtgggataacgttcaaagtgcggtgaattttgaggctgaattacaaatagaaatattgaatgagcagaatgccttgcttagtttaatgaccgcaatttcagcgagcgaaagcagtctccaaaatatttggacggaagaattagagaacaatttattgcttgtgattttgcaggtttgtgtaaaagatatcaaacaccttgccaatatcgttcatcgtattaaaggcatcactggcgtcgttaatgtcaaacgcaatattaatgagctatga

SEQ ID NO: 22416 - DNA, 417 bp, Helicobacter pylori
atggcgacacgaactcaagccaggggggctgtggttgaattgttgtatgcgtttgagagcggtaatgaagaaattaaaaaaatcgcttctagcatgttagaagaaaaaaagattaaaaacaaccaactcgctttcgctttaagcctttttaatggcgtgttagaaaaaatcaatgaaattgacgccctcatcgagccgcatttaaaagactgggatttcaagcgattagggagcatggaaaaggcgattttacgcttaggagcgtatgaaattggcttcacgcccacgcaaaaccctatcatcatcaatgaatgcatagagcttggcaaactctacgctgagcctaacacccctaaatttttaaacgctatcttggattctttgagcaaaaagctcactcaaaaacccttgaattga

SEQ ID NO: 22417 - DNA, 471 bp, Helicobacter pylori
atgcaaatcatagaagggaaattgcaattacaagggaatgaaagagtcgctattttaacatcgcgcttcaatcatatcatcacagacagattgcaagaaggggcgatggactgctttaaaaggcatgggggcgatgaggatcttttagacatcgtgctggtgcctggggcttatgaattgccttttattttagacaaattattagagagcgaaaaatacgatggcgtgtgcgttttgggagcgatcattagaggggggactccgcattttgattatgtgagcgcggaagcgactaagggtattgcccatgcgatgcttaaatacagcatgccggtaagctttggcgtgctgaccacggacaatattgaacaagcgattgaaagagcgggcagtaaagccggcaataagggctttgaagcgatgagcaccctcattgaattgttgagcttgtgccaaactctcaagggttaa

SEQ ID NO: 22418 - DNA, 831 bp, Helicobacter pylori
atgaaaacttctaaaacaaaaacccctaaatccgttttaatcgctgggccatgcgtcattgagagcttagaaaatctaagaagtatcgccactaaattgcaacccctagccaacaacgagcggttggatttttattttaaagcgagttttgataaggcgaaccgcacgagtttagagagttacagagggcctggtttagaaaaaggcctagaaatgttacaaacgatcaaagaggaatttggttataaaatcttaaccgatgtgcatgagagttatcaagcaagcgtggcagccaaagtggcggatattttacaaatcccggcgtttttgtgccgccaaacggatctgattgtagaagtgagccagactaacgctattgtcaatatcaaaaaagggcaattcatgaacccaaaagacatgcaatattctgttctaaaggcccttaaaacgagagataaaagcattcaaagccccacttatgaaacagcgttaaaaaatggcgtgtggctgtgtgaaagggggagcagctttgggtatgggaatttagtggtggatatgcgctctttaaaaatcatgcgagaatttgcccctgtgatttttgacgctacccatagcgtgcaaatgccagggggagcgaacgggaaaagttcaggagacagctcttttgcccctattttagcgagagctgcggcggcggtggggattgatgggttgtttgctgaaacgcatgttgatcctaaaaacgccctaagcgatggagcaaacatgctaaaacctgacgagctagaacaattagtaaccgacatgttaaaaatccaaaatttattttaa

SEQ ID NO: 22419 - DNA, 1641 bp, Helicobacter pylori
atggcaaaagaaatcaaattttcagatagcgcgagaaaccttttatttgaaggcgtgagacaactccatgacgctgttaaagtaaccatggggccaagaggcaggaacgtgttgatccaaaaaagctatggcgctccaagcatcactaaagatggcgtgagcgtggctaaagagattgaattaagttgcccggtagctaacatgggcgctcaactcgttaaagaagtagcgagcaaaaccgctgatgctgccggcgatggcacgaccacagcgaccgtgctggcttatagcatttttaaagaaggtttgaggaacatcacggctggggctaaccctattgaagtgaaacgaggcatggataaagccgctgaagccattattaatgagcttaaaaaagcgagcaaaaaagtgggcggtaaagaagaaatcacccaagtggcgaccatttctgcaaactccgatcacaatatcgggaaactcatcgctgacgctatggaaaaagtgggtaaagacggcgtgatcaccgttgaagaagctaagggcattgaagatgaactagatgttgtagaaggcatgcaatttgatagaggctacctctccccttattttgtaacaaacgctgagaaaatgaccgctcaattggataacgcttacatccttttaacggataaaaaaatctctagcatgaaagacattctcccgctactagaaaaaaccatgaaagagggcaaaccgcttttaatcatcgctgaagacattgagggcgaagctttaacgactctagtggtgaataaattaagaggcgtgttgaatatcgcagcggttaaagctccaggctttggggacagaagaaaagaaatgctcaaagacatcgctattttaaccggcggtcaagttattagcgaagaattgggcttgagtctagaaaacgctgaagtggagtttttaggcaaagccggaaggattgtgattgacaaagacaacaccacgatcgtagatggcaaaggccatagccatgatgtcaaagacagagtcgcgcaaatcaaaacccaaattgcaagcacgacaagcgattatgacaaagaaaaattgcaagaaaggttggctaaactctctggcggtgtggctgtgattaaagtgggcgctgcgagtgaagtggaaatgaaagagaaaaaagaccgggttgatgatgcgttgagcgcgactaaagcggctgttgaagaaggtattgtgattggcggcggtgcggctctcattcgcgcggctcaaaaagtgcatttgaatttgcacgatgatgaaaaagtgggctatgaaatcatcatgcgcgccattaaagccccattagctcaaatcgctatcaatgccggttatgatggcggtgtggtcgtgaatgaagtagaaaaacacgaagggcattttggttttaacgctagcaatggcaagtatgtggatatgtttaaagaaggcattattgaccccttaaaagtagaaaggatcgctttacaaaatgcggtttcggtttcaagcctgcttttaaccacagaagccaccgtgcatgaaatcaaagaagaaaaagcggccccagcaatgcctgatatgggtggcatgggcggtatgggaggcatgggtggcatgatgtaa

SEQ ID NO: 22420 - DNA, 1680 bp, Helicobacter pylori
atgattcttaaaagttccattgatcgccttttgcaaacgatagacattgtagaagtcattagctcttatgtgaatttgaggaaatcaggttctagctacatggcttgttgcccttttcatgaagaaaggagcgcgagttttagcgtcaatcaaattaaagggttttaccattgctttgggtgtggggcgagcggggatagcattaaatttgtgatggcgtttgaaaagctttcgtttgtggaagcgcttgagaaattagcccaccgattcaatatagttttagagtatgacaaaggcgtttattacgatcataaagaagattaccaccttttagaaatggtgagttcgttgtatcaagaagagctttttaacgccccgttttttttgaattatttgcaaaaaagagggcttagcctagagagtatcaaagcgtttaaattaggcttatgcacgaatagaattgattacggcattgaaaataaaggcttgaataaggacaagctcattgaattaggcgtgctaggcaagagcgataacgatcagaaaacctatttgcgctttttggatcgcatcatgttccctatttatagccctagcgctcaagtggtgggttttggagggcgcaccttaaaagaaaaagcggccaagtatatcaattcgccccaaagtaagctttttgataaatccagtttgctctatggctatcatttggctaaagaacacatctataaacaaaagcaagtcattgtaacagaggggtatttggatgtgattttattgcaccaggcgggttttaaaaacgccatagccacgcttgggacagctttaacgccatcgcatttgcccttgcttaaaaaaggcgatcccgaaatccttttgagctatgatggggataaggcagggcgaaacgcagcctataaagcgagcttgatgttggctaaagagcaaaggaggggaggggtgattttgtttgaaaacaacctggatccagcggatatgatcgctaatggccagattgaaaccttaaaaaattggctatcgcaccccatggcttttattgagtttgttttaaggcgcatggcggattcctatcttttagacgatcctttagaaaaagataaggctcttaaagaaatgttagggtttttaaaaaacttttccttgcttttacaaagcgaatacaagcccttaatcgctacccttttgcaagcgcctttgcatgttttagggattagagagcgagtctcttttcagcctttttaccccaaaacagaaaaacccaatcgccctcaaaggtttgcgcatgtttctagcgcgcccagtttggaatttttagaaaaattagtgatccgctatcttttagaagacagaagcttgttggatttagcggtgggctatatccatagtggggtattcttgcataaaaaacaagaatttgacgctttgtgtcaagaaaaattagacgaccctaaattagttgcgttattattagatgcgaatttacccctaaaaaaagggggttttgaaaaggaattgcgtttgttgattttgcgctattttgagcgccaactcaaagaaatccctaaaagctcgctcccttttagcgaaaaaatgatctgtttaaaaaaggctcgccaggccattatgaaattaaaacaaggagaattagtcgccatatga

SEQ ID NO: 22421 - DNA, 1281 bp, Helicobacter pylori
atgtctgtcactttagtcaataatgaaaataatgaacgctatgaatttgaaacgattgaaagcactcgtgggcctaaagcggtggatttttccaagctttttgaaacgaccgggtttttttcttacgatccagggtattcttctaccgctggatgccaatctaagatcagctatgtcaatggcaaaaaaggcgaattgtattacagagggcataggatagaagatttagtcgccaaatacaaatatgtagatgtgtgcaaattactcctcacaggggaattacccaaaaatcaagatgaaagcttggaatttgaattggaattgcgccacaggagctttgtgcatgagagcttactcaacatgttttcagccttccctagcaacgcccaccctatggcgaaactctctagcggagtgtctatcttatccaccctttattccacgcaccaaaacatgcacactgaagaagattaccaaactatggccagaaggattgtcgctaaaatccccacgcttgcggctatttgctatcgtaatgaagtgggagcgcctatcatttatccggacatcgcacgctcttatgtggaaaatatccttttcatgctgagagggtatccttatagtcgcttaaaacacaccactcaaggcgaagtggaaatcacgcccctagaagtggaagcctttgataaaatcctaaccttgcacgctgatcacagccaaaacgcctcttctaccacggtaaggaatgtcgctagcaccggcgtgcatccttatgccgccattagcgcgggcattagcgctttatgggggcatttgcatggcggagcgaatgaaaaagtccttttacaattagaagaaatcggcgatgtgaaaaatgtggataaatacatcgcgcgagtgaaagacaaaaacgacaatttcaaactcatgggctttgggcatagggtgtataaaagctacgatccgcgcgctaaaatcttaaaaggcttgaaagacgaactgcaccaaaaaggcgttaaaatggacgagaggttgagcgaaatcgccgcgaaagtggaagaaatcgcgctaaaagacgagtatttcattgaaaggaatctctaccctaatgtggatttttactccggcaccattttaagggctttaaaaatcccggtgcgttttttcacgccggtgtttgtcattggccgaaccgtaggctggtgcgctcagcttttagagcatgtcaaaagcccgcaagccaggatcacacgcccaagacaagtctatgtaggggattaa

SEQ ID NO: 22422 - DNA, 1278 bp, Helicobacter pylori
gtggcttacaaccctaaaattttacaaaagcctaaagagggcgaagaaattacgattaaagacaacaaattgcatgtgccaaaccaccccattatccccttcattgagggcgatggcattggatcagatattaccccggcgatgattaaagtcgtggatagcgcggttcaaaaagcgtataagggcgagaaaaaaatcgcatggtatgaggtgtttgtgggcgaaaaatgctatcaaaaatttaaagattataaagaattaagcccagaagagcaatggctcttaccggacactattgaagcgattaaccattataaagtttctattaaagggcctttgacaacgcctattggtgaagggtttagatctttgaatgtagcgttacgccaaaaaatggatttgtatgtgtgcttgaggccggtaaggtggtatgggagtcctagcccggtgaaagaaccacaaaaagtggatatggtgatttttagagaaaattctgaagacatttatgcgggcattgaatggcaagaaggcagtgcggaagcgaaaaaactcatccattttttacaaaatgaactaaaggttaaaaaaatccgcttccctgaaagcagcggcataggggtaaaacccatcagtaaagaaggcacagagaggctagtgagaaaggcgattgaatacgcaattgataacgacaagccaagcgtgacttttgtgcataaaggtaacatcatgaaatacaccgaaggggcgttcatgaaatggggctatgcgctcgctcaaaaagaatttaacgctcaagtcattgataaaggcccatggtgttctttgaaaaaccctaaaaacggtaaagaaatcatcattaaagacatgatcgctgacgcgtttttgcaacaaatcttattgcgccctagcgaatacagcgtcattgcgaccatgaatttgaacggggattatatctctgatgcgttagcggcgatggtggggggtattggtatcgctcctggggctaatctcaatgacacggtgggcatgtttgaagccacccatggcaccgctcctaaatatgccgggctggataaagtcaatccggggtctattattttgagcgcggaaatgatgttaaggcatatgggttgggtggaagcggctgatttgatcgtttctgcgatggaaaaagcgattaaaagcaagaaagtaacttacgatttcgctcgtttaatggatggggctaaagaagtgaaatgctctgaatttgctagcgtgatgattgaaaacatgtga

SEQ ID NO: 22423 - DNA, 294 bp, Helicobacter pylori
atggattttagtcaattgggcgggttgttagacggcatgaaaaaagagttttcccaactagaagaaaagaataaagacacgatccacacttccaaaagcggtgggggaatggtgagcgtgagttttaatgggttgggggagttggtggatttgcaaattgatgacagcctgttagaagataaagaagcgatgcaaatctatttgatgagcgctttgaatgacgggtataaagccgtagaagaaaaccgaaaaaatttagcctttaacatgctggggaattttgctaaattgtga

SEQ ID NO: 22424 - DNA, 3558 bp, Helicobacter pylori
atgcaaaaaatcattgacgattcgctagaattagctaaaaaactgcaagatagtatcagtaaccatttgagcgatcaggaaaaagcgttccactctaaaatgcaaaagcttttaaacaaccctgaaaacaaagtcatgctcatagagcttatggatcggagtttcaggtgcttggacaataaagcccgctttgaaatgattgagcatgttttagacaaatacaaaagccgtgagattttttctccgtttgaaaaagtgcttttaatggggtttttaagctttgggaaaatgctccctgatatgagcgtgcctttctttgtcaataaaatcagaagcgacacgaaagcgatggtcttggatcaagaagagagccagttaaaagagcggattttaaaaagaaaaaatgaaaaaatcattttgaatgtgaattttattggcgaagaggttttaggcgaagaagaagctaatgcgcgttttgaaaaatactctcaagccctaaaatccaactacatccaatacatttccattaaaatcacgacgattttttctcaaatcaatatccttgattttgaatactctaaaaaagagattgtcaaacgcctagacgctctttacgccctggctttagaagaagaaaaaaaacaaggcatgcctaaattcatcaatttggatatggaagaatttagggatttagagctaacagtggagtcgtttatggaatccatcgctaaatttgatttgaacgctggtattgtgctgcaagcctatattccggattcttatgaatatttgaaaaaactgcacgctttttctaaagaaagggttttaaaagggttgaagcccattaaaatccgctttgttaagggagcgaacatggagagcgaagaaactatcgcttccgtgaaagattgggcgttacccacattttccaataagcaagacaccgattctaattacaataaaatgttggattttgttttagagggcgataattataaatacattcatattggcgcagcgagtcataatatttttgaaatcgcttatgtctatacgcgtatccatgccattaatgatcctgttgtgttagagcatttcagctttgaaatgctagagggcatgagtttgcaagcgagccaggaactaaaagagatgcacaagctcattctttatgcgccggtgtgcgatgaagcgcattttaacaatgcgatcgcttacttggtgaggaggttagacgaaaacacctcaagcgataatttcatgaaggctttctttaacctcaaagtaggcacgagcgaatggaaagatcaagaacaacgctttttaaacagccttaaaggaattgccactttagacaatgccacccataggactcaagataggaacgccaaacaaagcgggcataccacttacccaaaccactcctttaaaaacgaaagcgataccgattttattttaaaagccaaccgagaatgggctaaaaaagtgcgcgagaaaatgcgtaacgctcctattttagagctttacccagagatggatgggaggtttgaagatcctaatctaacccctttagaagtctttgatagaatccatcataaaaaaatcgctagcgtgcatttagcggataaggaagcgattttaaaagccctagaagtggctaaaagcgataagagccgtttcagtcaaaaaagctttacagaaatccatgccttaatgagtcaaaccgcccagctttttagagaaagaagaggcgatttgatagggatttccgctttagaagtgggtaagactttcgctgaaacggacgctgaagtgagcgaagccattgactttttagagttttacccttacagcttaagggtgttgcaagagcaaaacacaaaaacgcaattcacccctaaaggcgtgggcgtggtcattgccccatggaatttccctgtgggcatttctgtaggcactatcgctgcccccctagctacgggcaatcgggtgatttacaagccctcaagtttgtctagcgtaacgggctataagctttgtgagtgcttttgggatgcgggcgtgcctagagatgcgctcatttacttgccctctaaagggagcgatattagcgaacatcttttaagagatgaaagcatccagtttgccattttaaccgggggcgaagacaccgcttataaaatgttaaaagctaaccccactttagccttgagcgctgaaacaggcggtaaaaacgccaccattgtgagcaaaatggcagacagagaccaggcgattaagaatgttatccattcagcttttagcaattcggggcaaaaatgctccgccacttcgcttttagtattagaaaaagaagtctatgaagatgagaactttaaaaagactctaatagatgcgactctaagccttagcgtgggcgatccttttgatttcaaaaacaaaatcggcgctctagcggacaagcctaatgaaaaggtcatcaaagccatagatgaattaaaaagctatgaaaattacgaaatcccggtaagctttgtcaatgataacccctatttgatgaagccaagcatcaaatacggcactaaaaaaggcgatttcacgcaccaaactgagctttttacgcccattttatccgtgatggaagcaaaagatttagacgaagcgatagaaatagccaattctaccggttacgggctgactagcgcgttagagtcgttggacgaaagggagtgggaatattatttagaacgcattgaagccggtaatatctatatcaacaagcccaccacaggagcgattgtcttgcgccagccttttgggggggttaaaaaatccgctgtggggtttgggaggaaagtaggcattttcaactatatcacgcaatttgtgaatatctgccaagaagaagaagacgaaaacgccttaaaaaaccccttaagcgaagccttagaaaacttaactcaaaaaggctatgatgagcatacgcatgagttgaagcgcgcgatttttatggcaaaaagctacgcttatcattacaaacatgaattcagccaaactaaagactatgtcaaaatcagaggcgaagacaaccttttttcctacactaaagttaaaagcgtgggctatcgcatcaccgaaaaggacactttaagcgacatgttaggcgttgctttagcatgtttaatttctcaaatccctttaacgctcagcatagaaaacgaacgaacgaacaaagatttaacctttttcttagaatgcttaaaagcgctccaagcaagcgcccctattgtttatgaaagcttgcaaaaatttagcgagaaattgaatactttcaatcgtgtccgttatctcaaaagcgatttggatttattgcacgaacaagcgagcgctttagggatggttttagccacggctaaaccatgcctaaatgggcgttttgaattgctgtattaccacttagagcgatcggttagcatctcttatcaccgttatgggaatttaggctcaagggttttaaggcaacccacttgccacaaatcatgctgtgctgaaaaataa

SEQ ID NO: 22425 - DNA, 600 bp, Helicobacter pylori
atggtaaaaattggagtttgtggtcctgtaggaagcggtaaaaccgccttgattgaagctttaacgcgccacatgtcaaaagattatgacatggcggtcatcactaatgatatttacacgaaagaagacgcagagtttatgtgtaaaaattcggtgatgccacgagagaggatcattggcgtagaaacaggaggctgtccgcacacggctattagagaagacgcttctatgaatttagaagccgtagaagaaatgcatggccgtttccctaatttggaattgcttttgattgaaagcggaggcgataacctttcagcgacattcaacccagagctagcggactttacgatctttgtgattgatgtggctgagggcgataaaatcccccgaaaaggcgggccaggaatcacgcgctcagacttgcttgtcatcaataagattgatttagccccctatgtgggagcggacttgaaagtcatggaaagggattctaaaaaaatgcgcggcgaaaagccctttatttttacgaatatccgtgctaaagaaggcttagacgatgtgatcgcttggatcaagcgcaacgctttattggaagattga

SEQ ID NO: 22426 - DNA, 765 bp, Helicobacter pylori
atggataaaggaaaaagcgtgaaaagcactgaaaaaagcgtgggtatgcccccaaaaactccaaagacagacaacaacgctcatgtggataacgaatttctgattctgcaagtcaatgatgcggtgttccctattggatcttacacgcattcttttgggctagaaacttacatccagcaaaaaaaggttaccaataaagaaagcgctttagaatatttaaaagccaatctctctagccagttcctttacacggaaatgctgagcttgaaattaacctatgaaagcgccctccaacaagatttaaaaaagatcttaggggttgaagaagtcattatgctatccacaagccccatggaattacgattagccaatcaaaagctgggcaatcgtttcattaaaaccttacaagccatgaacgaattagacatgggcgaattttttaacgcttacgctcaaaaaaccaaagatcccacccatgccactagctatggcgtttttgcggcaagtttggggattgaattgaaaaaggctttaaggcattatctttatgcgcaaacttctaacatggtgatcaactgcgttaaaagcgtccctttatctcaaaacgacgggcaaaaaatcttattgagcttgcaaagcccttttaaccagctcatagaaaaaaccctagaactagacgaaagccacctgtgcacggcaagcgttcaaaacgacattaaggcgatgcagcatgagagtttatactcgcgcctttatatgtcttga

SEQ ID NO: 22427 - DNA, 1710 bp, Helicobacter pylori
atgaaaaagattagcagaaaagaatatgtttctatgtatggccctactacaggcgataaagtgagattgggcgatacagacttgatcgctgaagtagaacatgactacaccatttatggcgaagagcttaaattcggtggcggtaaaaccctgagagaaggcatgagccaatccaacaaccctagcaaagaagaattggatctaatcatcactaacgctttaatcgtggattacaccggtatttataaagcggatattggtattaaagatggcaaaatcgctggcattggtaaaggcggtaacaaagacatgcaagatggcgttaaaaacaatcttagcgtaggtcctgctactgaagccttagccggtgaaggtttgatcgtaactgctggtggtattgacacacacatccacttcatttcaccccaacaaatccctacagcttttgcaagcggtgtaacaaccatgattggtggcggaactggtcctgctgatggcactaatgcgactactatcactccaggcagaagaaatttaaaatggatgctcagagcggctgaagaatattctatgaacttaggtttcttggctaaaggtaacgcttctaacgacgcgagcttagccgatcaaattgaagctggtgcgattggctttaaaatccacgaagactggggcaccactccttctgcaatcaatcatgcgttagatgttgcagacaaatacgatgtgcaagtcgctatccacacagacactttgaatgaagccggttgcgtggaagacactatggcagctattgccggacgcactatgcacactttccacactgaaggtgctggcggcggacacgctcctgatattattaaagtagctggtgaacacaacattcttcccgcttccactaaccccactatccctttcactgtgaatacagaagcagaacacatggacatgcttatggtgtgccaccacttggataaaagcattaaagaagatgttcagttcgctgattcaaggatccgccctcaaaccattgcggctgaagacactttgcatgacatggggattttctcaatcaccagctctgactctcaagctatgggtcgtgtgggtgaagttatcactagaacttggcaaacagctgacaaaaacaaaaaagaatttggccgcttgaaagaagaaaaaggcgataacgacaacttcaggatcaaacgctacttgtctaaatacaccattaacccagcgatcgctcatgggattagcgagtatgtaggttctgtagaagtgggcaaagtggctgacttggtattgtggagtcccgcattctttggcgtaaaacccaacatgatcatcaaaggcgggttcattgcgttgagtcaaatgggtgacgcgaacgcttctatccctaccccacaaccagtttattacagagaaatgttcgctcatcatggtaaagccaaatacgatgcaaacatcacttttgtgtctcaagcggcttatgacaaaggcattaaagaagaattagggcttgaaagacaagtgttgccggtaaaaaattgcagaaacatcactaaaaaagacatgcaattcaacgacactaccgctcacattgaagtcaatcctgaaacttaccatgtgttcgtggatggcaaagaagtaacttctaaaccagccaataaagtgagcttggcgcaactctttagcattttctag

SEQ ID NO: 22428 - DNA, 1338 bp, Helicobacter pylori
atgaaaatttttgggactgatggcgtgaggggtaaagcaggggtgaaactcacccccatgtttgtgatgcgtttaggcattgctgccggattgtattttaaaaaacattctcaaacgaataaaattctaatcggtaaagacaccagaaaaagcggctatatggtagaaaacgctttagtgagcgctctaacttccataggctataatgtgattcaaatagggcctatgcccacccctgcgattgcgtttttaactgaagacatgcgctgtgatgcgggtattatgataagcgcgagccacaacccttttgaagataatggcattaagtttttcaattcttatggctataagcttaaagaagaagaagaaaaagcgattgaagaaatctttcatgatgaagaattactgcattctagctataaagtgggtgagagcgtcggtagcgctaaaaggatagacgatgtcatagggcgctatattgcacatttaaaacactctttccccaaacatttgaatttacagagtttaaggatcgtgctagatacggctaatggcgcggcttataaggtggctccggtcgtttttagcgagcttggggctgatgtgttagtgattaatgatgagcctaacgggtgtaacattaatgatcaatgcggggctttacaccccaaccaattaagccaggaagtgaaaaaataccgcgcagatttaggctttgcttttgatggcgatgctgacaggctagtggtggtggataatttagggaatatcgtgcatggggataagcttttaggggtgttaggggtttatcaaaaatctaaaaacgccctttcttctcaagcggttgtcgccacaaacatgagcaatttagcccttaaagaatatttaaaatcccaagatttggaattgaagcattgcgcgattggggataagtttgtgagcgaatgcatgcaattgaataaagccaattttggaggcgagcaaagcgggcatatcatttttagcgattacgctaaaacaggcgatggtttggtgtgcgctttgcaagtgagcgcgttagtgttagaaagcaagcaggtaagctctgttgcgttaaacccctttgaattatacccccaaagcctagtgaatttgaatgtccaaaaaaagccccctttagaaagcctgaaaggttatagcgctcttttaaaagaattagacaagctagaaatccgccatttgatccgttatagcggcactgaaaacaaattgcgaatccttttagaagctaaagatgaaaagcttttagaatccaaaatgcaagaattaaaagagttttttgaagggcatttgtgctaa

SEQ ID NO: 22429 - DNA, 270 bp, Helicobacter pylori
atggcaaatcataagtccgcagaaaagcgaatcagacagaccattaagagaaccgaacgcaacaggttctataaaactaaaattaaaaatatcattaaagccgtgcgtgaagccgttgctgtcaatgatgtagcaaaagctcaagagcgtttgaaaatcgctaataaagagttgcataaatttgtcagcaaggggattttaaagaaaaacaccgcttctaggaaagtctcaaggcttaacgcttcagtgaaaaaaatcgctctcgcttag

SEQ ID NO: 22430 - DNA, 1059 bp, Helicobacter pylori
atgtccattctagccgaaaagctttcttccattctcaaacgatacgacgaactcacggcgttgctttctagcgctgaagtggttagcgatattaaaaaactcaccgaattgagtaaagagcaaagctccattgaagaaatctccatagcgagtaaagagtatttgagcgttttagagaacattaaagaaaataaggagcttttagaagacaaggaattgagcgaactggctaaagaagagttaaaaattttagaaatccaaaaaagcgatctagaaactgccattaagcaactccttatccccaaagaccctaatgacgataaaaacatctatttagagttaagggccggcacagggggcgatgaagcgggcatttttgtaggggatttgtttaaggcgtattgccgttatgcggatttgaaaaaatggaaagtagagattgtaagctctagcgaaaacagcgtagggggctataaagaaatcatcgctttgattaagggcaagggcgtgtattcaaggctcaaatttgaagcaggcacgcatcgagtccaaagagtccctgaaacagaatctcaagggcgcatccacacttccgctatcacagtagcgatcatgcctgaagtggatgatgtggaagtttctatcaaccctagcgatttaaagattgaagtgtttcgcgctggcgggcatggggggcaatgcgtcaatactacagactctgcggtgcgtatcacgcaccttcccaccaatatcagcgtgagcatgcaagatgaaaaatcccaacataaaaacaaggataaagccctaaaaatcttaaaagcgcgcctttatgaaaaacaaattgaagagcagcaactcgctaacgccaaagaccgaaaggagcaagtgggtagtggggataggagcgaacggatccgcacttataattacccgcaaaaccgcttgagcgaacatagaatcaatttaactctgtatagtttagaagaaatcatgctttcagggaatttagatgaagtgattaaccctttaatcgcccacgcccaaagccagtttgaataa

SEQ ID NO: 22431 - DNA, 1788 bp, Helicobacter pylori
atgaaaaagtcattcaaaaaattaggctttgtctctttagcggctagtggcgtgcttttagggagcatgaacgctaccgatttagaaacctacgcagcattgcaaaaatcatcgcatgtttttggtaattatgctgaaaaggataaggatagtaaattaacaagcgattcaccaacgcaacaacaagatcaaaaagtagcccaaaacaccgcttcaaacgacagccaagaagcgacaacacttgaaaacaccgcttctactgacaacacaaccgccacaactgatgaaacttatacaaaaagcactgacactactgtagctggtgcggctcaaaaagtagaaaccgataacacagccgttcaaagcgctgaacaaactttaaaaacagatgtagctaaagttcaagctgatgctagtgctaaagattttgatgaaaccacttttcaagccgatcaagcagcagagcaaaccgctgaaaaagctttacaacaggctgagagcaaactcaacaccgatcaacagactttaaacacagcgttacaagatcagacgaaaacaccaaccccatcaaccccaccaactaaagaggaaccaaaacacaccgcttcaagcggcacaccaccagctccagaaagcccaccagctaaaaaagatgaaacaagtggcacaccaagtgctagtgggagttctgtggcaagccagctaaccaaagataccactatggttaataatcttaagagtgtgagcgtgagcgcgatgaacaccactttaagtggagtagaaaccatgtctcaacaaactgcaacgattggcaaccttttgaatagtagcaccgatttaagcagtgtgattcccaacgctcaagggctaaacagcgcgtttagcacattagaaagcgctcaaaacactctaaaaggctatttaaattcttctagcgcgacgattgggcaattgacaaacggatctaatgcggttgtgggcgcgttagataaagctatcaatcaagtggatatggctttggccgatcttagtgcagctgatacgcaaaaaacgcaagccgttacgcttgcaactgctagtgatagtccaacgacaacgacagatgccatcaatttcttaaacgcgctaaaaagcaatctaatggctcaaaaagacgcttttttgaatgtgcataaaaacattcaaaccgctgtcgctcaagcccaggaaacctacacgccaagcgtgatcaacaccaataattacgggcaaatgtatggggtagatgcgatggcagggtataagtggttctttggcaaaaccaaacgctttggctttaggtcttatggatactacagctataaccatgcgaatttaagctttgtggggagccagcttggaatcatggagggcgcgtctcaagtgaataacttcacttatggcgtgggctttgatgtgctctataacttctatgaaagcaaagagggctataacacagcagggttgttcttaggctttgggttaggaggggattcgtttatcgttcaaggagagagctacttgaaatctcaaatgcacatttgcaacaacaccgccggctgttcagcgagcatgaacacaagctacttccaaatgcctgttgaatttggttttaggagcaatttctctaaacacagcgggattgaagtgggctttaaattgcctttattcaccaaccaattctataaagaaaggggcgtagatggatcggtagatgtgttctataaaaggaatttctctatttattttaactacatgatcaacttctaa

SEQ ID NO: 22432 - DNA, 390 bp, Helicobacter pylori
atgagaaaaatctatgctaccggtaaaagaaaaaccgctatcgctaaagtgtggctcactccgggtaaaggcgaattgagtatcaatgagcagagcttgaatcaatggttgggcggacatgaagccattaaaatgaaagtcatgcagcccttgcttttaaccaaacaagagcaatctgtggatattaaagcggtggtttttggtgggggctactcagcgcaagcggaagccttaaggcatggcatttctaaggctttgaacgcttatgatattgcttttagagccattttaaaacctaaaggcttgctcactagggattcaagggtggttgaacgcaaaaaatatggtaaaagaaaggccagaagaagcccacaattctccaaaaggtaa

SEQ ID NO: 22433 - DNA, 426 bp, Helicobacter pylori
atgacaaagaccgctaaagtcaatgacatcgttcgtgattgggtcgttttagacgccaaagacaaggtttttggccgcttgatcactgaaatcgctgtgcttttaagagggaaacaccgccctttttacacccctaatgtggattgtggggattttgtggtggttatcaacgctaataaggttaaattttcaggcatgaaattagaggataaagagtattttacccattcaggctattttggcagcactaagagcaagactctccaagaaatgctagaaaaagcccctgaaaagctctaccacttagccgttaggggcatgctccctaaaacgaaattagggaaagcgatgattaaaaaactcaaagtttatcgtgatgataagcaccctcacaccgcacaaactagcaaaaaggacgctaaatga

SEQ ID NO: 22434 - DNA, 1353 bp, Helicobacter pylori
atgagtatggaatttgatgctgttattattggaggtggggtttcagggtgcgcgaccttttatactttgagcgaatacagctctttaaagcgcgtggctatcgtggaaaaatgctctaaattggctcaaatcagctccagcgctaaagctaattcgcaaaccattcatgatggctctattgaaacgaattacactcccgaaaaagctaaaaaagtgcgtttgagcgcttataagaccaggcaatacgctttgaataaaggcttgcaaaatgaagtgatttttgaaacccagaaaatggctataggcgtgggcgatgaagaatgcgagttcatgaaaaaacgctacgaatcttttaaagaaatctttgtggggttagaagaatttgacaagcaaaagattaaagaattagagcctaatgtgattttaggggctaatggcatagacaggcatgaaaacattatcgggcatgggtatagaaaggattggagcaccatgaattttgcgaagttgagtgaaaacttcgttgaagaagccctaaaattaaagcctaacaaccaggtgtttttgaatttcaaagtgaaaaagattgaaaaacgcaacgacacttacgccgtaatttcagaagacgctgaagaagtgtatgctaaattcgtgctggtcaatgccggctcttacgctttgcctttggctcagagcatgggctatggcctagatttagggtgcttgcctgtggcgggcagcttttattttgtgccggatttattaaggggtaaggtttataccgttcaaaaccccaaactcccttttgcagccgtgcatggcgaccctgatgccgtcattaaaggaaaaacacgaatcgggcctaccgctttaacgatgcctaaattagaacgcaacaaatgttggcttaagggcattagcttggaattgttgaaaatggatttgaataaagatgtgtttaaaattgcgtttgatttgatgagcgataaagaaatccgaaattatgtgtttaaaaacatggtttttgaattgcccattatcggtaaaaggaaatttttaaaagacgctcaaaaaatcatcccctctcttagcctagaagatctagaatacgctcatggttttggtgaagtgcgcccgcaagttttagacagaaccaagcgaaaactggaattaggcgaaaaaaagatttgcacccataaaggcatcacttttaacatgaccccttctccaggcgcgacgagttgtttgcaaaacgcccttgtggattcccaagaaatcgctgcgtatttgggcgagagctttgaattagaacgcttttataaagatttatccccagaagaattggaaaattaa

SEQ ID NO: 22435 - DNA, 2016 bp, Helicobacter pylori
atgaaaaagaaagctaacgaagaaaaagcccaaaaaagagctaaaacagaagccaaagcagaagccacacaagaaaataaaactaaagaaaacaataaagccaaagaaagcaaaattaaagaaagcaaaatcaaagaagctaaagcgaaagaacctattcctgttaaaaagcttagttttaatgaagcgttagaagaattgttcgctaattccttaagcgattgcgtttcttatgagtccatcattcaaatcagcgcgaaagtccccactctagcccaaatcaaaaaaatcaaagaattgtgccaaaaataccaaaagaaattagtcagctcttcagaatacgctaaaaaactcaatgcgattgacaagattaaaaaaaccgaagaaaagcaaaaagttttagatgaagaattagaagatggctatgactttttgaaagaaaaggattttttagagtggagcagaagcgatagcccagtgcgcatgtatttgcgcgaaatgggggatataaaacttttaagcaaagatgaagagattgaattgagcaagcaaatccgcttgggtgaagacattattttagacgcgatctgctcggtgccgtatttgattgattttatctatgcgtataaagacgctttaatcaatcgtgaaagaagggttaaagagcttttcaggagctttgatgatgacgatgaaaatagcgtgagcgattctaaaaaagatgaagacaacgaagaagatgaagaaaacgaagaaaggaaaaaagtcgtttctgaaaaagacaagaagcgtgtagaaaaggttcaagaaagctttaaagccctagacaaggctaaaaaagaatggcttaaagcccttgaagcccccatagatgaaagagaagacgaattggtgcgttcattgaccctagcttacaaacgccaaacactcaaagacagactctatgatttagaacctaccagcaaactgattaatgaattagtcaaaacgatggaaaccactttaaaaagcggcgatgggtttgaaaaagagttgaaacgcttggaatacaaactgcccttattcaatgacactctcatcgcaaaccataaaaaaatccttgccaatatcactaacatgactaaagaagatattatcgctcaagtgccagaagcgactatggtgagcgtgtatatggatcttaaaaagctttttttgactaaagaagcgagcgaagaaggctttgatctagcccccaacaagctaaaagaaattttagagcaaatcaaaagagggaagttgatttccgatcgcgctaaaaacaaaatggctaaatccaatttaaggttggtggtgagcatcgctaaacgattcacgagcagaggcttaccattcttggatttgattcaagagggcaatattggcttgatgaaagcggtggataagtttgagcatgaaaagggcttcaagttttctacctatgcgacctggtggatcaaacaagctatcagcagagccatagccgatcaggcccgcactatccgcatccccattcacatgattgatacgattaatcgcatcaataaagtcatgcgcaaacacattcaagaaaacggcaaagagcctgatttagaagtggtggctgaagaagtggggctttcgttagataaagtgaagaatgtgattaaggtgactaaagagcctatcagtttggaaaccccagtcggcaatgatgatgatggcaagtttggggatttcgtggaagataagaatatcgtcagctccattgatcacatcatgcgagaagatttgaaagcacaaattgaaagcgttttggatcagttgaatgagcgagaaaaagcggtgatccgcatgcgttttgggcttttagacgatgaaagcgatcgaactttagaagaaattggcaaggaattgaatgttactagagaaagggtgcgccagattgaaagctctgcgattaaaaaattgagaagcccgcagtacgggcgcattttaagaaactatttgcgcatttga

SEQ ID NO: 22436 - DNA, 696 bp, Helicobacter pylori
atggtgcaaaaaattggcattttaggggcgatgagagaagaaataacccctatactagaattgtttggcgtggattttgaagagatccctttaggggggaatgtcttccataaaggcgtttatcacaacaaggaaatcattgtcgcttatagcaagattggcaaggtgcattccactttaaccacaacgagcatgattttagcgtttggcgttcaaaaggtgctttttagcggggtggctggaagcttagttaaagatttaaaaatcaatgatttactagtggctattcaattagtccagcatgatgtggatttgagcgcgtttgatcaccctttagggttcatcccagaaagcgcgatttttattgaaacgagcgaaagtttgaacgctttggctaaagaagtcgctaatgaacagcatatcgtgctcaaagaaggcgtcatcgcatcaggcgatcagtttgtgcatagcaaagaaaggaaagagtttttagttagcgagtttaaagcgagcgcggtggaaatggagggggcgagcgtggcgtttgtgtgccaaaaatttggcgtgccatgctgtgtgttaaggagcattagcgataacgctgatgaggaagctaacatgagctttgatgcgtttttagaaaaaagcgctcaaacttcagcgaaattcttaaaaagcatggtggatgagctttag

SEQ ID NO: 22437 - DNA, 930 bp, Helicobacter pylori
atgcaatacgcgctattatttccagggcaaggctcgcaatgtgtaggaatggggaaatcattctatgagagccacactctagctaaagaattgtttgaaagggcttctaacgcacttaaagtggatatgaaaaaaacgctttttgaagaaaatgagcttttaaaagagagcgcttacacccagcctgccatttatttagtgagctatatcgcttaccaattgctcaacaagcaagtaaatggggggttaaaacccgtttttgctttagggcattcgctcggcgaagtgagcgcggtgtctttgagtggggcgttagattttgaaaaagcccttaaactcacgcaccaaagaggcaaaatgatgcaagaagcgtgcgcgaataaagacgcttccatgatggtcgttttgggcgtttctgaagaaagccttttgagtttgtgtcaaagaaccaaaaatgtgtggtgcgcgaatttcaatggcggcatgcaagtggttttagccgggattaaagacgatttgaaagccctagagccgactttaaaggaaatgggggctaaaagagtggtttttttagaaatgagcgtggcgagccattgcccttttttagagcctatgacttttaaattccaggaattgctagaaaaaagcctgaaagataaattccattttgaaatcatctccaatgcgactaatgaagcgtatcacaacaaagcaaaagccgttgaactattgagcttgcaactcactcagccggtgcgttatcaagactgcgtgaaatccaacaatgaccgagtggatgtcttttttgaattaggctgtgggagtgtgttaaaggggcttaacaagcgattaagcaacaaacccaccataagcgtgggggataataaagggcttgatgaagcgattgagtttttagaagaatacgtgtga

SEQ ID NO: 22438 - DNA, 1461 bp, Helicobacter pylori
atgccttttgtccccacccgttctttgaaagaaaaaaagattgattttattgaagcaatattaaaccccaacgccccaaaaggcgggctttacactttagagcgttttgaaacattacaatggcaagattgtttgaatctgagctataacgatctagtggaatgcgtgtttgagcggttgggtttagaaatccctaaaaatttactggcaagcgctttaaaacgctatgaaaattttgataaccctaaaaatccagcccctatttttgcgctcaatgaaaggctttttgtccaagaactctaccatgggcctagtttggcgtttaaagacatggcgttgcagcctttagcgagcttgttttctaatctagcggtaggaaaaaatgaaaagtatttaatgctcgtttccacgagtggtgataccggccctgcgactttagaaagtttggcaggcatgcctaatgtttttgtggtgtgtttataccccaaagacggcacaagtttggtccaaaaactccaaatggttacccaaagcgctagcaatttaaaagtctttgggatcagtggggattttgatgatgcgcaaaacgcgctcaaaaaccttttaaaagacgatgattttaacgaggctttaaaagcgtgccaattgaaattaagcgtggctaattccgtgaattttgggcgcatcgcttttcaaatcgtctatcatatttggggctttttggaattgtataaaaaaggcgcgatcaattctaaagaaaaaatcaccctagccatacctagcggtaattttgggaacgctttaggggcgttttatgccaaaaaaatgggtttgaatattgataaaatcaaggtcgtaaccaacagcaatgatgttttaagggagtttatagagacagggcgttacgatttaacccatcgttctttaaagcaaacttactcgccggctatggatattttaaaaagctctaatgtggaaagggcgctttttagcctttttgggtttgaacgcacgctagaattgatgcaagctttagaagaagagaaattttatgccttaaaacctaaagaattggcccttttacaggagcatttttcttgcgcgagctgctcagatgaagcttgtttgaaaacgatccaagaagtttatgcagagcaccaatacctgattgaccctcataccgccaccgctttaaacgctagcttgaaaacccacgaaaaaacccttgtttccgccaccgcctcttatgagaaattccctagaatcacccttttagccctaaacgagcaaaagaaaaacgataacgataaggccgccctagaaacgcttaaaaacagctacaataccccggatagccaacgccttgatgatttgtttgaaagagggatcaagcaccaagaagttttaaaactcaatgagatcaaatcttctattcttttgtggctagaaagcctacattaa

SEQ ID NO: 22439 - DNA, 1863 bp, Helicobacter pylori
atgggaaaagttattggaattgatttagggacaaccaactccgcaatggcggtttatgaaggcaatgaagcaaagattattgcgaataaagagggtaaaaacaccactccttctattgtggcttttacagataagggcgagattttagtgggcgagagcgccaaaagacaagcggtaaccaacccagaaaaaaccatttattctattaaaagaatcatgggtttgatgtttaatgaagataaggctaaagaagccgaaaagcgcttgccttataagattgtggataggaatggggcttgcgcgattgagatttcgggtaaagtttatacccctcaagagatttcagccaaaattttaatgaagctcaaagaagacgctgaaagttatttgggcgagagcgttacggaagcggtgatcacggttccagcttattttaacgacagccaaaggaaagcgactaaagaagccggcacgattgcagggcttaatgttttaaggatcatcaatgagcctacaagtgcggcattagcttatggcttggataaaaaagagagcgaaaaaatcatggtttatgatttgggtggggggacttttgatgttaccgttttagaaacaggcgataatgtcgtggaagttttagccacagggggcgatgcgtttttagggggcgatgattttgacaatcgtgtgattgatttcttagcgagtgagtttaaaagcgaaacgggcattgaaattaaaaacgatgtgatggcgttgcaacgcctaaaagaagcggctgaaaacgctaaaaaagaactgagctctgcgatggagactgaaatcaatttgccctttatcaccgcggacgctaccgggcctaaacacttggttaaaaaactcactagggctaaatttgaaagcttgacagaagatctcatgaaagaaacgatttctaaaattgaaagcgtgatcaaagatgcggggctaaccaaaaatgagatttcagaagtggtgatggtgggaggctctactcgtatccctaaagtccaagaaagggtgaaagcgtttattaataaagatttgaataaaagcgtcaatcctgatgaggtcgtagcggtgggagcgagcattcaagggggcgtgttgaaaggcgatgtgaaagatgtgcttttattagacgttacgcctttaagccttgggattgaaactttagggggcgtgatgactaaagtgattgatagaggcacgactattccggcgaaaaaatctcaagtgttctcaaccgctgaagacaaccagcccgctgtgtccattatggttttacaaggcgagagagaattggcaagggataataaatctttgggtaaatttgatttgcaaggcatcgctccagctccaagaggcgtgccgcaaattgaagtaacctttgatattgacgctaacgggattttaaccgtttcagcgcaagataaaaataccggcaaaagccaagagattaaaatttctggttctagcgggttgtctgatagcgaaattgaaaaaatggtgaaagacgctgaattgcacaaagaagaagacgctaagaaaaaagaagtgattgaagcgagaaaccatgccgatagtttggcgcaccaaacccaaaagagccttgatgagcataaaacgaatttgaatgaaaacgacgctaacgagatccaaaacgccattaacgctcttaaagattgcgtcaaaaacgataacgctactaaagcggagcttgaagacaaaacgaaattattagcgcaagcggctcaaaaattaggcgaagccatggcgaataaaaacaacgccgagcagcccaagaaaaaagacgacgatgtgattgatgcggaagtggagtga

SEQ ID NO: 22440 - DNA, 2211 bp, Helicobacter pylori
atgaagcaccttattatcgtagaatcccccgcaaaagccaaaaccattaaaaattttttggataaaaattatgaagtcattgcctctaaagggcatgttagggatttatccaaattcgctttaggcattaagattgatgaaaccggcttcactcctaattatgtcgtggataaagaccataaagagcttgtcaaacagatcatagagctttctaaaaaggcatctattacttatatcgctaccgatgaagacagagagggggaagcgataggctatcatgtggcatgtttgattggggggaaattggagagctatcctaggattgtttttcatgagatcacgcaaaatgcgatcttaaacgctctaaaaaccccacgaaaaattgacatgtctaaggtcaacgcccaacaagccagacgctttttagatcgaatcgtgggttttaaactcagctcgttgattgcatcaaaaatcactaaaggtttgagcgctggacgggtgcaaagcgcggctttaaagcttgtgattgataaagagagggagatcaaagcctttaagcctttaacctacttcacgctagacgcttattttgagtcgcatttagaagcgcaactcattagctataagggcaacaaactcaaagcccaagaactcattgatgaaaaaaaagctcaagagattaaaaacgaattagaaaaagaaagctacgctatctccagtatcgttaaaaaatctaaaaaatcccccacgccgccccctttcatgacttctactttacagcaaagcgcttctagtcttttaggcttttcgcccacaaaaaccatgagtatcgctcaaaaattgtatgagggcgtagccaccccacaaggggttatgggggtgatcacttacatgaggaccgatagcttgaatatcgctaaagaggctttagaagaagcgaggaataagattttaaaagactatggcaaagactatttaccccctaaagccaaagtctattccagcaagaataaaaacgcccaagaagcccatgaagcgatcaggcccacttctattattttagagccaaacgctttaaaagactaccttaagcctgaagaattaaggctctataccttaatttacaaacgctttttagcttctcaaatgcaagacgctctttttgaaagccaaagcgtggttgtggcttgcgaaaaaggcgagtttaaagcgagtgggagaaagctcctttttgatggctattataaaattttaggcaatgacgataaggacaaattgctccccaatttgaaagaaaatgaccccattaaattagaaaaactagagagcaacgcccatgttacagaacctccagcacgctattctgaagcgagcttgattaaagttttagaaagtttaggcataggcaggcccagcacctacgccccaacgatttcccttttacaaaacagagactacatcaaggtagaaaaaaagcaaatcagtgctttagagagcgcttttaaggtgatagaaattttagaaaagcattttgaagaaatcgtggattccaaattcagcgcttctttagaagaagaattggacaatatcgctcaaaataaagccgactaccagcaagtcttaaaggacttttactacccctttatggataaaattgaagctgggaaaaagaatatcatctctcaaaaagtgcatgaaaaaaccggtcaatcatgccctaaatgcggtggggaattagtcaaaaaaaatagccgttatggggagtttatcgcttgcaacaattaccctaaatgcaaatatgtcaaacaaactgaaagcgctaatgatgaagccgatcaagaattgtgcgaaaaatgcggaggggaaatggtgcaaaaattcagcagaaacggggcgtttttagcttgcaacaattaccctgaatgcaaaaacaccaaatcgttaaaaaacacccctaacgcaaaagaaacaatagaaggcgtgaaatgcccagaatgcggaggggatattgctttaaaaaggagtaagaaaggctcgttttatggctgtaacaattaccctaaatgcaattttttatccaaccataagcccatcaacaagcgttgcgagaaatgccattatttaatgagtgaaagaatctatcgcaaaaaaaaggcgcatgaatgcattaaatgtaaagaacgcgtgtttttagaggaagataatggctaa

SEQ ID NO: 22441 - DNA, 2439 bp, Helicobacter pylori
gtgcgatatatcaagtttttcaaagagttgaacaataaaaatgtgaatctggttgggggcaagaacgctagtattggtgaaatgtttcaagaattagtgcctattggtattaaagtgcctgatggctttgcgatcaccagcgaagcgtattggtatcttttagagcaaggaggggctaaacaaaaaatcatagagcttttagaaaatgttgatgccaccgaaattgatgtgttaaaaatccgctccaaacaaatcagagagcttatttttggcacgccttttcctagcgatttgagagatgagatttttcaagcttatgagattttaagccagcaataccacatgaaagaagccgatgtggctgtaaggagttccgctactgcagaagatttgccggacgcttcttttgccgggcagcaagacacttatttaaacattaagggtaaaaccgaattgatccactatatcaaatcctgtttagcgtcgctttttaccgatagagcgattagctatagggcgagtcgtgggtttgatcatttaaaagtcgcgctcagcgtgggggtgcaaaaaatggtgcgagcggataaaggcagcgcgggcgtgatgttttctattgacaccgaaaccggttttaaagacgcggtgtttatcacttcagcgtgggggttaggcgaaaatgtggtgggtggcacgataaaccctgatgaattttatgtgtttaagcccactttagagcaaaacaaacgccccattatcaaacgccaactcggcaataaaacgcaaaaaatggtctatgccccaaggggtagcgaacaccccaccagaaacattaaaaccaccaaaaaagaatggcaatccttttcattgagcgatgaagacgtgctgattttagccaaatacgccattgaaattgaaaaacactactctaaagaagccaaacaataccgccctatggatatagaatgggctaaagatggcgagagcggggaaatctttatcgttcaagcgcgcccagaaaccgttcaaagccaaaaaagtaaagaagaaagtcaagtctttgaaaaattcaaattcaaaaaccctaacgaaaagaaagagattatcttacaaggcagagcgattgggagtaaaattggctcaggaaaagtgcgcatcatcaatgatttggagcacatgaattcttttaaagagggcgaaattttagttacggataacaccgatccggactgggagccttgcatgaaaaaagcgagcgcggttatcactaatcgtggagggcgcacttgccatgccgctattgtggcgagagaaattggcgtgccagctatcgttggggtgagcggggcgactgatagcctttataccggcatggaaatcacggtttcttgcgctgagggcgaagagggctatgtgtatgcgggcatttatgagcatgaaattgaaagggtggagctttctaacatgcaagaaactcaaacaaaaatttacatcaatattggaaaccctgaaaaagcctttggcttttctcaactccctaatcacggcgtagggctagccaggatggaaatgattattttaaatcaaatcaaagcccaccctttagctttagtggatttgcaccacaaaaaaagcgtgaaagaaaaaaatgaaattgaaaacctcatggcaggctatgctaaccctaaagatttttttgtgaaaaaaatcgctgaaggcattggcatgatcagtgcagcgttttaccctaaacctgtcattgtgagaacgagcgatttcaaatccaatgaatacatgcgcatgcttggcggctctagctatgagcctaatgaagaaaaccccatgcttggctataggggggctagtcggtattattcagagagctataatgaagcgttttcgtgggagtgtgaagccttagcgttagtgagggaagaaatgggattaaccaacatgaaagtgatgatcccttttttgcgaaccattgaagagggtaaaaaagtcctagaaatcttaagaaaaaacaatttagaatccggtaaaaacgggcttgaaatttatatcatgtgcgaattgccggtgaatgtcattttggctgatgatttcttgagcttgtttgatggcttttctattggatcaaacgatttaacccagctcactttaggcgtggatagagacagcgaattggtcagccatgtctttgatgaaaggaatgaagcgatgctaaagatgtttaaaaaagcgattgaagcttgcaaaaggcacaacaaatattgcgggatttgcgggcaagccccaagcgattaccctgaagtaacagagtttttagtcaaagagggcatcacttccatttctttaaaccctgatagcgtgatccccacttggaacgctgtagccaagttagaaaaagaactaaaagaacatggcttaactgaacattga

SEQ ID NO: 22442 - DNA, 1839 bp, Helicobacter pylori
atgagtgcggaactgattgctgtttataaagacgagcaaataatagatttagagagcgcgaaagtcttagggctgagcgatgggattaaagcgttaaacgggacagagccgatatattttgatgattcgcctttggctttagaggtgattaggcattcatgcgcgcatttgcttgcgcaaagcttgaaagccctttatccggacgcgaaattttttgtaggccctgtggtagaagaggggttttattacgatttcaagacttcttcaaaaatcagcgaagaggatttgcctaaaattgaagcgaaaatgaaagagtttgcgaagttgaaactcgctatcactaaagagactttaaccagagagcaagctttggagcgttttaagggcgatgaattaaagcatgcggtgatgagtaaaatcggtggcgatgcctttggcgtgtatcaacaaggcgagtttgaagatttgtgtaaggggccgcatctcccaaacacccgttttttaaaccattttaagctcactaaactggctggggcttatttgggcggcgatgaaaacaatgaaatgctcattagaatctatggaatcgcttttgccaccaaagagggtttaaaagactatcttttccaaatagaagaagcgaaaaaacgagatcacagaaagctaggcgtggagctagggctttttagctttgatgatgagataggggcgggcttacctttatggctgcctaaaggggcaaggcttaggaagcgcattgaagatttattgagtcaagcgttacttttaagaggctatgagccggttaaaggtcctgagattttaaagagcgatgtgtggaaaatcagcgggcattatgacaactataaagaaaacatgtatttcaccacgattgatgagcaagaatatggcataaagcctatgaactgcgtggggcatattaaagtctatcaaagcgctttgcacagctacagagatttgcccttaaggttttatgaatacggcgtggtgcatcggcatgaaaaaagcggcgtgttgcatgggcttttaagggttagggaatttacccaagatgatgcacatattttttgctcttttgaacagatccaaagcgaagtgagcgcgattttagattttacgcacaaaatcatgcaagcgtttgattttagctatgaaatggaattatccacaaggccggctaaatccataggcgatgataaagtttgggaaaaggccactaacgctttaaaagaagccttaaaagaacaccgcattgattacaagattgatgaagggggaggggctttctatgggcctaagattgacattaaaatcactgacgctttaaagcgtaaatggcagtgtggcacgattcaagtggatatgaatttgcctgaacgcttcaagctcgctttcactaatgagtataatcacgctgagcagccggtgatgatccacagagcgattttaggctcgtttgaaaggtttattgcgattttgagcgaacattttggggggaatttccctttctttgtcgcgcccactcaaatcgctctcatccctattaatgaagagcatcatgtttttgctttgaaattaaaagaggcgctaaaaaagcgcgatatttttgtagaagtgttagataaaaacgacagcttgaataaaaaggtgcgattagccgaaaagcaaaaaatccctatgattttagtgttagggaatgaagaagtggagaccgaaattttatccattagagacagagaaaaacaagatcaatataaaatgcccttaaaggagtttttaaacatggttgaatctaagatgcaagaggttagtttttga

SEQ ID NO: 22443 - DNA, 612 bp, Helicobacter pylori
ttgagtagaaacgaagtgttgttaaacggagacattaattttaaagaagtgcgttgtgtgggcgataatggcgaagtgtatggaatcatttcttccaaagaagcgctccatatcgctcaaaatttaggtttggatttggttttgatttcagcgagcgcgaaaccgcccgtgtgtaaggtgatggattataataaattccgctaccaaaatgaaaagaaaatcaaggaagccaagaaaaagcaaaagcaaattgaaatcaaagagatcaagctttccactcaaatcgcgcaaaacgatattaactacaaagtcaagcatgcgagagaatttattgaatccaacaagcatgtcaaattcaaagtggttttaaagggtagggagagtcaaaactcaaaagccgggcttgatgtgctttttagagtccaaacgatgatgcaagatttagccaatcctgaaaaagagccaaaaactgaggggcgttttgtttcgtggatgtttgtgcctaaggctaaagaagcccccaaaaacgaaaagaaaaccaaagaaaataacccgccttttaatcgtattaaccttatgaaaggagaaaatcatgccaaaaatgaagactaa

SEQ ID NO: 22444 - DNA, 195 bp, Helicobacter pylori
atgccaaaaatgaagactaatcgcggcgcgtctaagcgtttcaaagttaaaaaaaacttgattaagcgtggcagtgcttttaaaagccatattttgactaaaaaaagccctaagcgcaaagccaatctaaacgcgccaaaacatgtgcatcacactaacgcgcattctgtcatgtcgttgctttgcagggcttaa

SEQ ID NO: 22445 - DNA, 351 bp, Helicobacter pylori
atgagagttaaaacaggcgttgtgcgcagaagacgccataaaaaagtcttaaaactcgctagagggttttatagtggcagaagaaagcattttagaaaggctaaagaacagcttgaaagaagcatgtattacgcctttagggatcgcaaacaaaagaaaagagagttcaggagtttgtgggtggtaaggattaatgcggcttgcagaatgcacaatacaagttattcgcgcttcatgcatgccctaaaagtggctaacattgaattagaccgcaaggttttagcagacatggcgatgaatgacatgcaagcttttacaagcgtgttagagagcgtgaaagagcatctttaa

SEQ ID NO: 22446 - DNA, 1368 bp, Helicobacter pylori
atggctagtttttctattttatctatttttaaaatcggcgtggggcctagctcttcacacactatagggcctatggaagcgggagcgagattttgcgagtcgttaaaaggcattttagagcaggttgtgcgcgttcaaatcaccttgcatggctcattagctttaaccggtaaagggcatttgagcgatgaggcggttttaattggcttgcatggcatttacgctaacgaattagaggtaacaaccaaaaaagccttattgcatgaagcgcttgagaataaagttttaaaactcgctaaccagcatcatatcccttttgattatgctaaagatttgatttttgacaacaagcctttaacaagacaccaaaacgccctcattctaaaagcttttaactctaaaaatgaggttttaaaagaagagacttactattctgttggtggagggtttgtctatactgaaaaagaattagacaacttgtctgaagaggatgggaatgaaagtattgcctatgatttttcaagcgctaaggagttgctagaattgtgccaaaaacaccaaaaaagcatcgctgaaatcgtgcgtttgagagaaaacgccctgaaaaaccaccctgatgcaacgatggttaaaatttatcatgcgatgcttgagtgttatgataatggggctaattctaaagaaaggtatctgcctggttctttgaaagtaacacgattggccccaagcattaaaacgcgcctagaaaaacaccccacaagcgggaaagaccccttagccttgattgattacatttcgctttacgctcgcgccattgctgaagaaaacgctagcggaggcaaggtggtaaccgcccccactaatggggcgtgcgcggtggtgccaagcgtgcttttatacgctaaaaaccatttgtttgaaaatttatcgcaaaaggctatcaatgattttttactcactagtgcggcgattggctatctttacaagaaaaacgcttccttgagtggcgcagaagccgggtgtcaggctgaaattggcgtggcaagctctatggctgcgggggggttagctcatttgtgccaagcgaccacgcaacaggttttgatcgctagtgaaatcgctatggaacaccatttaggattgacatgcgatccggtggggggcttggtgcaaatcccttgcattgaacgcaatgttttaggggcgattaaagcgatcagcgcttctaaactagccttagaagatgaatacaagcctaaagtgagtctggatgaagtgatcgctacaatgtatgcgaccggaaaagacatgaatgaaaaatacaaagagacttcgttaggggggttagccaaaaccttaaaatgctaa

SEQ ID NO: 22447 - DNA, 1242 bp, Helicobacter pylori
atggcacaagaaaaagcagttccaagagatcctaaaaaactcaatgcgtttgatttgcgttggatggtgtccttatttggcacggcggtgggggctgggattttatttttgcctattagagccggtgggcatggggtatgggctattgtggtaatgagcgcgatcattttccctttaacttatctagggcatagagctttagcttatttcataggatctaaagacaaagaagacattaccatggtcgttcgctctcattttggcgctcaatggggttttcttatcactttgctttatttcttagcgatttatcctatttgcttggtttatggggtgggtatcactaacgtgtttgatcattttttcactaaccagttgcatttagcgccttttcatcggggattattggctgtagcgttagtttctttaatgatgttggtgatggtttttaacgctacgattgttacgcgcatttgtaacgctttagtgtatcctttatgcttgattttattgcttttttctttgtatcttatcccttattggcaaggcgctaatctttttgtggtgccgagttttaaagaatttgtgttagcgatttggctaaccttaccggtgcttgtgtttgcattcgaccatagccccatcatttcaaccttcactcaaaatgtgggaaaagaatacggcgttttcaaagaatacaaactcaatcaaattgaattagggacatcgctgatgcttttagggtttgtgatgttttttgtgttttcgtgcgtcatgtgcttgaatgctgatgattttgtgaaagcaagggaacaaaatatccccattttaagctatttggctaacactttaaacaaccctttaatcaattatgcggggcctgtggtggcttttttagcgattttttcatctttttttgggcattattatggggctaaggagggtttagaaggcattattattcaaagcttaaaattgaaaaaagcttctaaacccttgagcgttagcgtaacgatttttttatggctgactatcacgcttgtggcttatattaaccccaatatcttggattttattgaaaatttaggcggccccattatcgcgctcattctgtttgtgatgcccatgatagctttttatagtgtttctagtttgaagcgttttagaaatttcaaagtggatatttttgtgtttgtctttgggagcttgacggctttgagcgtgtttttaggactattttaa

SEQ ID NO: 22448 - DNA, 729 bp, Helicobacter pylori
ttgaaagtcaatttctttgctacttgtctaggagcagccatatacagcaacgcatcgcttaacgctatcaaattactccgtaaggaaaatttggaagtggtttttaaaaaagaccagacatgttgcggccagccaagctacaactcaggatactatgaagagacaaaaaaagtcgttttatacaatatcaaactttattccaataacgactaccctattattttgcctagcggttcatgcacagggatgatgcggcatgattatttggaattgtttgaagggcatgcggaattcaacatggttaaagatttttgctctagggtgtatgaattgagcgaatttttggataaaaaattgcaagtcaaatatgaagataagggcgaaccccttaaaatcacatggcattctaattgccatgccttaagggtggctaaagtgattgactcggcgaaaaacctcatcagacagcttaaaaatgtggaactcattgaattggaaaaagaagaagaatgctgcgggtttggggggactttttcggttaaagagcctgaaatttcagcggttatggttaaagaaaagattaaaaacatagaaagccgtcaagtggatgtgattgtttcagcggatgctgggtgtttgatgaatatcagcaccgctatgcaaaaaatgggctctttgacaaaacccatgcatttttatgactttttagcctcaagacttgggctttaa

SEQ ID NO: 22449 - DNA, 1467 bp, Helicobacter pylori
atgcaagaaaatgtgcctttgagttatgattattccattagcaaattgtttctttatgcgatggttggctttgggatagtgggcatgttaatagggatcgtgttagcctttgaattgtctttccctaacttgaattacattgcaggggagtatggtatttttggccgcttgcgccctttacacacgaatgcggtgatctatggtttcactcttggggggatttgggcgagttggtattatatcggtcaaagggtgcttaaaatcacttaccaccaacacccctttttgaaaattgtagggttattgcatttttggctctggattattcttttaattctaggggtcattagcttgtttgctggtcttactcaatctaaagaatacgctgaattgatgtggcctttagatattattgtggttgtggcatgggtgctatggggggttaatatgtttgggagcatgagcgttaggagagagaataccatttatgtgtctttatggtattacatcgctacttatgtgggtatagcggtgatgtatatattcaataacctttctgtccctacttattttgtcgctgatatggggagtgtttggcattctatttccatgtattcaggcagtaatgatgcgctcattcaatggtggtgggggcataatgcggtcgcttttgtctttacgagtggggtgattggcacgatttattatttcttgcctaaagagagcggccaacctatattctcttacaaactcactttgttttctttctggagcttgatgtttgtttatatttgggcaggcgggcaccatttgatttattccaccgtgcctgattgggtgcaaaccctttctagcgtgttttcagtggtgttgatcttgccttcgtgggggacagccattaacatgcttttaacgatgaggggccagtggcaccagctcaaagaaagccctttgatcaaattcttagttttagcttcaactttctacatgctttccactttagaaggctctattcaagccattaagagcgtgaacgccttagcgcacttcaccgattggattatagggcatgtgcatgacggcgtgcttgggtgggtaggcttcactttgattgcgagcatgtatcacatgacgcctaggcttttcaaaagagagatttattcaggcaggcttgtggatttccaattctggatcatgactttaggaattgtgctttacttttcgtccatgtggattgcagggatcacgcaagggatgatgtggagggatgtggatcagtatgggaatctcacttaccagttcattgacacggttaaggtgctaatcccttattacaatattagaggcgttgggggtcttatgtattttattggatttattatttttgcctacaatatttttatgaccatcacagcaggcaaaaaattagagcgtgagcccaattacgccacgcctatgtctagatag

SEQ ID NO: 22450 - DNA, 1044 bp, Helicobacter pylori
atggcaatagatgaagacaaacaaaaagcgatttctttagcgatcaaacaaattgataaggtttttggtaagggggcgttggtgcgccttggggataagcaagtagaaaagattgactctatttctacaggctcgttagggttggatctggctttagggattgggggcgttccaaagggtaggatcattgaaatttatgggccagagtcaagtgggaagaccactctaagcttgcatattattgcagaatgccaaaaaaatggcggcgtgtgcgcgttcattgacgctgagcatgccctagatgtgcattacgctaagagattgggcgtggatacggaaaatctactcgtttcccaacctgatacaggcgagcaagctttagagattttagaaacgatcaccagaagcggagggattgatttagtggtggtggattctgtggcggctcttacgcctaaagcggagattgatggggatatgggcgatcagcatgtgggcttgcaagcaaggcttatgagccatgcgttaagaaaaatcaccggtgtcttgcacaagatgaacactactctcatttttatcaatcaaatcaggatgaagattggcatgatgggttatgggagtccagagaccacaaccggaggtaacgccttaaaattctatgcgagcgttaggattgatattagaaggattgcctccctcaaacaaaacgaacagcatatcggtaatagggctaaagccaaagtggttaaaaataaagtcgctccgccttttagagaagcggaatttgacatcatgtttggggaagggatttctaaagagggcgaaatcattgattacggtgtgaaattagacattgtggataagagtggggcatggcttagctaccaggataaaaagctagggcaaggcagagaaaacgctaaagccttactgaaagaagacaaagccctagcggatgaaatcactcttaagattaaagagagtattggctctaatgaagagatcatgcccttaccggatgagcctttagaagaaatggaataa

SEQ ID NO: 22451 - DNA, 1281 bp, Helicobacter pylori
atgctaaccattaaagatattcatgctttagaagtgatggatagtaggggcaatcctaccattcaagccagcgtggttttgagcgataacactaaggcgagcgcgattgtgcctagcggggcgagcaccggtaaaagagaagcgttagaattaagggataatgacaaaacccgttttttgggtaaaggggttttaagggcatgcgaaaatgtcaatagcgtgatcaaacaccatttaatagggcttgaagcgatcaatcaagcttttgtagatgagaggttaagggctttagacggcacgcctaattacgctaatttaggggcgaacgctgttttgggcgtttctatggcgttagcaagggctagcgcaaaggctttaaatctgccattataccgctatttagggggggctaacgctctgactttgcctgtgccgatgctcaatatcatcaacggcggaacgcatgcgaataattccatagactttcaagaatacatgatcatgcctttagggtttgaaagttttaaagaagctttaagagcgagcgcagaagtctatcacacgcttaaaaaacttttagatgggaagaatcagctcacaagcgtgggcgatgaggggggctttgcgcctaattttagcaacaatgtagaaccccttgaagtcatttctcaagccattgaaaaagccggctataaattaggcgaagaaatagcgctcgctttagatgtagcgagcagcgaattggtggatgaaaatttcaattaccatttaaagggtgaaaataagattctagattcgcatgaattggtggcttattataaagagttggtggcaaaatacccgattgtatccattgaagatggtttgagcgaagacgattgggagggttgggcgtttttaagcaaggaattagggcgtcagatccagttagtgggcgatgatttgtttgtaacgaacgcaagtctcttgcaaaaaggcattgaaaaaaatattgcgaacgccgttttgatcaaacccaatcaaatcggcaccattagtgagactttggagaccataagattagccaaacaccatgcctatcaatgcgtgatgagccatagaagcggggagagtgaggacagctttatcgctgattttgcagtcgcattgaatacgggagagattaaaaccggatccaccgcaaggagtgaaaggatcgctaaatacaaccgccttttagagattgagcatgaattaaaaggggggatttatatcggtaaagagttgtttaagcatggctag

SEQ ID NO: 22452 - DNA, 972 bp, Helicobacter pylori
atgttcaaacgattgagaagattacgaagcagcgaaaacttaagggcaatgctaagagaaacgcgtctaaatattgatgatttcatcgctcccttatttgtcatagaaagcgatagttgtattaaaaatgaaatcagttccatgcctggcgtttatcaaatgagcatggagcctcttttaaaagaatgcgaagaattagtgggtttaggcgtcaaagccgttttattgtttggcattcctaaacataaggacgctacaggaagccatgcgttaaacaaggatcatattgtcgcaaaagccgccaaagagattaaaaaacgattcaaggatttaatcgttatagcggatttgtgtttttgtgaatacaccgaccatgggcattgcgggattttagaaaacgcttctgtgtctaacgataaaacgctagagattttaaatcttcaagggcttattttagctgaaagcggtgtggatattctagccccaagcaacatgatggatggcaatgttttaagcttgaggaaaacgctagataacgccggctatacccacacgcccatcatgagctattccactaaatttgcgagcagttactatgggccttttagagatgtagccaattctgcgccgagttttggcgatcgcaaaagctatcaaatggattacgctaatcaaaaagaagcgcttttagaaagtttagaagatgagaaacagggcgcggatattttaatggtgaaaccggctttggcgtatttggatattgttaaagaaattagagatcacactttgctccctttagcgctctataatgtgagcggggaatacgccatgctcaaactcgctcaaaaacacaacctgatcaactatgaaagcgttttattggaaacgatgacttgttttaaaagagcgggagcggatatgattattagctatcatgctaaagaagtggctaacttattacaaaggaattga

SEQ ID NO: 22453 - DNA, 1269 bp, Helicobacter pylori
ttgaaccaagttgaattactctctccagctggtaatttaaaaaaacttaaaatcgccctcaactatggggctgatgcggtttatgggggagtgagccatttttctttacgcaatcgtgcaggcaaggaatttactttagaaactttcaaagaagggattgactacgcccatgcgctaaataaaaaagtctatgccacgatcaatggtttccctttcaattcacagctcaaacttttagaagaacatattgataaaatggcagaattagagccggacgcttttattatcgctgcgcctggtgtggtgaaactcgctttaaaaatcgccccgcatatccctatccatttatccacgcaagcgaatgtcttaaatttgctagatgcacaagtgttttatgatttaggggttaaacgcatcgtgtgcgcgagggaattgagcctgaatgatgcgattgagattaaaaaagccttacctaatttagaattagaaatctttgtgcatgggagcatgtgctttgccttttcagggcgctgcttgatttcggccttacaaaaggggcgcgtgcctaatagagggagttgcgcgaatgattgccggtttgattatgaatattacgtgaaaaaccctgataatggcgtgatgatgagactggttgaagaagagggcgtaggcacgcatatttttaacgctaaggatttgaacctctctggccatatcgctgaaattttaagttccaacgccattagcgcgcttaagattgaagggcgcaccaagtccagttactacgccgcgcaaaccacgcgcatctatcgtttagcggttgatgatttttaccataacaccttaaagccgagtttttatgccagcgaattgaacacgcttaaaaacaggggttttacggacggctatttgatgcgaaggccttttgaaaggttggatactcaaaaccaccaaacagccattagcgaaggggattttcaagtcaatggcgaaataaccgaagacgggcgtttttttgcatgcaaattcaccactaccactaacaccgcttatgaaatcatcgctcccaaaaatgcggctatcacgcccatagtcaatgaaattggcaagatttacacctttgaaaaacgctcttatttagtgctgtataaaatccttttagaaaataacaccgagctagaaactatccatagcgggaacgtgaatttagtgcgactgcccgcacccttaccggcttttagttttttacgcacccaagtcagagtctaa

SEQ ID NO: 22454 - DNA, 1092 bp, Helicobacter pylori
gtggataactacacctatagcgaattgttaaaaagcttgcaaaacaaatgcgataatatcgctttaatcatcaagcctgaaaagatcaaacaagaattagaacgcattgaaaaagagcaagaagatcctaatttttggcaagatgtcttaaaggctagagacaccaataaagaaaaagtgcgcttgaaccgcttgctagaaacctatcaaaaaaccaaaaattctttagatgaaagcgtagaattgtttgaactcgctcaaaacgataacgatgaggttactttatccttgctctatgaagaggctcccattttagagaacagcgtccaaaaagtagaaattgaaatcatgttaagcggtgaaaacgatgcctcaaacgctattatcaccattcagcctggagcgggggggactgaaagccaggattgggcgagtattttgtatcgcatgtatttgagatgggcggaaagaaggggctttaaaagcgagattttagactatcaagatggcgaagaagcgggcattaaaggggtcgcctttatcattaagggcgaaaacgcttatggctatttgaaaaacgaaaacggggtgcataggcttgtaaggatttcgccctttgatgcgaacgccaaacggcacacaagttttgcgagcgtgcaaattagccctgaattagacgatgacattgatatagaaattgatgaaaaagatgtccgttacgattattatagatccagtggggcaggcggtcagcatgtcaataaaacagaaagcgcggttaggatcacgcattttcctaccggtattgtggtgcaatgccaaaacgacaggagccagcataaaaacaaagcgagcgcgttaaaaatgcttaaatccaagctttatgaattggaattagaaaagcagcaaagcagcgccaaaaatgaagaaaaaagcgagatcggctgggggcatcaaataagaagttatgtcctagccccctaccaacaagtcaaagacgcgcgctccaataccgcttatagcaatgtggaagcgatactagatggcgatattgatgcaattttagagggcgttttgattgctaaagcttaa

SEQ ID NO: 22455 - DNA, 1176 bp, Helicobacter pylori
atgattagttttaaagaagctctaaaaatccattctagcattcccataaaacccttagaaatagaggttatctctttgtttgaaagcatagggcgtattttagcagaggatattatttgtattcacgccttgcctaaattcaatcaaagcgcaatggatggctatgggtttaaaatgcaggatttaggcaaaaaaactcaagtcgttcagcgcatctttgccggggatgatgtgagcgctttagaagttaaagagaatgaatgcgttaaaatcatgactggagcgatggtgccaaagggaatagaaacgattgtccctatagaatgcatgctagaaagccatacaaatttcgctctagctcccaaagattttaaaataaacgccaatatccgtcaaaagggcgaaaacgcttctttaaacagcgtgttagtccctaaaaatacccgtttgaattacgggcatatcgcgctcattgcctctcaagggttaaaagaaatcaaagcgttcaggaaattaaaaatcgctttatttagcagcggcgatgaattagtgcctttagggcaaaacgccctagaatgccaagtttatgatgtgaattcagtgggtattttcaacatgcttaaaaactacaacacgcattttctaggggttttaaaagacgataaaaatttacagcttaaaatacttgaatcacaagactatgatgtcatcctttcaagcgcaggggtgagtgtgggggataaagacttttttaaagacgctttgaaagaaaaaaacgcccttttttattatgaaaaagtcaatctcaaacctggaaaaccggtaactttagcccgactcaatcaaagtatgattataggcttaccgggtaatcctttaagttgcttattggttttacgggttttgattttacccttattggagcgcttatccttgaataaagattttaaactaaaaccctttaaggctcaaatcaatgcccctttaaagcttaaaggcgaacgtgcgcatttaattttaggcaactattcaaaccaccaattcattccttacaacaacaaccgctatgactcaggagcgattcaagcccttgcgcgagtggattctatcgctttgattgatgaaggagttagattagttcagggcgaaattgaaattttaaggtttgaaaattaa

SEQ ID NO: 22456 - DNA, 924 bp, Helicobacter pylori
atgttagttaaaggcaatgaaattttattgaaagcccataaagaaggttatggggtgggggcgtttaatttcgtgaattttgaaatgctaaacgctatttttgaagcaggaaatgaggaaaattccccgcttttcattcaaacgagtgagggagcgatcaaatacatggggattgatatggcggtaggcatggtgaaaaccatgtgcgaacgctacccgcacattcctgtagccttacacctagatcatggcacgacttttgaaagctgtgaaaaagccgtgaaagcgggtttcacttctgtgatgattgatgcgtctcatcatgcttttgaagaaaatttggaattgacttctaaagtggtcaaaatggcgcataacgctggggtgagcgtggaagcggagctggggcgtttgatggggattgaagacaatatttcagtagatgaaaaagacgcggtgttagtgaatcctaaagaagcggagcagtttgtcaaagaatctcaagtggattacttagccccagctattgggacaagccacggagcgtttaaatttaagggcgagccaaaattggattttgaacgcttgcaagaagtcaaaaggctcactaatatccctttagttttgcatggagcgagcgcgataccagataatgtgagaaaatcttatttggacgctggaggcgatttgaaaggctctaagggcgtgccttttgaatttttacaagaatccgtgaaaggggggatcaataaggtcaatactgacacggatttaaggatcgctttcatcgcagaagtgcgcaaggtggccaatgaagataagagccaatttgatttgaggaagtttttttctccggcccaattagcgcttaaaaatgtggtcaaagagcgcatgaaacttttgggcagcgctaataaaatttaa

SEQ ID NO: 22457 - DNA, 1278 bp, Helicobacter pylori
atgcgtcttcttctgttcaatcaaaacgcttttttattagcgtgcatgtttgtttcaagcgtgtatgtgaacgctgtcttagacgcttatgcaattgaaaacccctatatttctatcacactcacaagcctattagcccctttaagcatgctagcgtttttaaaaacccctagaaatagtgcttttgctttggggttttttgtgggggcgttattgttttattggtgcgctttaagctttcgctactcggatttcacttatttattgcccttaatcattgttttaatagcgttagtttatggggttttattttatttgttgctctattttgaaaacccctatttcaggcttttgagttttttaggctctagttttatccacccctttggatttgattggttagtcccagatagctttttttcttatagcgtgtttagagtggataaattatcgctagggcttgtttttttggcttgcatttttttgagcactaaaccattgaaaaaatataggatcataggggttttattgttacttggcgcgttggattttaatggtttcaaaacaagcgatttaaaaaaggttggaaatattgaattagtctctacaaaaacgccccaagatttgaaatttgactcaagttaccttaatgatattgaaaacaacattcttaaagaaatcaagctcgctcaaagcaagcaaaaaaccttgattgtttttccagaaaccgcctaccccatcgctttagaaaactccccctttaaagcgaagctagaagatttaagcgataatattgctattttaatagggacattacggactcaaggctataatctttataacagctcgtttttattttctaaagaaagcgttcagatcgctgataaagtaattttagccccctttggcgagaccatgcctttaccggaatttcttcaaaaaccccttgaaaagctcttttttggcgagagcacttatttataccgcaatgctcctcatttcagcgattttacattagacgattttacttttcgccccctgatttgctatgaaggcacttccaaacccgcttattcaaacagcccttcaaaaatttttatcgtgatgagcaataacgcatggtttagcccaagcattgaacccaccttacaaagaacgcttttaaaatactacgcaaggcgttatgataagatcatcttgcacagcgcgaacttttcaacttcttacatcttaagccctagtttattaggcgatattctttttaggaaacgatcatga

SEQ ID NO: 22458 - DNA, 1506 bp, Helicobacter pylori
atgttttctaaccaatacatccaacaacgcatccataaagccaatagcttgagagaagaagggaaaaacccttatcaaaatggcttgaaacgaagccttacaaacgccgcttttttagaaaaatacgcttatgttaagggtttagaagagcctaaagacaaagaaaaatgcgagagtattgtagggagggtcaagcttttgcgtttaatgggtaaggcatgttttattaaagttgaagatgaaagcacgattttgcaagtttatgtttcgcaaaatgaattgaatgatgagtttaaaagcttgaaaaagcatttagaagtgggcgatattgtgttggtgaaaggcttcccttttgctaccaaaaccggtgaattaagcattcatgccctagaatttcatattttaagcaaaaccattgtgcctttacctgaaaagtttcatggactgagcgatatagaattgcgttaccgccagcgctatttggatttgatcgtcaatcctagcgttaaagatgtgtttaaaaagcgcagtttgattgtctctagcgtgcggaaattctttgaaatggaagggtttttagaagtggaaacccctatgatgcaccccattcctggcggggcgaacgcaaggccttttatcacttaccataacgctttagaggtggagaggtatttaagaatcgccccagaattataccttaaacgcctgattgtaggggggtttgaggcggtgtttgaaatcaatcgtaatttcagaaatgagggcatggatcacagccataaccccgaattcacgatgattgagttttattgggcgtatcacacttatgaagatttgattgaactcagtaagaggctgtttgactacttgctaaagactttaaatttagattcaaaaatcatttataacgatatggaagtggatttcaaccaaacgagcgtgatttcctatttggacgctttagaaacgatagggggcattagtaaggatattttagaaaaagaagacaggcttttggcttatttgttagagcaaggcatcaaagtagagccaaaccttacttatggtaaattgctcgctgaagcgtttgatcattttgtagagcaccaactcattaaccccacttttgtaacccaataccctattgagattagccccttagccagacgcaacgatagtaaccctaatattgctgacaggtttgaattgtttatcgcagggaaagaaatcgctaacggctttagcgagttgaacgatcctttagatcaattagaacgctttaaaaaccaagtggctgaaaaagaaaaaggcgatgaagaagcccaatacatggatgaagattacgtgtgggccctagcccatggaatgcccccaaccgcagggcaaggcataggcattgaccgattagtgatgctactcactggagctaaaagcattaaagatgtgattttattcccagcgatgcgtcctgttaaaaacgattttaatgtggagagtgaagaataa

SEQ ID NO: 22459 - DNA, 1251 bp, Helicobacter pylori
atggcgtattttttagaacaaacggatagtgaaatttttgagcttatctttgaagaatacaagcggcaaaatgagcatttagaaatgatagcgagcgagaattacacttttgcaagcgttatggaggctatggggagtgttttaacgaataaatacgctgaaggctaccctaacaagcgctattatggaggctgtgaagtggtggataaaatagaaagcctagccatagaaagggctaaaaagctttttaattgccagttcgctaacgtgcaagcgcattcaggctcacaagccaataacgctgtctatcacgctcttttaaagccttatgacaagattttaggcatggatttaagctgtggagggcatttaacgcatggcgctaaagtgagtttaaccggcaagcattatcagagcttttcttatggcgtgaatttggatggctatattgattatgaagaggcgctaaaaatcgctcaaagcgttaagccagaaatcatcgtgtgcgggttttcagcctatccaagggagattgattttaagaaatttagagaaatcgctgatgaagtgggggcgttactattaggcgatatagcccatgtggcagggcttgtggtaaccggtgagcatgcccatcctttcccgcattgccatgtggtttcaagcaccactcataagaccttaagagggcctagaggggggattattttaactaatgatgaagagatagcggctaagattgacaaagcgatttttccaggaactcaaggcgggcctttgatgcatgtgattgctgctaaagcggtgggttttaaagagaatctaaaaccagaatttaaagcttatgcacaattagtgaaatctaacatgcaagttttggctaaagcgttaaaagaaaaaaaccataagttagtgagtggtggcacttctaaccatttgcttttaatggattttttagataagccttatagcgggaaagacgctgatattgcattagggaatgccggaatcaccgtgaataaaaacaccattcctggtgaaacgcgcagcccttttgtaacgagcgggataaggattggctcagcggcattgagcgcaaggggcatgggagctaaggaatttgaaatcatagggaataaaatatcagatattttgaatgatattaataatgttagtttgcaattgcatgtgaaagaagaattgaaagccatggtcaatcaattccctgtgtaccaccaacctattttttaa

SEQ ID NO: 22460 - DNA, 2145 bp, Helicobacter pylori
atgaaaataacatattgtgatgcgctaattattggaggcggactagctgggttaagggctagtatcgcatgcaaacaaaagggtttaaacaccatcgttttaagcctagtgcctgtcaggcgttcgcactctgcagccgctcaagggggcatgcaagcgagccttgcgaacgctaaaaaaagcgagggcgataatgaagatttacactttttagacacggttaaggggagcgattgggggtgcgatcagcaagtggctaggatgtttgtaaccactgctcctaaagccattagggaattggccagttggggggtgccttggactaggattaaaaagggcgataggcctgcggtcgtcaatggtgagcatgtaactatcactgaaagagacgacaggcatggttatatcttaagccgtgattttggcggcactaaaaaatggcgcacatgctttacggctgatgccacagggcataccatgctttatgcggtcgctaatgaagccttacaccacaaagtggatattcaagacagaaaggacatgctcgctttcattcatcatgataataaatgctatggggcggtggtaagggatttgatcacaggcgaaatttcagcgtatgtttctaaaggcacgcttttagctaccggaggttatgggcgcgtgtataaacacaccactaacgctgtgatttgcgatggagccggggctgcaagcgccttagaaaccggcgtggctaaattgggcaacatggaagcggtgcaattccaccctaccgctttagtgccaagcgggattttaatgaccgaaggttgcaggggcgatggcggtgttttaagagacaagtttggcagacgcttcatgcccgcttatgagccggagaaaaaagagcttgcaagcagagatgtggtctcaaggcggattttagagcatatccaaaaaggctatggagccaaatcgccttatggggatcatgtgtggctggatattgctattttagggcgtaaccatgtggaaaaaaacttaagggatgtgcgcgatatagccatgacttttgcgggcattgatccggctgatagcaaggaacaaaccaaagacaacatgcaaggagtgcccgcaaatgagcctgaatacgggcaagcgatggccaagcaaaaaggctggatccccataaaacccatgcaacactattctatgggtggggttaggacaaaccctaaaggcgaaacccatttaaaaggcttgttttgcgcgggtgaagcggcatgctgggatttgcatgggtttaaccgcttggggggtaattctgtgagtgaagcggtggtcgctggcatgatcattggggattattttgcctcgcattgtttagaagcgcaaattgaaatcaacacgcaaaaagttgaagctttcattaaagaaagccaagactatatgcattttttattgcataatgaaggcaaagaagatgtgtatgaaattagagagcgcatgaaagaagtcatggatgaaaaagtgggcgtttttagagaaggcaaaaggctagaagaagcccttaaagaattgcaagagctttatgcacgctccaaaaacatttgcgtgaaaaacaaggttttacacaataaccctgaattagaagacgcttaccgcaccaaaaaaatgctcaaactcgcgctttgtatcactcaaggagcgttactgcgcactgaaagcagaggggctcacacaaggattgactaccctaaaagagacgatgaaaaatggcttaatcggactctagcgagctggcctagcgctgagcaagacatgcccacgattgaatacgaagaattagatgtgatgaaaatggaaatcagccctgattttaggggctatggcaaaaagggtaatttcatcccccaccccaaaaaagaagagcgcgacgctgagattttgaaaacgattttagaactagaaaagcttggaaaagacagaatagaagtccaacatgcgctcatgccttttgaattgcaagaaaaatacaaggctaggaatatgcgtttagaagatgaggaagtcagggctaggggggaacatttgtattctttcaatgtccatgagttattggaccaacacaacgctaacctaaaaggagaacaccatgagtga

SEQ ID NO: 22461 - DNA, 828 bp, Helicobacter pylori
atgggatttttaaaaggtaaaaaagggcttattgtaggggtggcgaacaataaatccatcgcttatgggatcgctcaatcttgtttcaatcaaggggctactttggctttcacttatttgaatgagagtttagaaaagcgcgtaaggcctatcgcgcaggaattgaatagcccctatgtgtatgaattggatgtgagcaaagaagagcatttcaagtcgctatacaatagcgttaaaaaggatttaggctcattggattttattgttcatagcgtggcctttgcccctaaagaggctttagaggggagcttgttggaaacttctaaaagcgcgtttaacaccgctatggaaatttctgtttattctttaatagagctgacaaacaccctaaaacctttattgaataacggagcgtctgttttgactctaagctatttgggtagcaccaaatacatggcgcattacaatgtgatggggttggctaaagcggccctagagagtgcggtgcgttatttagcggtggatttaggcaaacaccatataagagtgaatgccctatcggccgggcctattaggacgctcgcttctagcgggatcgctgattttagaatgattttaaaatggaatgaaatcaacgcccctttaagaaaaaatgtgagtttagaagaagtgggcaatgccgggatgtatttgctctctagtttgtctagcggggtgagtggggaagtgcattttgtggatgctggctatcatgttatgggcatgggggctgtggaagaaaaagataataaagctacgctactgtgggatttgcataaagaacaataa

SEQ ID NO: 22462 - DNA, 1011 bp, Helicobacter pylori
atgaaattaagcgaattgttaaacgcctattctattgaaacggaattttcaaacgattttgaagtgcatgctttagcggaattaaataaggccacgcctaatgatattagctatattgaccaagcgcgttaccttaaacttttaaaagattccaaagccggggcggtatttatccgtaaaaaagaatcttctaaagtgccaaaacgcatgcaagctttagtcgtggataacccgcatttagcctttgctaaagcttcgcatgcctttaagatccctttttttaaaaacccagaaagcgtgaatgagcctaaacattttgaaagagtaacgatcatgcctaatgttgtgattggagagggcgtagaaattggcgaaaactctttgatttatccgggcgtggtgattgctgatggggttaaaatcggtaaaaattgtattttgtatcctcgtgttactttgtatcaaaacacaattttagaagacaatgttactatccatgcaggcagtgtgatcggaggcgatggctttggttatgcgcacaccgctttaggagagcatgtcaaaattgagcatgtggggattgttaggattcaaaaaaatgtagaaattggagctaacacggcgattgatagggcggtgtttggcgagactttgattaaagagggcgttaagattgataacctggttcaaatcgggcataattgcgttttaggcgaacacagcatcgttgtctctcaagtgggcttgagcggctctacaaccactggccgtaatgtggtttttggcggtcaagtgggcattggggggcatttgcatgtgggcgaattcactcaaattgggggtaaaagtgcggtgggtaaagacttgccccctaacactaattttgccggagcgatccctgctatggaaatccatgaatggcaccatttcctggctcatttacgaacgaattttagaaaacagcaaaaaacgagtttgttgcaaaaagctaaagggttttttaaatcttaa

SEQ ID NO: 22463 - DNA, 1158 bp, Helicobacter pylori
atgaaagatagttttcttttcacttctgaatcagtaaccgaggggcatcctgacaaaatggctgatcaaatcagcgatgcggttttagattacattattgagcgggatcaaaaagccaaagtcgcatgcgagactttagtttctaacgggttttgcatgatcactggcgagttaaaaacttctgtttatgcccctatgcaagagattgcaagagaagtggttaaaaagattggttatacggacgctctttatggctttgattacaggagcgcggcggttttgaatggcgttggcgagcaaagccctgatattaatcaaggcgtggatagagaagatggcgagattggggcaggggatcaagggcttatgtttggttatgcatgcaaagagactgaaacgctcatgcccttacccattcatttagcgcaccagctcactttcgctctggctcaaaaaagaaaagacaacactctgccttttttaaggcctgatggcaagtctcaagtgagcgtgcgttatgaaaacaacaagcctgtaagcattgatacgattgtcatttccacccaacattccccagaagtttcacaaaaacatttaaaagaagctgtgattgaagagatcgtgtataaggttttatccaaagaatatttgcatgacaatatcaagttttttgtcaatcctacaggaaaattcgttatcggtgggccgcaaggcgatgcgggcttgacgggcagaaaaatcatcgtggatacttatggggggagttgcccgcatggcgggggagcgtttagcgggaaagaccctagcaaagtggataggagcgcggcttatgcggcccgctatgtggctaaaaatttggtagcgagtggggtttgcgataaagcgaccgtgcagcttgcttatgcgattggggtgatagagccagtgtctatttatgtgaacacgcataacacgagcaagtattcaagcgctgagttggaaaaatgcgtgaaatcggttttcaaactcacgccaaaaggcattattgaaagcttggatttattaagacccatttattcgctcacttcagcttatgggcattttgggcgcgaattagaggaattcacttgggaaaaaaccaacaaagctgaggagattaaagcgttctttaagcgttaa

SEQ ID NO: 22464 - DNA, 996 bp, Helicobacter pylori
atggaattttacgcctctcttaaatccattgcgatgcatgttccaagcgagcgtgtgaaaaatgcagagttccagcaatttttggataccagcgatgagtggatagaaaaaaggaccggtatcaaagaacgccgtttcgctaacgatgaagaaaaaagcagcgatttaggggtaatagcggctaaacaagccatagagagagcgcatttaaccccaaaagacattgatttggtggttgtagcgactttaagccctgattttttggccatgccttcaaccgcttgcgtgttgagcgcgaaattaggcattgaaaacaagccggcgtttgatatttcagccgcttgcacgggttttatctatttattatcggtggctaaggcttatgttgagagcgggatgtatgaaaatgtgctgattgtgggggcagaaaaaacgagcagcgtgttagattttaaagacagggggacttgtattttatttggcgatggggctggggcgtgcgtgataggcagaaccaagcgtttaaaagaaagcattttagatgtgcaaatttcagcgaacgggaatttttctaattatctctatacgccaaggactctaaaacccacgccctttaacgctaaagaagaagcttcagagccttttttgtgtatgaaaggcaatgaagtgtttaaactagcggtaaaaacgcttttaaaagatgtggaaatgatcttagaaaaaaacgctctcaaacctgaagacgtgcgtttgtttatcccgcatcaagctaattttaggatcattcaagcggtgcgggagcatttggattttaaagatgagcaagtggttttaaccgtgcataaatacggcaacacttcagcagccagtatccctatggctatgggtgaagcttatgaagaggggcgtttgaaaaagggcgatttaatgcttttagacgcttttggtggaggattgacttggggttcagcgttggtgtattttggaggaagttag

SEQ ID NO: 22465 - DNA, 1866 bp, Helicobacter pylori
atgtctaatcaagaatacacctttcaaactgaaatcaaccagcttttggatttgatgatccactctttgtattctaataaagagatttttttaagagagttggtttctaacgcgagcgacgctttggacaagctgaattatttaatgctgaccgatgagaaattaaaagggctgaataccacgcctagcattcatttgagttttgatagccagaaaaagaccttaacgattaaagataatggtataggcatggataaaaacgatctcattgagcatctaggcacgatcgctaaatcaggcacgaagaattttttaagcgctttgagtggggataagaaaaaagatagcgctttaattggccagtttggcgtgggcttttattcagcgtttatggtagcgagtaagatcgtcgttcaaaccaaaaaggtaaatagcgatcaggcttatgcatgggtgagcgatggtaagggcaagtttgaaatcagcgagtgcgttaaagatgagcaaggcacagaaatcaccctctttttaaaagatgaagattctcattttgcgagccgttgggagattgatagcgttgttaaaaagtattctgagcatatccctttccctatttttttaacttacaccgatacgaaacatgagggcgaaggggataatcaaaaagaaattaaagaagaaaaatgcgaacagatcaatcaagcgagcgctttatggaaaatgaataagagcgaattaaaagacaaagattacaaagagttttaccaatcgtttgcgcatgataacagcgaacctttgagctatatccataataaagtggaaggctctttagaatacacaacgcttttttacatccctagcacagcgccctttgacatgtttagggtggattataaaagcggggtcaaactttatgttaaaagggtgtttatcactgatgatgacaaagaattgttgccctcttatttgaggtttgttaaaggcgtgattgacagcgaagatttacccttgaacgtgagccgtgaaatcttacagcaaaacaagattttagccaatatccgttcggcttcagtgaaaaagattttaagcgagattgaacgcttgagcaaagatgaaaaaaattaccataaattctatgagcctttcgggaaagtgttaaaagaaggcttgtatggggattttgaaaacaaagaaaaacttttagaattgttaagattctattctaaagacaaagaaaaattaatttctttgaaagaatacaaagaaaatttaaaagaaaatcaaaaaagcatttactaccttttaggcgaaaatttagatttattaaaggcgtccccgcttttagaaaaatacgctcaaaaaggctatgatgttttgttattgagcgatgaaattgatgcgtttgtgatgccaggcgtgaatgaatacgataaaacgccctttaaagacgctagccatagcgagagtctgaaagagcttggtttggaagaaatccatgatgaggtaaaagatcagtttaaagatttaatgaaagcgtttgaagaaaatcttaaagatgagattaaaggtgtagagctttccagtcatctcacttcagcggtggctttaataggcgatgaacaaaatgcgatgatggctaattggatgcgtcaaatgggtcaaagcgtgcctgaaagcaagaaaacgctagaattaaaccctaaccacgcgattttgcaaaaactcttaaaatgtgaagataaagagcagttgagcgcttttatctggttgctttatgatggggcgaaacttttagaaaaaggggctttaaaagacgctaaaagttttaacgaacgcctaaatagcgtgctattgaaagcgttgtag

SEQ ID NO: 22466 - DNA, 1866 bp, Helicobacter pylori
gtggtaaaagaaagtgatattttagtggttggtggggggcatgcaggcattgaagcgagcttgattgcggctaaaatgggggctagggtgcatttaatcaccatgctcatagacacgatcggtttagcgagctgtaatccggcgattgggggcttgggtaaagggcatttgactaaagaagtggatgttttagggggggctatggggattattacggatcatagcggtttgcaatatcgtgtgttaaacgcttctaaagggccggcggttagggggactagagcgcaaattgatatggacacttaccgcattttggcaagaaatctcgttttaaacacccctaatttgagcgtctctcaagaaatgaccgaaagtttaatccttgaaaacgatgaggtagtgggcgtaaccacgaacattaacaacacttatagagctaaaaaagtgatcatcaccacaggcacttttttaaaaggggtggtgcatattggcgagcaccaaaaccaaaacgggcgctttggggaaaacgcttctaattctttagccttgaatttaagggagcttggctttaaggtggatcgcctaaaaaccggcacttgcccaagagtggcgggcaatagcattgattttgaaggcttagaagagcattttggggacacaaaccctccctatttcagctataaaaccaaagattttaaccccacccaactctcatgttttatcacttacactaaccccattacccaccaaatcattagggataatttccaccgagcccccctttttagcggtcaaattgaaggcataggcccaaggtattgccctagcattgaagataaaatcaaccgctttagcgaaaaagaacgccaccagctgtttttagagcctcaaaccatccataaaagcgaatattatatcaacggcttaagcacctctttgcccctagatgtgcaagaaaaggtcatccattctatcaaaggcttagaaaacgcgctcatcacgcgctatggctatgcgatagagtatgattttatccagcccacggaattgacccacactttagaaaccaaaaaaatcaaagggctttatttggccgggcaaatcaatgggactaccggctatgaagaagcggcggctcaagggcttatggctgggattaatgcggtattagccctaaagaatcaagccccctttattttaaagcgcaatgaagcttatatcggcgttttgattgatgatttaatcactaaaggcacgaatgaaccttacagaatgtttaccagccgagccgaataccgcttgcttttaagagaagacaacacgctttttagattaggcgaacatgcctatcgtttagggcttatggaagaggatttttataaggaattaaaaaaagataaacaagagatacaagacaatctcaaacgccttaaagaatacatccttacccctagtaaagaagtgttaaaacgcttggatgaattagacgaaaaccctatcaatgacaaggttgatggcgttagtttgttagcgcgcgatagttttaatgcagaaaaaatgcgctcctttttcagctttttagcccccttgaacgagcgggttttagagcagattaagattgaatgcaaatataatatttatattgaaaagcaacacgaaaatatcgctaaaatggatagcatgctcaaagtttctatccctaaaggttttgtgtttaaaggcattccaggcttaagcttagaagcggtagaaaagttagaaaaattccgccccaaaagcctttttgaagcctcagaaatcagcgggatcaccccagcgaatttagacgttttgcatttgtatattcatttgcggaaaaactcttaa

SEQ ID NO: 22467 - DNA, 801 bp, Helicobacter pylori
gtgaaagaagagttatttaaagaaaaatctcgttacattacagggtttgttttaatcattgtggcagacttgattttatatgcggacaatttgttgttgttttgggcggttttaggggggatttatgcggtagggttttctgaagcgttaagattattccaagttaaagcgagctttagcctgtatctcattttagtgttgtcatgggtggcggcgtattttaacgggcgtcctatagaatgcgctcttattagcgccatggtcatggctagtgttatcgcttatcaaaaagcgcaccatagcgaagccattttaccctttttgtatccgggcgttgggttttttgcgctttttggggtttataaggattttggtgcagtagcgatcatttggcttttagtcgtggtggttgcaagcgatgtgggggcgttttttggaggcaagcttttaggcaaaacccctttcacgcccacttcgccgaataaaaccttagagggcgcgttgattggcgtggttttggcgagcgttttaggatcgtttgtgggcatggggaaattgagcggaggcttttttatggcgctcttttttagttttttaatcgctcttgtggcggtgtttggggatttgtatgaaagctatttgaaaagaaaggtcggtatcaaagatagcggtaagattttacccgggcatgggggcgttttagaccggttggattccatgctttttggggctttaggcttgcatgcgctgttgtattttttagaaatttggaaagaaacggcggtgtttttaggggattga

SEQ ID NO: 22468 - DNA, 981 bp, Helicobacter pylori
atggcaaaacatgatttagtgggttcggttctctgggacgcatattctaaagaagttcaaaggcgcatggacaaccccacgcatttaggggtcatcaccgaagagcaggctaaagccaaaaacgctaagctcattgtggcggattatggcgcagaggcatgcggtgatgcggtgaggttgtattggcttgtagatgaaagcacggatagaattgttgacgcgaagtttaaaagctttggttgcggaacagcgatcgcaagctcagacatgatggtagagttgtgcttgaataaaagagtccaagatgcggtaaaaatcacgaatttagatgtggaaagaggcttgagagacgatccggacacgccggcggtgcctgggcaaaaaatgcactgctcggtgatggcgtatgatgtgatcaaaaaagctgccggcatgtatttggggaaaaacgctgaagattttgaagaagaaatcatcgtgtgcgagtgcgctagggtgagtttaggtacgattaaagaagtgattaagctcaatgatttaaaaagcgttgaagaaatcactaactacaccaaagccggtgctttttgtaaaagctgtgtgaggcctggagggcatgaaaaaagggattattacttggtggatattcttaaagaagtgcgcgaagaaatggaagctgaaaaacttaaagcgaccgctaataaatcccaaagcggagaattggctttcagggaaatgactatggttcaaaagattaaagcggtggataaagtcattgatgaaaatatccgcccgatgcttatgatggatggaggggatttagagattttagacattaaagaaagcgatgattacattgatgtgtatatccgctacatgggggcatgtgatgggtgcatgagcgcgactaccgggactttatttgccattgaaaacgctttgcaggaattattggatcgcagtatcagggtgttaccgatttga

SEQ ID NO: 22469 - DNA, 1371 bp, Helicobacter pylori
gtgattttaaaaaagagtggtatcttggctaaaaaaacttctttatttgagtgtcagcattgtggttttacaagccctaagtggttgggtaagtgcgttcaatgcaacgcatgggagagttttatagaattgaaccaagcccaaaaggaagttttaaacacgcttaaaaaaccgatcccacaagcgcaaaaaagcgtttctatcgctgcaattgagcatgaagaagtgattaagttttcttccactcaaagcgaattggatattgttttgggtggggggatcgctaaaggggggctgtatttagtgggggggagtcctggggtggggaaatccactctgcttttaaaagtggcttctggcttagccaaaaaccagcagaaggttttgtatgtgagcggggaagagagcttgagccagattaaaatgcgtgccattagattggattgcatagaaaaagaattgtatctgctcaatgaaatcaattggcctgtgattaaggcgaatattgagagcgaaaattattttgcgtgcgtgattgattccattcaaacgctctattcgccagagatttcttcagcgcccggctctatttcgcaagtgcgagagatcacttttgagctcatgcgtttagccaaaacaagagatattgctatttttatcatcggtcatatcactaaagaagggagcattgcagggcctagagtgttagagcatatggtggatagcgtgctgtattttgaaggcgatcccagtagggaattaaggattttaaggagttttaaaaaccgctttggccctacgagtgaaatcggcttgtttgagatgaaagagcagggtttggtgagcgctaaagaagcttcaagcttgtttttttctaaagaagagcctatggaggggagtgcgattactatcactttagaaggctcaagagcgttgattttagagattcaggcgttggtgagcgagtgcagtttcggatcacccaaacgattagcgaacgggtttgacaccaaccgccttaacatgcttattgctttgttagaaaaaaagctagaaatccccttaaaccgccatgatgtgtttattaatgtgagcggaggcattaagattagcgagccggcttgcgatttagcggtcattgccagtatcctttcaagctttaaaaacagaaaaattgacaataaaacggcgtttttgggcgaagtgagtttgaatggcaggattttagaagcccctaatttgaacgctagattgaaagaaatggaaaattacggctttttaaaagccattttgcctaaaaaacccagccaaaaaacctctatcaaatgctatgaagccaatgcggtgggcaagattgttgaatggatgtga

SEQ ID NO: 22470 - DNA, 1173 bp, Helicobacter pylori
atgagaaagaaaggcatgtttgaaaagatacaaaaagaatggctgagcaacattcaaaaggatttgttgtctggttttgtggtggggctttctgtgatcccagagacggccggctttgcgatcatggtgggtttagatgtgggcgtggcgttttatacgaccttttacatggcttttgttttgtctctttttggggctagaaaggcgatgattagcgcagcggccggctcagtggcgctcattttagtgggcgtggttaaaaactatgggcttgaatacgcgggcgtggcgactcttatggcaggggtgttgcaaattcttttaggctatttgaaaatagggaatcttttgaggtttatcccccaatcagtgatgtatggctttgtgaacgcgctaggcattttgcttttaatggagcaattcaaattccttcaaaaccaaaatttgggggtgtttgtcttgctcgctattgggatactcatcatttatctttttcctctaatcactaaaaaaatcccctctaatctgatttgtatccttatagtgagcgcgatcgctttaatttttgatatgcatgcgccgaatttggggagcattgagcaaggggtttcaggctttcatttcatcattatccccaaaaatttggattttaaaataatgatagagttgttgccttacgctctttctttagcactagtgggaacgatagaaagcttattgacggctaaaactttagatgtgattttaaaagacggcgtgagcgataaaaataaagaaactaaagcgcaaggcttggggaatatcatctcagggcttttggggggaatgacagggtgcgctttagtggggcagtctatcattaacgcaaaatccggggctaaaacaaggctttctactttttttgccggcttttctttaatggtgctcatattagtgtttaatgaatatgtggttaagatccccattgtggcggttgtggcggtaatggtgatgatttctttcaccacttttaatttccaatccattattaacattaaaaaaatcaagctctatgacacgctcaacatgctcttagtcgtggcggtggttttatacacgcataatttagcgataggggttgtggtgggggttttagtcaatgcgttatggatcaaatctaaagggattgcatga

SEQ ID NO: 22471 - DNA, 1452 bp, Helicobacter pylori
atgaaaaaaacgattttactttctcttatggtttcatcgctcctcgctgaaaatgacggcgtttttatgagcgtgggctatcaaatcggcgaagcggttcaacaagtgaaaaacaccggcgaaatccaaaaagtctccaacgcttacgaaaatttgaacaatcttttaacccgctataacgaactcaaacaaacggcctctaacaccaattcaagtaccgctcaagcgattgataatctaaaagagagcgctagccgattgaaaacgacccccaatagcgctaatcaagccgtgtcttcagcgctcagctctgcggtagccatgtggcaagtaatagtctctaatttagccaataactcgctacccactagtgaatacaacaaaatcaatgcgatttctcaatcgctccaaaacaccctagaaaataaaaacaatgatcttaaaattgaaaatgactacgaccatcttttaactcaagctagcaccattattaatacccttcaaagccaatgcccaggcatagacggaggcaatggcaaaccatggggcattaatgcaagcgggaacgcatgcaatatttttggcaacacctttaacgccatcactagcatgatagatagcgctaaaaaagccgccgcagatgcccgaagaactgccccagaaagtccaaaccaaccaagtgcgtttaacaacgctgatttcaataaaaaccttaatcaagtctcaagcgttattaatgacacgatctcttacctcaaaggggacaatttagcaaccatctacaacacccttcaaaaaacgcccgattctaaagggtttcaaagtttggtgagccgatctagctatagttattccctcaacgaaacccaatattctgaattccaaactaccaccaaagagtttggccataacccttttagaagcgtgggtttaatcaactctcaaagcaataacggagcgatgaatggcgtgggcgtgcaattaggctataagcaattctttgggaaaaataaattttttgggatccgttattatgccttttttgattacaaccatgcctatatcaaatccaactttttcaactccgcttccaatgttttcacttatggcgcaggcagtgatcttttattgaatttcatcaatggcggatccgataaaaaccgcaaagtctcttttggcatttttggaggcatcgctctagcaggcacgacatggcttaattcccaatttatgaatttaaaaaccaccaatagcgcctacagcgctaagatcaacaacaccaatttccaattcttattcaatactggtttaaggcttcaagggattcaccatggcgttgaattaggcgtgaaaatccccaccatcaacacgaattactattctttcatgggcgctaaattagcataccgaagactttatagcgtgtatttcaattatgttttggcctattga

SEQ ID NO: 22472 - DNA, 921 bp, Helicobacter pylori
gtgggaaatttagtgattggctctagggggagcgaattagccttatggcaagcgaatcacattaaagaacgcctgaaaaaagaatgcttgatagaaagcgaaattcaaatcgttaagactaagggcgataaaatcttagacacccctttaaataagatcggcggtaaggggctattcactaaggaattagaagaattgcttttaaagggcgcaattgatttggcggtgcattctttaaaagacgtgccggtcgtgtttgaaaaggggttagacttggcatgcatcaccaaaagggctgatgtgagggacacttttttaagcgtgaaattccctgatttgatgagtttgcctaaaggggcaaaggttggcacgacttctttaaggcgctctatgcagatcaaattaaagcgccaggatttggacacagaaagcttgagagggaatgtccaaacccgtttgaaaaagcttgaatgcggagaatttgacgctatcattttagctgaagccgggttgtgccgcctagaaattcaaggagcgaaataccgcaaggcttttagcgtagaagaaatgattcctagcatgggtcagggggctttaggggtagaaatgctcaaaaaccacaagcattttgccacgcttcaaaaactcaacgacgagaaaagcgcgttttgctgccgtttagaaagggagtttatcaaggggcttaatggagggtgtcagatccctataggcgtgcatgcgagtttaatgggcgatagggttaaaatccaggcggttttaggcttgcctaacgggaaagaagtcattactaaagaaaaacaaggggataaaactaaagcgtttgatttagttcaagagcttttagaagaatttttgcaaagcggggctaaagagattttagaaaaggcgcagttgttttaa

SEQ ID NO: 22473 - DNA, 1734 bp, Helicobacter pylori
atgctattttcaaaactctttgcccccactctcaaagaaccccctaaagatgccgtgttaaaaagccataaacacttagctcaagcaggatacatttatcaagtaggcagcgggatttataattttttgcctttagctaaaaaagtgctagacaagatagaaaacatcacgcacaaacgcatgcaagagcatggggcgcaaaatattttaatgagttttgtggttttggcgagcttgtgggaaaaatcaggccgtttggataaatacggcaaggaattattggtttttaaagaccgaaaagacaatgattttgttttaagccccactttagaagaaaatatcaccgaaattgccgctaatttcattaaaagttacaagcaattgcccgtccatctctatcaaatccacacgaaattccgtgatgaaatccgcccaagatttgggctggtgagagcgagggaatttatcatgaaagatggttacagctttcatgaagacgctgagagcttggataaggaatttttaaacacgcaaagcgcttataaagagattttaagcgatttgggtttggattttcgcattgtggaagcggatagcggggcgattggagggagtaaaagcagggaatttgtcgttttaaccgaatgcggggaagacacgatcgtggtgtgtcaaaattgcgattatgccgctaacattgaaatcgctaaacgctctaaaaggcctgagcctttaaatgtcccaaaagcgcaattagcgaaattccctacccctaataccactagcgcgcaaagcgtggcggagttttttaaaacagagccttattttgtcttaaaagcgcttgttagaaaagtgatccataaagataaagaaaccctagcgtgcttttttgtcaggggcgatgacaatttagaggaagttaaagccctaaacgccttgaacattataggagcgaatgctttagaattgagagaggcgagtcaaaaagatttggataatgtggggttaatagcgggttttatagggccttatggcttgaaaaagcatgtttcttacattatttttgatgaagatttaaaagagggcgattgcttgatcgctggggctaatgaaaaggattttcatgcggtgggcgtggatttaaaagggtttgaaaatcttgtttatgcggatattgtccaggttaaagagagcgatcgttgccctaattgtcaaggagcgttgaaataccataagagtttggaggtggggcatattttcaaactcgggcaaggctatgctaaaagcttgaaggctagtttcttggataagaatggtaaagagcaattttttgaaatggggtgctatgggataggcattagccggttgctcagcgcgattttagagcaaaaaagcgatgatttaggctgtgtgtggacgaaaaataccgccccttttgatgtggtgatcgtggtttctaattggaaagatgaagcgcaaaaaaaactcgcttttgaagtgtatgaaaggctgctccaaaagggcgttgatgcgctgctagatgacagagacgcgcgttttggggcgaagatgagggattttgaattgattggggaacgattggcgctcattattgggaagcaaactttagagagcaaagaatttgaatgcatcaaacgcgctaatttggaaaaacaaacgattaaagacattgaattagaagaaaaaattttagaaatgttagaaagcgaataa

SEQ ID NO: 22474 - DNA, 1350 bp, Helicobacter pylori
atggagttagaaactcatttgtcaaaatatttcaccctagcctttacgcataaaagcatgagcttagaaatgcgagaaaaactcgctattaattcgaatgcaacgcttaaagaatttttacaaaccattaaaaaccattgccctaacatcaaagagtgcatggtgttatccacatgcaatcgctttgaaatctatgcgagcctaaaacacggcgctaatactaatgaacaaaaaaacgcactattaaagattttggctcaaaataaaaaaatgagcgtgtctgatttagaaaaatgcgttttaatgaacactgatgaaagcgcagtccatcatgtctttagcgtgtgcagcagtttggatagcttggtggttggggaaactcaaatcacagggcagatgaaaaacgcttataaattcgcttttgaagagaaattttgctctaaagatttaacccgattgctccattttgctttcaaatgcgccgctaaagtgcgcaatttaaccggcatttccaagcaaggggtttccatctcttcagtggcggtcaaagaagcgcttaatatttttgaaaaagaaaggattaaggataaaaaagcccttgtgatagggcttggcgagatggctcaattagtcatcaagcaccttttaaacaagcaatttgaagcgcttatcttagggcgtaatgcggctaaatttgaagatttcatcaaagaattagaagaacctaaaaaagtaagctttcaaaatatagaaaatttaaacgcttatatcaatgaatacgaactgcttttttgcgccacttcttcgccgcattttatcgtgcaaaatcgcatgttaaaagaaacgattttcaggcgtttttggtttgatttagccgtgccacggaatattgaaaagccggtattggataatattttcttatacagcgttgatgatttagagcctatggtgagagaaaatgtggaaaacaggcaagagagcagaatgagagcttatgagattgtagggcttgccacaatggagttttaccaatggattcaaagtttagaagtagagcctgtgattaaggatttaagggaattggctaggatttcagcccaaaaagaattgcaaaaagcgcttaaaaaacgctatgtgcctaaagaatacgaaaacaacattgaaaagatcttgcacaacgctttcaacacttttttgcataaccctaccatcgccttaaaaaagaacgctcaaaaagaagaatccgatgtgcttgtgggtgcgattaaaaacttgtttaatttagacaaatctaacgctaaccatgcccagaatttgaatctctataaatgcgaatattacgaggaataa

SEQ ID NO: 22475 - DNA, 924 bp, Helicobacter pylori
atgcaagaaaaacaacttaaaaccattcaaaataagatcgcttcctggatcaaagaaatagaaagtgcctttatagatgaattattttctaagattggcccttcaaaaatgctgcgctccaaactcatgctcgctttattaaatgaaaaaacagacgctattttattggataaagcattcaatttgtgcgcgattgtagaaatgatacagaccgcttctttattgcatgatgatgtgattgacaaagcggccatgcgccgaaaactccccagcattaacgctctttttggtaattttaacgccgtgatgcttggggatgtgttttattctaaagccttttttgaactctctaaaatgggtgaatccatcgccaaatctctctctaatgcggttttaaggctctctagaggcgagattgaagatgtgtttgtggggggaagttttaatagcgacaaacaaaaatactggcgcattttagaagacaagaccgctcatttcatagaagcgagtttaaagagcatggcgattcttttaaataaagacgcaaaaatgtatgcggattttggattaaattttggcatggcatttcaaatcattgatgatttattagacatcactcaagacgccaaaactttaggtaagcccaattttagcgattttaaagagggcaaaaccactttaccctacttgcttttatatgaaaaattaaatcagcgcgatcaagggcttttaatttcttattttaaacaagatagccatgaaatcatagaatggactaaggaaaaattcaagcaatatggtaccatagaagaaacccttaagatcgctcaagtttattctaaaaaggcccttgaagccattaaaggggagaacaatttgattttagaaaaactagcgcaagacgtcatttataggactttttaa

SEQ ID NO: 22476 - DNA, 435 bp, Helicobacter pylori
atgaaaacatttgaaattctaaaacatttgcaagcggatgcgatcgtgttatttatgaaagtgcataacttccattggaatgtgaaaggcaccgattttttcaatgtgcataaagccactgaagaaatttatgaagagtttgcggacatgtttgacgatctcgctgaaaggatcgttcaattagggcatcaccccttagtcactttatccgaagcgatcaaactcactcgtgttaaagaagaaactaaaacgagcttccactctaaagacatctttaaagaaattctagaggactacaaatatctagaaaaagaatttaaagagctctctaacaccgctgaaaaagaaggcgataaagttaccgtaacttatgcggatgatcaattagccaagttgcaaaaatccatttggatgctgcaagcccatttggcttaa

SEQ ID NO: 22477 - DNA, 1146 bp, Helicobacter pylori
atgaaaaaatccaagcacttaaaacgcccttatttgaagcgttcccatttgaaacactctgataaggcttcttctttcaaggggttgttaaaaaaagaggataatgtgatttcattagaaaattttaaacccaaagagagcgaagatttattagaaaatttttccaacaaaaaagacatgcaagaattgctagggcttttaaaccaatttattttgcaaagctacaaggtagaaaaggaatttaaagattataaagccctttatgaatgggtcatagagattttacctcaagccatttgggtggtgaatgaaaacgggagctttttttataaaaattctttagccaatcaaagccatgaggtgttcaataaggctaaattagaaaattttaacactgaaattgaacatgaaaataaaagctatttagtccagcaaaacagcattcaaggcaagcaaatcatcaccgcaaccgatattagcgctcaaaaacgccaagagcggctcgcttctatggggaaaatctcagcgcatttagcccatgagatcagaaaccctgtaggttctatctctcttttagcttcagtgttattaaagcatgcgaacgaaaagactaagcccattgttgtagaattgcaaaaagctttatggcgcgtggaaagaatcattaaagccaccttgcttttttctaaaggcattcaagccaaccgcaccaagcaaagtttgaaaacgctagagagcgatctcaaagaagccctaaattgctacacttactctaaagacattgattttctttttaattttagcgacgaagaagggttttttgactttgatttgatggggattgtgttgcaaaatttcttgtataacgctattgatgcgattgaagccttagaagagagcgaacagggtcaagtgaagattgaagcgttcattcaaaatgaatttattgtcttcactattattgataatggcaaggaagtggaaaacaaaagcgctttatttgagccttttgaaaccactaaattaaagggtaacggcctagggttagccttgtctttacaagtggttaaagcccatgaagggagcattgcgctattagaaaatcaagaaaaaacctttgaaattaagattcttaacgcttcttaa

SEQ ID NO: 22478 - DNA, 1479 bp, Helicobacter pylori
atggaattgaatcaaccaccactccctacagaaattgatggtgacgcttatcataagccgagttttaatgatttgggcttaaaagaatcggttttaaaatccgtttatgaagccggcttcacttccccaagccccattcaagaaaaggccattccggctgttttgcaaggccgagatgtcatcgcacaagcccaaacaggcacaggaaaaaccgccgctttcgctctgcccattatcaacaaccttaaaaacaaccacaccatagaagccctagtgatcacgcccaccagagaattagccatgcaaattagcgatgagattttcaaattgggcaaacacaccaggactaaaaccgtgtgcgtgtatggaggccagagcgttaaaaagcaatgcgaattcattaagaaaaatccccaagtgatgatcgctacaccaggaaggctgctcgatcacttaaaaaacgaacgcatccataaatttgtgcctaaagtggtcgttttagatgaaagcgatgaaatgctggatatggggtttttagacgatattgaagagatttttgactacctccctagcgaagcgcagattttgcttttttcagccacgatgccagagccgattaaaagactagcggataagattttagaaaaccctattaaaatccatatcgctccttctaatatcactaacaccgacatcacccaacgcttttatgtgatcaatgagcatgagagggccgaagcgatcatgcgccttttagacacccaagcacccaaaaagagcattgttttcacgcgcactaaaaaagaagccgatgaattgcaccaattccttgcttctaaaaattacaaaagcaccgccttgcatggggatatggatcaaagggatcggcgctcttctatcatggcgtttaaaaaaaatgacgctgatgtgttggtggctacagatgtggcgagtcgtgggctagatattagcggtgtaagccatgtgtttaattaccacttgcccctaaacactgagagctatatccatcgcatcgggagaaccgggcgagcgggcaaaaaaggcatggcgatcactttagtaacccctttagaatacaaagagcttttacgcatgcaaaaagaaattgattcagagattgaactttttgaaatccccaccattaacgaaaatcagatcatcaaaaccttgcatgacgctaaagtgtctgaagggatcatcagcctttatgaacagcttaccgaaatttttgagccgtctcaattggttttaaaacttttgagtttgcagtttgaaaccagcaaaattggcttaaaccagcaagaaattgacgcgattcaaaaccctaaagaaaaaacgccaaaaccctctaacaaaaaaacgccccaacatgagcgagcgcgttctttcaaaaagggtcagcacagagacagacaccctaaaacaaaccattattctaaaaaacccaaacgccgttaa

SEQ ID NO: 22479 - DNA, 1551 bp, Helicobacter pylori
atgctagaaatcaaaaacttgaactgcgttttaaacgcgcatttttcgctccaaaacatcaatatttcgttaaatcctagcgaaagggtggcgatcgtgggcgagagcgggagcgggaaaagctctatcgctaatatcatcatgcgtttaaaccccagattcaaaccccataatggcgaagtgctgtttgaaacaaccaaccttttaaaagaaagcgaagaatttatgcaacatttaaggggtaatgcgatcgcttacatcgctcaagaccccctatccagcctgaaccccttgcataaaatcggcaaacaaatgagtgaagcctattttttacactataaaaacgcttctaaaacgctccttaaagaacaagttttaaacgccatgaaacaagtccaattagatgaaaaatttttggatcgttacccttatgagttgagcggagggcagcgccaaagggtgtgtatcgctatgggcattattaatgcacccaaattgctcatttgcgatgagcctaccaccgcattagatgcgcaaatccaaaaccagattttagacttgcccaagcaattgagtgcggaaaaaaacatcgctcttttattcattagccatgatttgaaagcagtcaaacgcttggctgatagggtttatgtgctaaaaaaaggcgagatagtagaaaccaatttgactaaagatctttttaatgaccccaagcacgaatattcaaaactcttgattcaagcttcaaacttgcccgctaaaaatttaaaagcgctagatgaaacgcttttagaagtgaaggattttagcgtttattacttgcaaaaacgcttttttaggccttctttaaaaaagccccttatcgcatcagtcaatttttctctcaaagccaaagaaaacatcggcatcattggcgaaagcgggagcgggaaaagctctttagcgttggggcttttaaaactcgctttaaacagtggggaagaaaagattttaggccaaagcgtagggtctttaaattctaaagcgttcaaaccctaccgcaagattttgcaaatggtgtttcaagacccttacgcttcattaaaccctcgcttaagcattcaaagcattttaacagaggctttgcgctttgcttaccctaaagcttccaaagaagaatggcaccatctcgcaaaactttgtttagaagaagtgtgtttaagccatgaattgcttaactcttacgcttatgaactcagcggtggggaacgccaaagagtggcgatcgctagagcgattgctttaaaacctaaaatcattcttttagatgaacccacttctgctttagataaaagcattcaaaaaagcgtgttggaattgctgttggatttgcaagaaaagcaggatttgagctatttgtttatcagccatgatttagatgtgatcaaagcgttttgcgataaggtgttagtgataagtgaggggaaagtcgtagaaatgaacactattaaagaggtgtttgataaccccaaacacgcttatacaaagcgtttgttagaatccaggctttaa

SEQ ID NO: 22480 - DNA, 1236 bp, Helicobacter pylori
atggcagatgtcgttgtggggatccagtggggagatgaggggaagggaaaaattgttgataggatcgctaaagattatgactttgtggtgcgctatcagggcgggcataatgctgggcataccattgtgcataagggggttaagcattctttgcatttaatgccttcaggggttttataccccaaatgcaagaacatcatttctagcgcggtggtcgtgagcgttaaggatttgtgcgaagaaatcagcgcgtttgaggatttagaaaatcgtttgtttgtcagcgacagagcccatgtgatcttgccctatcatgccaaaaaagacgcttttaaagaaaaatctcaaaacatcggcacgactaaaaaaggcataggcccttgctatgaggataaaatggccaggagcgggataagaatgggggatttattagacgataaaatcttagaagaaaagctaaacgctcatttcaaagccattgagccttttaaaaaagcgtatgatttgggcgagaattacgaaaaagatttgatggggtattttaaaacttacgctccaaaaatttgcccctttatcaaagacacgacaagcatgctgatagaagcgaatcaaaagggtgaaaaaatcctattagaaggggcacaaggcacgcttttagacattgatttagggacttacccttttgtaacaagctctaacaccacgagcgctagcgcatgcgtgagcaccggcttaaaccctaaagcgatcaatgaagtcataggtatcacaaaagcctactccactcgtgtgggtaatgggcctttccctagcgaagacactacacccatgggcgatcatttaaggactaagggtgcggagtttggcacgacaaccaagcgcccaaggcgttgcgggtggctggatttggtggctttgaaatacgcttgcgctttgaatggttgcacgcaattagccttaatgaaattagacgttttagacgggattgatgcgattaaggtgtgcgtggcttatgaaagaaagggcgaaagattggagattttccctagcgatttgaaagattgcgtgccgatctatcaaacttttaaaggttgggaaaaaagcgtgggcgtgagaaaattagacgatttagagccaaacgttagagagtatatccgttttattgaaaaagaagtgggggtaaaaatccgccttatttctacaagccctgaaagagaagacacgatttttctatga

SEQ ID NO: 22481 - DNA, 1263 bp, Helicobacter pylori
gtggatgtattgagcgtgagcgaaatcaatgcgcaaatcaaagcccttttagaagcgacttttttgcaagttagggttcaaggggaagtgagtaatttgactatccataaggtgagcggccatgcgtatttttcgctcaaagacagccagtcggttattaaatgcgtgctgtttaaagggaacgctaacaggctcaaattcgctttaaaagaagggcaggaagtggttgtttttgggggtattagcgtgtatgtcccaaggggggattatcaaatcaattgctttgaaatagagcctaaggatataggttcattaactttagctttagagcaattgaaagaaaaattacgccttaaaggctattttgatgaagaaaataaattacccaaaccgcattttcctaaacgagtggcagtcatcacttctcaaaattcagccgcttgggcggacatgaaaaagatcgcttccaaacgatggccgatgtgtgaattagtttgtatcaacaccttaatgcaaggggagggctgcgttcaaagcgtggtggaaagcatcgtttatgcggatagttttcatgacacaaaaaacgcttttgatgcgattgtagtggctaggggtggggggagcatggaggatttgtattctttcaatgatgaaaaaatcgctgatgctctgtatttggccaaaaccttcagcatgtcagctattgggcatgagagcgattttttattgagcgatttagtggcggatttaagggcttctacgccttcaaacgcgatggaaattttactccccagcagcgatgaatggttgcaaagacttgatgggtttaatgtgaaattgcaccgctcgtttaaaactttgctccaccaaaaaaaggcgcatttagagcatttagtggcttctttaaaacgattgagttttgaaaacaagcaccatttaaacgctttaaaactagaaaaattaaaaatcgccctagaaaataaaactctagaatttttacgctttaaaaaaacgcttttagaaaaaatctctactcaaacattaacaagcccttttttacaaactaaaacagagcgattgaacaggctagaaaacgcccttaaactcgctcatgctaatttgaaattaccccaattcggggcgttggtgagcaaaaataatcaagcgatagaattagaggcattaaaaaggggcgataaaattgaattaagtaatgaaaaaaccagagcgagcgctgaaattttgagcgtggatagggtgtag

SEQ ID NO: 22482 - DNA, 2571 bp, Helicobacter pylori
atgaatttatttgaaaaaatgactgaccaattgcatgagactttagacagcgcgctcgctttagccttacaccataaaaacgctgaagtaacgcccatgcacatgctttttgccatgctcaataattcccaaggcattctcattcaagccttacaaaaaatgcctgtggatattcaagctttaaggcttagcgttcaaagcgagttgaataagttcgctaaagtttcacaaatcagcaagcaaaatatccaattaaaccaagctttaatccaaagtttagaaaacgctcaaggcttgatggctaaaaggggcgattctttcatcgctaccgatgtgtatcttttggcgaatatgggtctttttgaaagcgttctaaagccttatttagacgctaaggaattgcaaaaaactttagaatctttaagaaaaggcaggactattcaggataaaaacgacgattccaatttggaaagtttggaaaaatttggcattgatttgacgcaaaaagccctagaaaataagctggatcccgtgatcggaagagatgaagaaatcattcgcatgatgcaaattttgataagaaaaacaaaaaataaccctattttactgggcgagcctggagtggggaaaacggcggttgtggaagggttagcccaacgcattatgaataaagaagtgcctaaaacgcttttaaacaaacgagttattgctttagatctaagcttattggtggctggagcgaaatacagaggcgagtttgaagagcgcttgaaaaaggtgattgaagaagttaaaaaaagcgcgaatgtgattttatttattgatgaaatccacacgatcgtgggggctggggctagtgaggggggcatggatgcggctaacattttaaaacccgcgctcgctaggggggaattgcacacgattggagcgaccactttaaaagaataccgcaagtattttgaaaaagacatggcattgcaaaggcgtttccaacccattttactcaatgagcctagcatcaatgaagctttacagattttaagagggttaaaagaaactttagaaacgcaccataatatcactatcaatgactccgcgctcatagcgagcgctaaactctctagccgttatattaccgataggtttttacccgataaggcgattgatttgattgatgagggggcggctcaattaaaaatgcaaatggaatcagagccggcaaaactctctagcgttaaacgctccatccaaagattagaaatggaaaaacaagcccttgaaatggaaaaaaaagagagcaatgccaaacgcatgcaagaaatccttaaagaattgagcgatttgaaagaagaaaaaatccaattagaagcgcaatttgaaaacgaaaaagaagtgtttaaagaaatttcacgcttgaaaatggaaatggaaagtttgaaaaaagaggctgagaggtttaagcgcaatggggattaccagcaagcgggtgaaattgaatactctaaaatccctgaaaataaaaagaaagaagaagaattgcaacgtaaatgggaagcgatgcaacaaaacggggcgttattgcaaaacgctttaaccgaaaacaacatcgctgagatcgtgagccaatggacgcacatccccgtccaaaaaatgctccaaagcgaaaaaaatagggttttaaacattgaaagcgaattgcaaaaaagggtggtagggcaagaaaaagcgatcaaagcgatcgctaaagcgattaaaaggaataaggccggccttagcgatagcaacaagcccatagggagtttcctctttttagggccaacaggcgtgggtaaaaccgagagcgctaaagctttggcgcaattcttgtttgatagcgataaaaatcttatacgaattgacatgagcgaatacctagaaaagcatgccatgagccgtcttattggggccgctcctgggtatgtgggctatgaagaaggcgggcaattgaccgaagcggtacgcagaaaaccttatagcgtggtgctgttagacgaagtggaaaaagcccatccggatgtgtttaacctcttgttgcaggttttagatgaaggacatttaaccgatagtaagggcgtgagggtggatttcaaaaacacgattttgatcttaaccagcaatgtggctagtggtgcgcttttggaagaaaatttgagtgaagccgagaagcaaaaagcgattaaagagagcttgaggcaattctttaagccggaatttttaaaccgcttagatgaaatcatctcctttaacgccctagatagtcatgctgtcattaatatcgtggggatactttttgaaaacattcaaaaaaaagcgcttgaaaggggcattaatataaccctagacgaagaggcaaaagaattgatcgccgaagcgggatttgacagattctatggcgctagacccttaaagcgcgcgctctatgaaatggtagaagacaagctcgctgaactcattttagaggataaagttaaagagaatgacagcgtggcatttgtggtagaaaataacgagattgtgcctaagattaagtga

SEQ ID NO: 22483 - DNA, 1137 bp, Helicobacter pylori
atgctgttaaaaaacgcttcgttttatgatgatgaagttttaaaaagagcggatatccgcttaaaagattccctcattacagagattaaagaaaacttaagccctattaataatgaagaagtgattgagtgcagggatttattcgtgctgccaagcttcattgatttgagcgttactggtttggagggttatgaaaatttaaaacaaaaggcttttaaagggggggtagggttactcaatgtttttaattgcgatcaaagcggcattaaaaacatcatggcaattaaaaacaaccaactagctgacatcgccacgcttaaaaataaagggggggaaattttaatcgcgccatctgacgcttttttagaactcattagccactacgccaaatcctacaacttgcctcttttaatctctttagaaaattcttttgaagccctaaatagtggggaattagcctatgaattggggcaaaattttgtggaaaatgcgtttgaaaacacgcgcttggtgcgtttcatggaagtttctagagcgttacaaatccctgtgcttttagataaagtgaatagtatcaccacgctcaaactcatcaaagcctttaatgatttaggggcgaaattacaagcccaaacgcccttaagccatttagttttagatgagagcgtgtatgaagattatgagccacgatttaaaatcgctcctcctttaagggataaagaaagccaaaacgccctaaaagaagccctaaaaaataacgaaatcgccatgctcacaagccttcatgcttctaaaaattctaacgcacagctttttgaagaaagcgcttttgggtgtgagagcatagaggacgcttttagcgtggcttatacttttttagttcaaaaaaaggttatcagcttccaacaactcattaaagtcatggcgattaaccaagcgaagtttttaaaactcaatgcaggcgaggttaaagaaaaccaattagccaatttgatgatcgtggatttaaacgctcaaacaagagtgagtaatcaaaattcgcccttttatggtttggaattgtatggcgaagtgcaaagaatgatcttaaaagggcaaaccacatttattaaggagaatgcatgcaagaaatcatag

SEQ ID NO: 22484 - DNA, 1230 bp, Helicobacter pylori
atgcaagaaatcataggagcgtctttagtttttttgtgcaatgaaaagtgcgaagtgttagaagattatggcgtagtctttgatgaaaagattgttgaaataggcgattatcaaagtttaacgcttaaataccctcacttaaaggcgcagttttttgaaaattccgttctgttgcccgcttttatcaacgcgcacacccattttgaattttccaacaacaaggcgagttttgattacgggagtttttctggctggttagggagcgtgttaaacaatgggggggcgattttagaaaattgccaaggggctattcaaaacgctatcagcacgcaattaaaaagcggggtggggagcgtgggagcgatttctaaccacctgatagaagttaatttgttaaaagaaagccctttgaatgctgtcgtgtttttagagtttttagggagcagttattctttagaaaaattaaaagcgtttgaggccaaatttaaggaattaaaagatttagaagataaaaaacttaaagcggctctcgctgtgcatgccccttattcggtccaaaaagacatggctttgagcgtcatccaattagccaaagattcacaaagcctgctttctacgcattttttagaatcgcttgaagaattagaatgggtagaaaactctaaagggtggtttgaaaatttttaccagcattttttaaaggagtctcatttcaaatcgctctataagggcgcgaacgattacattgacatgtttaaagacacgcacactttattcgtgcataaccagttcgcttctttagaagcgttaaaaaggattaaatctcaagtcaaaaacgcttttttaatcacatgccccttttctaaccgcctattgagcgggcaagcgttggatttagaaagaactaaagaagccggtttgagcgtgagcgtggccactgatggcttgagttctaacatttcgctgagccttttagacgaattaagagcgtttttgctcacccataacatgccgttattagaattagctaaaatagcccttttaggggcgactaggcatggggctaaagctttagctttgaataatggcgagatagaagccaacaaaagggcggatttgagcgtgtttggttttaatgaaaaattcactaaagagcaagcgattttgcaatttttattgcatgctaaagaagtggagtgcttgtttttaggggggaaaagggtgatctaa

SEQ ID NO: 22485 - DNA, 255 bp, Helicobacter pylori
atgtcattattggtgaatgatgaatgcattgcgtgcgatgcttgcagagaagaatgccctagtgaggcgattgaagagggcgatcccatttataatattgatccagacagatgcacagagtgttacgggtatgatgatgatgagcctcgttgcgtgagcgtatgccctgtagatgcgattttaccggatcctaataatgctgagagcaaagaggaattgaaatacaaatacgaaagcttaaaagagcaagattaa

SEQ ID NO: 22486 - DNA, 1023 bp, Helicobacter pylori
ttgaaaatagcgattgtcaggctttcagcgcttggggatattatcgtgagcgcggtgtttttggcggtgattaaagagtgtctgcctaacgcccaaatagaatggttcgtggatgaaagatttagtgcgattttagagcattccccctatattgataaattacaccccatcgctttaaaaagtgcactcaaaaccttgaatcctttgaagattttcaaactttttaaatctttaagggcttatgaatacgatataatcattgacatgcaaggcctagtcaaatccgctctcatcacgcaaatgttgaaagcccctaaaaaagtcggctttgattacgcttcggctagagagggtttgagcatgtttttttactcgcaaaaagtttctatcgcttatgatgagcctgttttaaagcgcaatttcacgctcctttctcatgccctaaacttgccccaaaaagaaatttcaaaagaaatttcagagagcttaagctctagggctaaagcgttttcttaccagccttctccaaaaattgatgcgttaaatttgaataagaataagccaaaaatcctttttattttagaaacttctaaaatcaataaaacttaccccatagagcgttttaaagaattagcgttaattttagaaaattttcaaatttgcttgttatggcatgctgatgaatataaagccactacgctttatcacgctttaaaacaccaacgcgatgtgttattgctccccaaactcactttaaacgaggttaaggcgttgctctttaaaatggatttgattattgggggcgatacgggcatcacgcatttagcatgggcgttgcaaaaacccagcatcaccctttatggcaacacgcccatggagcgttttaaattagaaagcccgatcaatgtttcgctcaccggtaattcaaacgccaactaccataaaaaggatttttctatccaaaatatagagcctaaaaaaattaaagaatgcgttttaaacatcttaaaggaaaaagaatga

SEQ ID NO: 22487 - DNA, 987 bp, Helicobacter pylori
atgacttacaaagaacgactcatacacgaaaaaatattgaaacaagacgacaagggttttaaaacagaactgcgcattttgagtatttttatcgtggaatctttagtgaatattttggggtttattttagctaaaatgccccattcgtggtttttaaggtgcattaaagcggtggcgtggctcatgaaaacttttgataagtgccgttattttgacgctaaggccaatttggattttgtgtttggggattctaaaagcgaagaagagaaaaaaaggatcattaaaaagggttatgaaaattttgctttcattattttagaaactattagagtgatctttatccctaaagatgaatacgacgctcgtttcacgctcatcaatgaagaaaatgtgtggaaatctttaaacaaggaaggccaagcgatcactttatgcatgcattttggctattgggaagcggtaggcacgactttagcgcaatattatgaaaattatggtagggggtgtttggggcgtttgactaaatttgcccctatcaatcacatgattatgagtaggcgagaggcgtttggggtgcgttttgtcaataaaataggggcgatgaaagaactcattaaaatgtataatcaaggcaatggtctggtggggattttagtggatcaaaatgtcgtgcctaaagatggggtggtggtgaaattctttgatagagacgctacgcacaccacgatcgcttctattttgtcgcgccgttataatatagatattcagccggtattcattgattttaatgacgattattcgcattatacagcgacctattatccgagtatccgctctcaaatcaccgataacgcgcaaaacgatattttagaatgcacgcaagcccaagcgagtttgtgcgaagaggtgattagaaaccacccggaaagttatttttggttccataggcgttttaaaagcacccaccctgagatttatcaaagatag

SEQ ID NO: 22488 - DNA, 1116 bp, Helicobacter pylori
atggattttcaactccaagcgactgacaataacgcgcgagctggtcttttaaatttagcccattctcaagtggcaacgcctgtttttatgcccgtaggcacgcaaggctgcatcaaatctttagacgctacagatgcgcaagaaattttaggcgctaaactcattttagccaacacctatcacatgtatttaaggccgggtgaaaaggtcgttgaggagttagggggcttgcatcgtttcgctcaattttatgggagttttttaaccgatagtggagggtttcaagcctttagtttgagcgataatgtcaaattgcaagaagatgggatcgtttttaaatcccatattgatgggagcaagcatctattcacgcccgctaaagttttggacattcaatattctttgaatagcgatattatgatggttttagacgatttagtgggcttgcccgctcccttaaaacgccttgaagaatccattaaaagaagtgctaaatgggcgaatatgagcctagaataccacaaagaaaaaaaccgcccgagcaacaacctttttgccattatccagggcgggacgcatttgaaaatgcgcagccttagcgtgggattaacgcatgagggttttgatggctacgctataggcggtttagcggtgggggaaagcgctgatgaaatgctagaaaccatcgcgcacaccgcccccttgctccccaaagacaagcctcgctacttaatgggcgtaggcacgcctgaaaatatcctagacgctatcagtttgggggtggatatgtttgattgcgtgatgcccaccagaaacgccagaaacgccacccttttcacgcattctggcaaaatttctatcaaaaacgcgccctataaattggataatacccctattgaagaaaattgcgcatgttatgcttgcaaacgctattctaaagcctatttgcaccatttatttagggctaaagaactcacttacgctcgtttggccagcttgcacaatttgcatttttatttagagctggtgaagaacgccagaaacgccattttagaaaagcggtttttgagttttaaaaaagaatttttggagaaatacaactcccgctctcattga

SEQ ID NO: 22489 - DNA, 8682 bp, Helicobacter pylori
atgaaaaagtttaaaaagaaaccaaaaagtatcaaacgatcgcatcaaaatcaaaaaacaatcttaaagcgtcctttatggcttatgcctttactcatcagcgggtttgctagtggggtgtatgcgaataatctgtgggatttgttaaacccaaaagtggggggtgagtatgtgcattgggttaagggcagtcagtattgtgcatggtgggaatttgctgggtgtttaaagaatgtatggggggcaaatcataaaggctatgatgctggaaacgccgctaactatttgtcttctcaaaactatcaagctatttcggtgggtagtgggaatgaaacggggacttatagtttaagcggttttaccaattatgttgggggcaatctcacgatcaatctaggcaatagcgttgttttagatttaagcggttctaatagtttcacttcgtatcaaggttataatcaaggcaaagatgatgtaacatttacggttggcgcaatcaatttaaacggcactttagaagtgggtaatcgtgtgggatcgggagctggcacgcacaccggcacagccactttaaacttgaacgctaataaggtcaatatcaattccaatatcaacgcgtataaaacttcgcaagtgaatataggcaacgctaacagcgttattaccattggttcggtttctttgagtggggatgtttgcagttctttagctagcgttgggataggggctaattgctccacttctgggcctagctattcttttaaagggacgactaacgctactaacacggcgtttagtaatgcaagcggcagtttcacttttgaagagaacgccacttttagcggggcgaaatggaatggggggacttatacctttaataaagagtttagcgctaccaataacaccgcctttagtagcggtagttttaattttaaaggtgtaagctcttttaatggtacttcgtttagtaacgcttcttatacttttgacaatcaagccactttccaaaacagctcctttaatggggggacttttacttttaataaccaaactaatccaactaacaacgctcagcacccccaaattcaaaacagctcttttagtggtaacgctaccactcttaagggctttgtgaatttccagcaagcctttaacaattcaaaccaccaactaacgatccaaaacgcttcctttaataacgccacttttaacaataccggtaaaatcactatagaaaaagatgcgagttttaataacacgacattcaacacttctgttgatacaaacaacatgagtgttaccggtggcgttactttaagcggtaaaaatgacttgaaaaatggctcaacccttgattttgggagttctaaaatcactctcgctcaagggacgactttcaacctcacaagtttaggcagtgagaagagcgtaacgattttaaattctagcggtgggatcacttatagtaaccttttaaaccatgcaatcaacggcttgacaagtgccttaaaaacgaacgaaagcctttcaaatccgcaaagtttcgctcaaggtttgtgggatataatcacttacaatggggttaccgggcagcttttgaatgaaaacgctgcaacatctaaacccactgactcttcgccctctaaatcctctacaaactctacgcaagtctatcaagtgggttacaaaataggggatactatctacaaactgcaagaaactttcagccacaattccattattattcaggctttagagagcgggacttacacgccaccccctgtcattaacggctccaaatttgacttatccgcttcaaattatatcaatgctgacatgccttggtatgaccataaatattacatccctaaatcccaaaattttacagagagcgggacttattacttgccgagcgtccaaatatgggggagctacactaactcgtttaaacaaacttttagcgcaaatggtagtaatctggtgattgggtataactcaacatggactgatcataatgtctcttctagcggcacggtgtcttttggggacacttcagggagcgctcttaatgggcattgcggaccttggccgtattaccaatgcacaggcacgactaacggcacttatagcgcctatcatgtgtatatcacagcgaatctgcgttctggcaatcgtataggcaccggtggggcagctaatctaatctttaatggggtagatagtatcaatatcgctaacgctaccatcacgcaacataacgccggaatctattcaagctctatgactttttccacgcaaagcatggataattcgcagaatttgaatggtctaaattctaacggcaaactttcggtgtatggcaccactttcactaacgaagctaaagatgggaaattcattttcaatgcagggcaagcggtttttgaaaacaccaactttaatggagggagttaccaattcagcggcgatagcttgaatttttcaaacaacaaccagttcaatagcggttcgtttgaaattagcgcaaaaaacgcttcgttcaataacgctaactttaacaacagcgcttcttttaatttcaataattctaacgcgaccacttcgtttgtgggggatttcactaacgctaattcaaatttgcaaatcgccgggaacgctgtttttgggaactctactaatggctctcaaaataccgctaattttaataataccggctctgttaatatttcagggaatgcaacctttgataatgtggtgtttaatggccctacgaacacgagcgtgaaagggcaggttactttaaataacatcactttaaaaaacctgaacgcccctttgtcttttggcgatgggacgattacttttaacgctcattcggtgattaatattgctgaatctatcactaatggcaaccctatcactcttgtaagctcttctaaagaaattgaatacaacaacgctttcagtaaaaatctatggcagctcatcaactaccaagggcatggggcaagcagtgaaaagctcgtctctagcgcgggtaatggcgtttatgatgtggtgtattctttcaataaccaaacctacaatttccaagaggttttttcacaaaacagcatttctatccggcgtttgggcgttaacatggtgtttgattatgtggatatggaaaaatcggatcatttatattatcaaaacgctctcggttttatgacctacatgcctaatagctataacaataatttagggaatgcaaacaacaccatttactattacgacaagagcattgatttttatgcgagcgggaaaactctattcactaaagcggaattttctcaaacattcaccgggcaaaacagcgcgatcgtttttggggctaaaagcatatggacgagcttaagcgatgcaccgcagtctaacaccatcattcgctttggggacaataagggagcagggagtaatgatgcgagcgggcattgctggaatttgcaatgcataggctttattacagggcattatgaagcgcaaaagatttacatcaccggtagcattgaaagcgggaatcgcatttctagcggtgggggcgcgagccttaattttaacgggcttcaaggcattcttttaacgaacgcgactttgtataaccgcgccgctggcacgcaaagctcgtctatgaattttatctctaacagcgcgaacattcaggctcaaaactcctattttatagacgataccgcacaaaatggcggtaaccctaatttcagtttcaacgctttgaatctggatttttctaacagctcttttagaggctatgtggggaaaacgcaatctgtttttaaattcaatgccaagaatgcgatcagtttcaccaacagcacgaatttaagctctggtttgtatcaaatgcaagctaaaagcgtgttgtttgacaattccaatttaagcgtttcagtggggacaagcagtattaaagccaatgcgatcaatctttctcaaaatgcctctattaatgcgagcaaccattcaaccttagaacttcaaggcgatttgaatgtgaacgacaccagctcgctcaacctcaaccaaagcacgattaatgtttccaataacgccacgatcaacgattatgcgagcttgattgcgagtaatggctctcaccttaattttaacggggcggttaatttcaattcagcgaatattactacgagtttgaataattcctctatcgtgtttaagggggcggtctctttaggagggcagtttaatttaagcaataactcttctttagatttccaaggctctagcgctatcacctctaacacggcgtttaatttctatgataacgctttttctcaaagccccatcactttccatcaagcccttgacattaaagcgcccttaagtttgggaggcaaccttttaaaccctaacaacagcagcgtgctggatttaaaaaacagccagcttgtttttggcgatcaagggagtttgaatatcgctaacattgatttactaagcgatctaaatgataataaaaatcgtgtgtataacatcattcaagcggacatgaatagtaattggtatgagcgtatcagcttctttggcatgcacatcaatgacgggatttatgatgctaaaaaccaaacttatagtttcactaacccccttaataacgccctaaaaatcaccgagagctttaaagacaaccaactaagcgttacgctctctcaaatcccgggtattaaaaacacgctctataacattggctctgaaatttttaactaccaaaaagtttataacaacgctaatggcgtgtattcttatagcgatgatgcacaaggcgtgttttatctcacaagcaacgtgaaaggctattacaaccctaaccaatcctatcaagccagcggcagtaacaacaccacgaaaaataataatctaacctctgaatcttctatcatctcgcaaacctataacgcgcaaggcaaccctattagcgcgttgcacatctataacaagggctataatttcaacaatatcaaagcgttagggcaaatggctctcaaactctaccctgaaatcaaaaaggtattagggaatgatttttcgccctcaagtttgaacgctttaaactctaatgcgctaaaccaacttaccaaactcatcacgcctaacgactggaaaaacattaacgagttgattgataacgcaaacaattcggtggtgcaaaatttcaataacggcactttgattgtgggagcgactcaaatagggcaaacagacaccaatagcgcggttgtttttgggggcttgggctatcaaacaccttgtgattatactgatattgtgtgccaaaaatttagaggcacttatttaggacagcttttagagtccagctcggctgatttgggctatattgacacgacttttaacgctaaagaaatttatcttaccggcactttagggagcgggaacgcatgggggactggggggagcgcgagcgtaacttttaacagccaaacttcgctcattctcaatcaggctaatatcgtaagctcgcaaaccgatgggatctttagcatgctgggtcaagagggtattaataaggttttcaatcaagccgggctcgctaatattttgggcgaagtggcggtgcaatccatcaacaaagccgggggattagggaatttgatagtaaatacgctagggagtaatagcgtgattggggggtatttaacgcctgaacaaaaaaatcaaaccctaagccagcttttagggcagaataactttgataatctcatgaacgatagcggtttgaatacggcgattaaggatttgatcagacaaaaattaggcttttggaccgggctagtggggggattagccggactagggggcattgatttgcaaaaccctgaaaagcttataggcagcatgtcaatcaatgatttattgagtaaaaaagggttgttcaatcagatcaccggctttatttccgctaacgatatagggcaagtcataagcgtaatgttgcaagatattgtcaaaccgagcaacgctttaaaaaacgatgtagcggctttaggcaagcaaatgattggcgaatttttaggccaagacacgctcaattctttagaaagcttgttgcaaaaccagcagattaaaagcgttttagacaaagtcctagcggctaaaggtttagggcctatttatgaacaaggcttgggggatttgatacctaatcttggtaaaaaagggcttttcgctccttatggcttgagtcaagtgtggcaaaaaggggattttagtttcaacgcacaaggcaatgtttttgtgcaaaattccactttctctaacgccaatggaggcacgctctcttttaacgcaggaaattcgctcatttttgccggaaacaatcatattgcattcactaaccacgctggaactcttcaattattgtccgatcaagtttctaacattaacatcaccacgcttaacgctagcaacggccttaagattaacgccgctaataacaatgtttctgtgtctcaaggcaatctgtttgtcagcgctagctgcgcgcaacaaagcgatccaactacagctaatattgcaaacccttgcgcgcttagcgcccaaagcacgaatggcgcttcttctaataatgcgtcaaataacgcgccaatcgccttgagtaataacgatgaaagcttgatggttgcggcgaatgatttcaatttttcaggcaatatttacgctaatggggtggttgatttttcaaagattaaaggctctgcaaacattaaaaacctgtatctttacaataacgctcaattccaagccaacaatctcactatttccaatcaagcggtgttagaaaaaaacgccagctttgtaacgaataatttaaacattcaaggagcgtttaacaacaacgccacgcaaaaaatagaggtgcttcaaaatttagtgatcgcttcaaacgcttctttaagcaccgggatttatgggttagaagtagggggggctttgaataattctggagcgatccattttaatttagaaaatacccaaacgccaacgccgctcattcaagcagaggggatcattaacctcaacaccacccaaacgccttttatgaatgtcaataacagcatggccaataatacgacttacactttattaaaaagcagccgttacattgattacaatatcaaccccaacagcttgcaatcgtatttgaatctctacactttaatcaatatcaacgggaaccacatagaggaaaaaaacggcgcattgacttatttgggccaacgggttttgttgcaagataaggggttattgttaagcgtagcgctgcccaactcaaacaacgcttctcaaaacaacattttaagcctttctgtcctttataaccaagttaaaatgtcttgcggcgataaagcgatggattttaccccccctaccttacaagattacattgtgggcattcaagggcaaagcgcgctcaatcaaattgaagctgttggggggaacgctatcaagtggctttcaacattgatgatggagactaaagaaaacccgttttttgcgccgatttatttaaaaaaccactctttgaatgaaatcttaggcgtaacaaaagatcttcaaaacaccgcaagcttgatttctaaccctaattttagagataacgctaccaatcttttagaattggcgagttacacccaacaaaccagccgtttaacaaaactctctgattttagatctagagagggagagtctgatttttctttgttagagcttaaaaacaagcgttttagcgatcctaatccagaggtttttgtcaaatactctcaacttagcaaacacccaaataacctttgggttcaaggggtgggaggagcgagctttatttctgggggcaatggcacgctttatggcttgaatgcgggctatgacaggttggttaaaaatgtgatccttgggggttatgtggcttatggctatagcgactttaatgggaacatcatgcattctttgggtaataatgtggatgtggggatgtatgcgagggcttttttaaaaaggaacgaattcactttgagcgcgaatgaaacttatggaggcaatgcaactagtatcaattcttctaattctttgctctctgtgttgaaccaacgctacaactacaacacctggacaacgagcgtgaacgggaattacggctatgatttcatgttcaaacaaaaaagcgtggtgctaaaacctcaagtgggtttgagctatcatttcataggtctaagtgggatgaaaggcaatgatgccgcttacaaacaattcctcatgcattcaaacccctctaacgaatcggttttaacgctcaacatggggttggagagccgtaaatattttggtaaaaattcctattattttgtaacggcgagactaggtagggatcttttgatcaaatctaaaggcagcaatacggtgcgttttgtgggcgaaaacactttattgtatcgcaagggggaagtttttaacacttttgcgagcgtgattacagggggcgaaatgcatttgtggcgtttggtgtatgtgaatgcgggggtggggcttaagatgggcttgcaataccaagatattaatataaccgggaatgtgggcatgcgagtggcgttttag

SEQ ID NO: 22490 - DNA, 1680 bp, Helicobacter pylori
atgatttttggggattttaaatatcaaaaaagcgttaaaaaactcacagccaccaatcttaatgagcttaaaaacgccctggatttcatctctcaaaatagggggaatgggtattttgtggggtatcttttatatgaagcgcgcttagcgtttttagatgaaaattttcaaagccaaaccccttttttgtattttgaacaatttttagaaagaaaaaaatattctttagagcctttaaaagagcatgcgttttaccctaaaatccatagttctttagatcaaaaaacttatttcaagcagtttaaagccgttaaagagcgtctcaaaaacggcgacacctatcaagtgaatctcacaatggatttatttttagacactaaagccaaaccaaagcgcgtttttaaggaggtggtacacaaccaaaacacgccttttaaggcttttatagaaaatgagtttgggagcgttttaagcttttcgccggaattgttttttgaattagagtttttagatacagcgattaagattattacaaaacccatgaaaggcacgatcgctcgctcaaaaaaccccttaatagatgaaaaaaaccgattgtttttgcaaaatgatgacaaaaacagaagcgaaaatgtgatgattgtggatttattgcgtaacgatttgagccgcttggccttaaaaaatagcgtgaaagtcaatcaattgtttgaaatcatcagcttgcctagcgtgtatcaaatgataagcgagattgaagcgaaattgcccctaaaaaccagcttgtttgagatttttaaggcgttgttcccttgcggctctgtgaccggatgccctaaaatcaaaaccatgcaaatcattgaaagtttagaaaaacgccctaggggggtgtattgcggggcgataggcatggttgaagaaaaaaaagccctttttagcgtgcctatccgcactttagaaaaaagagtgcacgaaaattttttgcatttaggggtagggagtggggtaacttataaaagtaaagcgccaaaagaatatgaagaaagctttttgaaatccttttttgtgatgcccaaaatagaatttgagattgtagaaacgatgaaaattatcaaaaaggatcaaaaattagagattaataataaaaacgcccataaagaacgcttaatgaatagcactcgatattttaactttaaatacgatgaaaatcttttagattttgaattagaaaaagaaggggttttaagggttttactcaataaaaagggcaagctcattaaagaatacaaaaccttagagcctttaaaaagcctagaaatccgtttgagtgaagcccccattgataaacgcaatgattttttataccataagaccacttatgcccctttttatcaaaaggctcgagcgctcattaaaaagggcgttatgtttgatgaaatcttttataaccaggatttggaactcactgagggcgctaggagcaatcttgttttagaaatccataacaggcttttaaccccttattttagcgcgggcgcgttaaacgggacgggtgttgtggggttgttaaaaaagggtcttgttgggcatgcacctttgaaattgcaagatttgcaaaaagcgtctaaaatctattgtattaacgcgctatatggcttagtggaagtgaaaataaaataa

SEQ ID NO: 22491 - DNA, 315 bp, Helicobacter pylori
atgtcatacgcaatattcaagcatggcggtaagcaatataaagtcgttgaaggcgatattgttttattggacaaaatggataaagagcctaaggctttagtggaattagtggaagtgttagccgtatccaaagagggcaaactctcttgcgggaaaccctttgtgaatggggctaaaattgaagcggaagtgatcaatgaagggcgcggcaaaaaagtcatcactttcaaaaaacgccgccgaaaagacagcaaaaccaagcgtggttttagaagagatttcactcgtgttagaatcactaaaattgtagcataa

SEQ ID NO: 22492 - DNA, 267 bp, Helicobacter pylori
atggcacacaagaaaggtcaagggagcacgcagaataacagagattctgcaggaagacgcttaggcgtgaaaaaatttggctcagaatttgtgagagcagggaatattatcgtgcgccaaagaggcactaaaatgcatcctggtaataatgtgggcatggggaaagaccataccttatatgcgctcatagatggcgttgtgaagtttgagcataaagacagaaaccgcaaaaaggtttctgtggttagtcaaaattttggggagtag

SEQ ID NO: 22493 - DNA, 1650 bp, Helicobacter pylori
atgaataatgtttttgttaagggtttgtttttttttcttttattgtttgggttttttttgaaagcttcagaaagcccaaacgctactcttaatccatctaaagaaaatgtttctgttgaagagcaaaagcgttttggaggcgttttagtttttgcaagaggcgctgatggctcgagcatggatcctgctttagtgactgatggcgaaagctatgtagcaacgggcaatatttatgacacgctcgtgcaattcagatacggcaccacagaagttgaacccgccttagcgacaagctgggacatatccccagatggtcttgtatatacctttcatttacgcaaaggggtttatttccaccaaacgaagtattggaataaaaaagtagagtttagcgctaaagatgtgctgttttcgtttgaacgccagatggataaagctaaacgatattatagcccgggggctaaaagctataagtattgggaaggcatgggcatgtctcatattattaagagcattgaagctttagatgactataccattagattcacacttaatgggccagaagccccgtttttagcgaatttgggcatggactttttgagcattttgagtaaggattacgctgattacctggctcaaaataataaaaaagacgagttggctaaaaaacctattgggacagggcctttcaaattctttttgtggaataaagatgaaaaaatcattcttttaaaaaatcaagattattgggggcctaaagcgtatttggataaggtggtggtgcgcaccattcctaattcttccactcgcgctttagcgttgcgcaccggcgaaatcatgctcatgactgggcctaatctcaatgaagtggagcaattagaaaaagtccctaatatcgtggtggacaaaagtgctgggttgttggcgagttggctttcgttgaacacgcaaaaaaagtattttgacaaccctttggtgcgtttggctatcaatcatgcgatcaatgcagatgattacatcaaagtgctttatgaaggctttgctcaaaaaatggtcaatcctttcccgcccaccatatggggttataactacaatatcaaaccctatgaatacgatttgaaaaaggctaaggagttgttgaaacaagcgggctatcctaacggctttaaaaccactatttttaccactgccactcgtaacccaaaaggagcggtgttcatacaggcgagcctggctaaaattggcattgatgtgaaaattgaagtgtatgagtggggggcttatttgaaaagaacgggtctgggcgaacatgaaatggcgttttcaggctggatggcagacattgcggatccggataatttcttatacaccttatggagcgagcaagccgcctcagctatacccactcaaaaccattccttttataaaaataaggagttttccaatctgctcataaaggctaaacgcgtttcggatcaaaaagagagggaagccctttatttaaaggcacaagaaattatccataaagacgcgccttatgtgcctttagcctatccttattcggtggtgccgcatttgtctaaagttaagggttataaaacgaccggagtgagcgtgaatcgcttctttaaggtgtatttagaaaaataa

SEQ ID NO: 22494 - DNA, 1005 bp, Helicobacter pylori
atgctgagttttatcattaagcgtattttgtgggcgatccccacgctgtttggagtgagtatcattgtgtttatgatggtgcatttagtgccaggagatccggcattagtgattttaggtgaaaaggccaatcaagccgctattgatgctttaagagagcaatttggattgaataagcccttgatagagcagtattttttctttatcaataatgtgttgcatggcaattttggcacttctatcatgaccggtgagcctgtgatgcatgagttttggcaacgcttcccggccacggtggaattagctttgatcgctctgtttatggctcttgttttgggtattagcgttggcgtgttagctgcgatcaaacgctatagcgtgtttgattattccagcatgacttttgctttagccgggatttctatgccggtgttttggctagggctcatgctgatttatatctttagcgtgcaattggggtggttgcctgtttttgggcgtttgagcgatgtgtattatttagatggccccacaggtctttatttgatagacagcctgatcgcaagggattatggggcgtttatggatacgatcaagcacttgattttgcctagcattgtgttagccacggtttctaccgctgttattgccagaatgactcgcgcgagcatggcagaagtgtctaaagaagattatgtgcgtaccgctaaagctaaggggtgtagctcctttagggtgatttttgtgcacactttgcgtaatgctttaatccctgtaacgactatcgcaggcttgatgttggccgggcttttaggggggagcatgataactgaaacggttttctcatggcctgggattggtaagtggattgttaatgcgctcaaccagcgcgatttcccgattatccagtccatgtctttgattattgccatgatgtatattggggctaatctcttagtggatattttatacgcttttattgatcctagaataaggttgtcataa

SEQ ID NO: 22495 - DNA, 864 bp, Helicobacter pylori
atgattttagaagttaaagatttaaaaacttattttttcaccgataagggcgtgaataaagcagtggatggtgtgagttttggtttgaaaaagtctcaaacgctctgcattgtaggggagagcgggagcgggaaaagcatcacttcgctctctattttagggttgattgaaaaaccgggtcaaattgtgggagggagcattcaatttttagggcaggatttgttgcaactcaaagaaaagcagatgcaaaaagaaattaggggtaaaaaaattggcatgatctttcaagagcctatgacaagcctaaacccttcctacacggtggggtttcaaatcaatgaagtgttgaaaatccaccaccctaacctcaataaaaaagaacgcttagaaagggtggtttatgaattagagcgtgtgggcattccccatgcaggggataaataccacgaataccctttcaatctcagcggggggcagcgccaaagggtgatgatcgctatggctatggtgtgtgagcctgaaatcttgatcgctgatgagcctacgacagccttagatgtaaccattcaagcgcaaattttagaattgatgaaagaattgcaacaaaaaaaaggcacttctattttgtttatcacccatgatttaggcgtggtggcgcaaatcgctgatgaagtggtggtgatgtataaagggcatgtggtggagcaagcgagtgcgaaagagctttttgctgatccaagacacccttatacgaaagctcttttaagcgcgatccctaaaccgggcaaagaataccgcaaaaaacgcttagagaccgtggatgaaaatgtggattatttgagttttcaaaaggagttgcgatga

SEQ ID NO: 22496 - DNA, 807 bp, Helicobacter pylori
atgaagctcttagaaattaaagaattgaaaaaatcctatgcgatagacagggggttattcaagcctaaaagagtgatccatgcgctcaatgggatcagttttgaagtggaacaaaatgaagttttgagcattgtgggggagagcggttgcgggaaaagcacgacagccaaaattttagccgggattgaaaggcaagatagcggggcgatttatttcaatggtaagcgccatttgcattttagcaaacaggattggtttgattaccgcaaaaaggtgcaaatgatttttcaagacccttattctagcctaaaccctcggtggaaagtgggcgagatcatcgctgaacccttgcttttaaattctcatttttcaaaaaaagaaatcaaaacaaaagtgctagagatcatgcaaaaagtgggcttgaaattagaatggatcgatcgttacccccaccaattttcaggcggtcaaaggcaacgaatcggcattgctagggcgctcattttgcatcctagcgtggtgatttgcgatgagcctgtgtctgcgctagacgtgtccattcaagcgcaagtgttgaatttgctcttggatttgcaaaaagaaatggggctgacttatatttttatcagccatgatttaggggtggtggagcatataagcgataaaatcatcgtaatgaatcaggggcaaatcgtagaaacgggggatgtggatagcgtgataagcgctccaaagcacccttatacgcagaaattactcaatgcggtgccgcatttggaaaaatccatgcaaagatttgccaaataa

SEQ ID NO: 22497 - DNA, 1083 bp, Helicobacter pylori
gtgtttgtagatagcgtggaaattatcatcgcttcgggtaagggggggcctggaatggtgagttttaggcgagaaaaatttgtcatcaaaggaggccctgatgggggcgatggaggcgatggaggcgatgtgtattttgaagtggataacaataccgacactctagcgagttttagaggcaccaaacaccataaggctaaaaatggggctccaggaggtacacgaaattgcgcgggcaaaaagggcgaagacaagatcattgtcgtgccaccaggaacgcaggtttttgtaggtgatgagttgtggcttgatttagtggaacctaaagaaagggtgttagccttaaaagggggcaagggggggttagggaatgcacattttaaaagcgcgactaaacaacaacccacttacgcgcaaaaaggcttagagggggttgaaaaatgcgtgcgtttggaattaaaactcatcgctgatatagggttagtgggcttccctaatgcgggtaaatccacgctcatttccaccatctctaacgctaagcctaaaatcgctaactatgaatttacgactctagtgcctaatttaggggttgtgagcgtggatgaaaaaagcggatttctaatggcggatattcctggcattattgaaggggctagcgagggaaagggcttagggattagctttttaaagcatattgaacgcaccaaagttctagcttttgttttagacgcttccaggctggatttaggcattaaagagcaataccaacgcttgaggttggagttggaaaaattttcatccgctttggccaataagccttttggggtgttgctcaataaatgcgatgttgtagaaaacattgatgagatgactaaggatttttgtgcctttttaaatttgggagcgcagaaattaaacgagtttggtttagagccgtatttagggtttttgcacccccatttaaccaatgattttgaaaataaccctaatgagcaatcagcgctctttgtcttgcccctttcagcggttagcgctcttaatgtgcatgcactcaaatttgtgttgttggaagcgttaccctaa

SEQ ID NO: 22498 - DNA, 966 bp, Helicobacter pylori
atgcccaaaatccctatcacgctcatcaccggttttttaggcagcggtaaaacgagttttttgagcgaatatttaaaccaaacagatcaccaaggcgtcgctcttatcatcaatgaaatcggtcaagccgctttggatcagcgcatcttaagcgttcaatattgcggtgaaaaaatgctctatcttaacgcagggtgcgtgtgttgcaacaaacgcttggatttagtggagtctctaaaagccacgctcaacaactatgaatggcacggcgaaattctaaggcgcatcatcattgaaactaccggtttagccaacccggcaccgattttatggacgattttgagcgacacttttttaggagtgcattttgagattcaaagcgtggtggcttgcgtggatgcattgaatgctagagagcatttaaccaacaatgaagctaaagagcaaatcgtttttgctgatagcgttttattgaccaaaacggatttacaaaacgatagcgcggctttaacaaaactaaaagagaggatacaagcccttaaccctagtgcagaaatttttgacaagagggcgatagactatgagagcctcttttcacgcaaaaatagggcgcgaaattttatgccaagaatgccaaaagattcgcactcgcaaggctttgagactttaagcattaattttgaaggcacgatggagtggagcgcgtttgggatttggctgagtttgttattgcatcaatacggcacacagattttacgcatcaaggggattattgacattggaagcggctttttggtgagtattaacggcgtgatgcatgtcatttacccgcctaagcatattttaaaggatcaaaacggctctaacctcgtttttatcatgcgccatttagagcgtgaaaaaatcttaaattccttaaagggttttaaggattttctcggcatcaagggttttgaaacccaataa

SEQ ID NO: 22499 - DNA, 2238 bp, Helicobacter pylori
atgaaaaaacacatcctttcattagctttaggctcgcttttagtttccactttgagcgctgaagacgacggcttttacacaagcgtaggctatcagatcggtgaagccgctcaaatggtaacaaacaccaaaggcatccaacagctttcagacaattatgaaaatttgaacaaccttttaacgagatacagcaccctaaacacccttatcaaattgtccgctgatccgagcgcaattaatgcggtgcgggaaaatctgggcgcgagcacgaagaatttgatcggcgataaagccaactccccggcgtatcaagccgtgtttttagcgatcaacgcggcggtagggttgtggaataccatcggctatgcggtcatgtgcgggaacgggaacggcacagagagtgggcctggcagcgtgatctttaatgaccaaccaggacaggattccacgcaaattacttgcaaccgctttgaatcaactgggcctggtaaaagcatgtctattgatgaattcaaaaaactcaatgaagcctatcaaatcatccagcaagctttaaaaaatcaaagtgggtttcctgaattaggcgggaacggcacaaaagtgagtgttaattacaattacgaatgcagacaaactgctgatatcaacggcggtgtgtatcagttctgcaaggctaaaaatggtagtagtagcagtagtaatggcggtaatggcagtagcacgcaaacaaccgcgacaaccacgcaagacggcgtaacgatcaccactacctataataataacaaagccaccgtcaaatttgacatcaccaataacgctgaacagctgttaaatcaagcggcaaacatcatgcaagtccttaatacgcaatgccctttagtgcgttccacgaataacgaaaacactccagggggtggtcaaccatggggtttaagcacatccgggaatgcgtgcagcatcttccaacaagaatttagccaggttactagcatgatcaaaaacgcccaagaaataatcgcgcaaagcaaaatcgttagtgaaaacgcgcaaaatcaaaacaacttggatactggaaaaccattcaacccttacacggacgccagctttgcgcaaagcatgctcaaaaacgctcaagcgcaagcagagatgttcaatttgagcgaacaagtgaaaaagaacttggaagtcatgaaaaacaacaataatgttaacgagaaattagcaggatttgggaaagaagaagtaatgaccaattttgttagcgcctttttggcaagctgcaaagatggtggcacattgcctaatgcaggggttacttctaacacttggggggcgggttgcgcgtatgtgggagagacgataagcgccctaaccaacagcatcgctcactttggcactcaagagcagcagatacagcaagccgaaaacatcgctgacactctagtgaatttcaaatctagatacagcgaattaggcaacacctataacagcatcaccaccgcgctctccaaagtccctaacgcgcaaagcttgcaaaacgtggtgagcaaaaagaataacccctatagccctcaaggcatagagaccaattactacctcaatcaaaattcttacaaccaaatccaaaccatcaaccaagaactagggcgtaacccctttaggaaagtgggcatcgtcaattctcaaaccaacaatggtgccatgaatgggatcggcattcaggtgggctataagcaattctttggccaaaaaagaaaatggggcgctaggtattacggcttttttgattacaaccatgcgttcatcaaatccagctttttcaactcggcttctgacgtgtggacttatggttttggagcggacgcgctttataacttcatcaacgataaagccaccaatttcttaggcaaaaacaacaagctttctttggggctttttggcgggattgcgttagcgggcacttcatggctcaattctgagtacgtgaatttagccaccgtgaataacgtctataacgctaaaatgaatgtggcgaatttccaattcttattcaatatgggagtgaggatgaatttagccagatccaagaaaaaaggcagcgatcatgcagctcagcatgggattgagttagggcttaaaatccccaccatcaacacgaactattattcctttatgggggctgaactcaaatacagaaggctctatagcgtgtatttgaactatgtgttcgcttactaa

SEQ ID NO: 22500 - DNA, 1626 bp, Helicobacter pylori
atgcacactctcattaagggcattttagaagagattttagaagaagaagtcattgttgaataccctaaagacagagagcatgggcattacgctacgcccattgctttcaatctcgccaaagtttttaaaaaatcgcccttagccatcgctgaagagttagcccttaaaatcagcacgcatgaaaaaactcaagggctttttgacagcgtagtggcttgtaagggctatatcaatttcacgctttctttagattttttggagcgtttcacccaaaaagctttggaattgaaagaaaaatttggctctcaagttaaaagcgaacgttctcaaaaaatctttttagaatttgtgagcgctaaccccacagggcctttacacatagggcatgctagaggggcggtgtttggcgatagtttggctaaaatcgctcgctttttagggcatgaagttttatgcgagtattatgtcaatgacatgggatctcaaatccgcttgttagggctttctgtatggctcgcttacagagaacatgttttaaaagaaagcgtaacttacccagaagtcttttacaaaggcgaatacatcattgaaatcgctaaaaaggcgaacaacgatttagaaccaagccttttaaaagaaaacgaagaaacgattattgaagttttaagcggctatgctagggatctaatgcttttagaaattaaagataatttagacgctttaggcattcattttgattcctatgcgagcgaaaaagaagtttttaaacataaagatgcggtgtttgaacaattagaaaaagcgaacgccctttatgaaaaggattctaaaatctggctcaaatcttcactctaccaggatgaaagcgatcgggtgctcattaaagaagataaaagctacacttatttagcgggcgatattgtctatcatgatgaaaaattcaagcaagattataccaaatacatcaacatttggggggcagaccaccacggctatatcgctagagtgaaagccagccttgagtttttgggctatgattccaacaagcttgaagtcttgctcgctcaaatggtgcgcttgctcaaagataacgagccttacaagatgagtaaaagagcgggtaattttattttgattaaagatgtggttgatgatgtgggtaaggacgctttgaggtttatttttttgagcaaacggcttgacactcatttagaatttgatgtcaatactttaaaaaagcaagacagctcaaaccccatttactatatccattacgctaattcgcgcatccacaccatgctagaaaaatcgcccttttctaaagaagaggttttgcaaacccctttaaccaatttaaacgctgaagaaaaatacttgctttttagcgctttaagcttgcctaaagcaattgaatcctcttttgaagaatacggcttgcaaaaaatgtgcgaatacgcaaaaaccctcgcatcagaattccaccgcttctataacgctggcaaaatcttagacacccctaaagctaaagagcttttaaaaatttgtttaatagtaagcttgagcttaagcaacgcttttaaacttttaggcatagagataaagaccaaaatttccgctagagattaa

SEQ ID NO: 22501 - DNA, 1518 bp, Helicobacter pylori
atgaaaatgattctattcaaccaaaaccccatgatcacaaagctgcttgagagtgtctctaagaaattagaattgcctatagaaaattttaaccattatcaagagctgtccgcacgccttaaagaaaatcaggaatggcttttgatagccgatgatgaatgtttggaaaaactagaccaagtggattggctagaattaaaagaaaccatctctcaaaataaaaacagcgtgtgtatgtataaaaaaggcaatgaagcgcagccctttttagagggctttgaggtgaaaatcaaaaaaccttttttacccactgaaatgttgaaagtccttcaaaaaaagcttggttctaacgcaagcgagctagaacctagccagaatttagacccaactcaagaagttttagaaaccaattgggacgaattagaaaatttaggcgatttagaagccctagtgcaagaagagcctaacaatgaagagcaactgctccccactttaaacgatcaagaagaaaaagaagaggttaaagaagaagaaaaagaagaggttaaagaagaagaaaaagaagaggttaaagaagaagaaaaagaagaggttaaagaaactccccaagaagaaaaaaagcctaaagatgatgaaacgcaagagggtgaaactctcaaagataaagaagtttctaaagagttggaagcaccccaagaattagaaatccctaaagaagaaacgcaagaacaagatccaatcaaagaagaaacgcaagaaaataaggaggaaaaacaagaaaaaacacaagattccccaagtgcacaagaattagaggccatgcaagaattagtcaaagaaatccaagaaaactctaacggccaagagaataaagaaaaaacgcaagaaagcgcagaaattccacaagataaagaaatccaagaagttgttaccgaaaaaacccaagcgcaagaattagaagttcctaaagaaaaaacgcaagaaagtgcagaagctctccaagaaacccaagcgcacgagttagaaaaacaagaaatcgcagaaaccccgcaagatgtagaaatcccccaatcacaagataaagaagtgcaagaattagaaatccctaaagaagaaacccaagaaaatacagaaacaccgcaagatgtagaaacaccgcaagaaaaagaaacccaagaagatcattacgaaagcattgaagacattcctgagccggtgatggctaaagcgatgggggaagaattgccctttttgaatgaagccgttgcaaaaattcctaataatgagaacgacacagaaacccctaaagagagcgttacagaaacctccaagaatgagaacaacacagaaaccccgcaagaaaaagaagaaagcgataaaacttctagccccctagaattgcgcttgaatttgcaagatttattaaaaagcctgaatcaagagtccttaaaaagccttttagaaaacaaaaccttaagcattaaaatcactttagaggataaaaaacctaatgcataa

SEQ ID NO: 22502 - DNA, 783 bp, Helicobacter pylori
atgcaaaaagattaccaaaaactcatcgtttatttatgcgattttttagaaaaagaagtgcaaaaacgcggctttaaaaaagtcgtttacgggctgagcggggggctagatagcgcggtcgttggggtgctgtgtcaaaaagtttttaaagaaaacgctcatgcccttttaatgccctcttcagtctctatgccagaaaataaaacagacgccctaaatttgtgcgaaaaattttctatcccttatacagaatattctatcgctccctatgacgccatctttagctctcactttaaagacgcaagccttactaggaaggggaatttttgcgcaagattgcgcatggcttttttatacgattattctttaaaaagcgattctttagtcattggcacgagcaataaaagcgaaagaatgctaggctatggcactttatttggggatttggcgtgcgcgattaacccgattggggaattatttaaaaccgaagtttatgaactcgctcgccgtttaaatatccctaaaaagattttaaataagccccctagcgcagatttatttgtggggcaaagcgatgaaaaagatttgggctatccttatagcgtgatcgatcctttattgaaggatattgaagcgttgtttcaaacaaagcccattgatacagaaacgctcgctcaattaggctatgatgaaattttagtgaaaaacatcacaagccgtatccaaaaaaacgcttttaaattagaattacccgccatcgccaaacgatttaaccctgaatga

SEQ ID NO: 22503 - DNA, 993 bp, Helicobacter pylori
ttggcattacccgtttattatgataaagacattgatttaggcgttatccaatccttacaagtgggcattattggctatggcgcgcaaggagaagcccaagcgctcaatttgagggactctaaagtaaaagcgcgtattggcttgtatcaagggagtttgagcgtttcaaaagcaaaaaaagagggctttgaagtgttagaagtcaaagagctagtccaaaattctgatgtgatcatggcactactcccagatgaattgcataaggaagtgttagaaaaagaagtgatcccttttttaaaagaggggcaaattgtgggctttgcccatggttttagcgtgcatttcaatcaggttgttcttccaaaaggcgtgggcgcgattttagtcgcgccaaaagggcctgggagcgctttaagagaagaataccttaaaaataggggcttataccatctaatcgccatagagcaagaaagctcaattcataacgctaaagcggtggctttaagctatgctaaagcgatgggcggagggagaatgggggttttagaaacgagctttaaagaagaatgcgagagcgatttattcggcgagcaagcggttttgtgcggggggttagaagcgattgtgagaatggggtttgaaactttaattaaggcaggataccctgaagaattagcctattttgaatgcgtgcatgaagtgaaattagtggcggatttattgcattataagggggtagagggcttaaggaaacacatttctaacaccgctgaattcggggcgattaaagctagagagcctatgggaaagctgctaaaaaaacgcatgcaaaaaatcttaaaaaagattcaaaacggctcattcgctaaggattttttactagaaaagagcttgaattaccccaggttaaacacagagaggaaagcccttaaagagactaaaatagaacaaattggggaaattttacgcgccccattcaatcataaaaaataa

SEQ ID NO: 22504 - DNA, 1551 bp, Helicobacter pylori
atgaaacaaaagcttaaagctcaaatcaaagagcgcatggcttctatcgcttataatgaaaaagggtttcctagcccctttttatttaaagacttgaaaaaagccgcgctcaaaatcatagaagccatgcgcacaaacacagaaattttagtggtgggcgattatgacgctgacggcgtgattagctctgctatcatggcaaaattttttgaaagcctgaactataagcatgtccgcattgcaatccctaatcgcttcatggatggctatgggatttctaaaaaatttttagaaaaacaccacgcccctttaatcatcacggtggataacgggattaacgcctttgaagccgcgcgattttgtaaagaaaaaaattacacccttatcatcacagatcaccattgcttacaccatgatgaagtcccagacgcttatgcggtgatcaaccccaagcaaccggattgtgattttatccaaaaggaagtgtgcggggcgttggtagcgttttatttgtgctatgggatccatcagcttttaggaaaagaaaaaagccattctagtgagttattatgtttagcgggcgtggcgactattgctgacatgatgcctttgactttttttaaccgctttttagtttctaaagccttgtattttttgcaaaaagaatccttaggggcgatgggttttttgcgccaaagagaagtttttagaaaacgctctttaaaagcgagtgatatttcttttaatatcgcccccttaatcaactccgcagggcgcatgcaagatgcgaaaatggctttagattttttaagcgcgaataattctcaagatggctattctttgtatgaacgcttgaaagcatgcaatttgaagcgtaaaatgatccaacagcaggtttttgaagaagcttttaagcatgcgatggttggagaaaaaattatcgtcgcttttaaggacaattggcatgagggagtgctggggattgtggcttcaaaattagtggaagccactcaaaagccaagcctggtttttacctttaaagaaggggtgtataaagggagcgctcgtagctcttcaaacattgacttgattgacgctttgaatggggtttcttctttattgctcggctatggagggcataggcaagcttgcgggttgagcgttgaaaaaaacaatatcatctcgctctttgaaactttagaaaattttgattttaaagttttacctttttgtaaaacagagccccctttaacgctcaaattaaaagacattgacagagagcttttagagattatagaaatgggcgaaccttatgggcaagaaaaccctgaacccctattccaagcaaaaaatttagaagtcatagaagaaaaaatcattaaagaaagccaccaggttttgcgttttaaggataaagaatgcgtcaaagaggctatttattttagcgctgagcggtttttgaaagcgggcgaaaaggtgagcgtgctttttagcgtggaattagatgagtgttctaatgagcctaaaatgtttgttaaaagtttgttgtag

SEQ ID NO: 22505 - DNA, 1617 bp, Helicobacter pylori
atggatagagccaaatttatattcgttacagggggtgtgttaagctctctagggaaagggatttcatcttcttcaatcgctacgcttttacagcattgcaattaccaggtttctattttgaagatcgacccttatatcaatattgatccaggcaccatgagccctttagagcatggggaagtgtttgtaactagcgatggcgctgaaacggatttagacatagggcattatgaacgctttttgaacaggaatttaacgaggttgaataatttcactactgggcagattttttcaagcgtgatagaaaatgaaaggaaaggggaatatttaggcaaaaccattcaaatcgtcccccatgtaaccgatgaaatcaaaaggcgcattaaaagcgcggctaaggggttggattttttaatcgtggaagtgggcggaaccgtgggcgatatggagggcatgttttatttggaagcgatccgccagcttaaattggaattagggaatgaaaaagtcatcaatgtgcatgtaaccctgatcccctatatccaaaccactaacgaactaaaaaccaaacccacgcaacattccgtccaagaattaagacgccttggcgtaacccctcaaatcattttggcgcgatcgcctaagcctttggataaagagttgaaaaataaaatcgctttgagttgcgatgtggagcaagacagcgtgattgtcgccacagacactaaaagcatttacgcatgccctattcttttcttgcaagaaggcattttaacccccattgccagacgctttaatttgaataaactacaccccaaaatggcggcttggaacactttagtagaaaagattatcgctcctaaacacaaagtcaaaattggttttgtgggcaagtatttaagcttgaaagaatcttataaatccttgattgaagccctaatccatgcgggcgcgcatctggatacgcaagtcaatattgaatggctggatagcgagaattttaatgaaaagacggatttagagggcgttgatgcgattttagtgcctgggggctttggagaaagggggattgagggcaaaatttgcgccattcaaagggctaggttagaaaaactcccctttttagggatttgtttgggcatgcaattagcgatcgttgaattttgtcgcaatgttttgggtttaaaaggggctaactctacggagtttaaccaacgctgcgaataccctgtggtgtatttgattggagattttatggatcaaaaccaccaaaaacaggtgcgcacctataattcgcctttaggaggcaccatgcgattaggcgaatacgaatgcgaaattatgccaaacagcttgttagaaaaagcttataaaaagcctagcattaaagaaagacaccgccatcgttatgaaatcaaccccaaataccgccaagagtgggaaaataagggcttgaaagtggtgggttttggatcgaatcatttgattgaagcgattgaattagaagatcacccgttctttgtgggggtgcaattccacccagaattcacctccaggttgcaaagccctaaccctattattttagatttcattaagagcgctctttctaaatcctaa

SEQ ID NO: 22506 - DNA, 669 bp, Helicobacter pylori
atggctgaaaattctttcaaaaatgtttccacacaacccaaagtatttttcttattgccagctaaaaccctgtttcttttaggaggcgtttttagcgcgttttttatccttattgctggcttggttttttttgattatgctcatttgatggacaatgccatttttaattttgcgcgttcaaccccctttaattccagccctattttaactctaatcctccaaaatatcgctaatttaggctcttctcaattcgtgttgcctttgagtttgttggtgggggtgtttttaagcctttatcgcagaaacttagtgcttggggtgtggtttgtgttaagcgtgatcttgtttgaagcccttttagaatctttaaaacacctttttgcatattccattcagtggctttcgcgcagcgctaatttccctaacgctactgcgctttctttagtgctattttatgggttgcttattttattgataccccatttaatcacgcatcaaacgcttaaaaatgttcttttttatagcttatttggtttgatttttttaatagggttagcactgattgttttaggggtttctttcagtagtgttttaggagggttttgtttaggggcgttaggggcttgtttttccatagggatttatttgagcgtgtttcaaaagatctaa

SEQ ID NO: 22507 - DNA, 1032 bp, Helicobacter pylori
atggcaaccaagcttacccccaaacaaaaggctcaattagacgaactctccatgagtgaaaaaatcgctattttactcattcaagtgggcgaagacaccacgggcgaaattttaaggcatttagacattgactctattacagagatttctaagcaaatcgtgcaattaaacggcacagacaagcaaattggtgcggcggttttagaggaattttttgcgatttttcagtctaaccaatacatcaataccggcggtttggaatacgctagagagcttttaaccaggactttagggagcgaagaagccaaaaaagtgatggacaaactcactaaaagcttgcaaacgcaaaaaaacttcgcttatttaggcaaaatcaagccccaacaactcgctgatttcatcattaacgaacaccctcaaaccattgccttgattttagcccacatggaagcccctaatgcggctgagactttgagctatttccctgatgaaatgaaagccgagatctctattagaatggcgaatttaggcgaaatatcgccccaagtggttaaaagggtttccacggtgttggaaaacaaactagaatcgctcactagctataaaattgaagtgggtggtttaagagcggtggctgaaatctttaaccgcctgggccaaaagagcgctaaaaccacactcgctcgcattgaaagcgtggataacaagctcgccggtgcgatcaaagaaatgatgttcacttttgaagacattgtgaaattggacaatttcgccatcagagagattttgaaagtagcggataaaaaagatttgtctttagcgttaaaaacttccacaaaagatttaaccgataaattcttaaacaacatgagcagtagggctgcagagcagtttgtagaagaaatgcaatatttaggggcggtcaaaatcaaagatgtggatgtggcccaaaggaaaatcattgaaatcgtgcagagcttgcaagaaaaaggcgtgatccaaaccggtgaagaggaagatgtcattgaatag

SEQ ID NO: 22508 - DNA, 729 bp, Helicobacter pylori
atgcgttgttttaaggctactatcgcttatgatggggcgtattttttaggctatgccaaacagcccaacaaactcggcgttcaagacaaaatagaggacgctttaaatgcattagggattaaaagcgttgtgattgcggccgggcgcacggataaaggcgtgcatgcgaacaaccaggttttgtcttttcacgctccaaaacactggaacgccgctaaattattttattacctagcccctaaactcgccccgcatattgtcttaaaaaagctagaagaaaaaaacttccatgcgcgttttgacgctcaaaaaagagcgtatcgttaccttttgacgaagaatttaaaaacgccttttttagcgccctatatcgcttgtggggattatggctcactagacgcattaaacaccgctttaaaacaattcacaggcaagcatgatttttccatgtttaagaaagaaggcggggctacaaccaatcctaaacgcactatttttaacgcttttgcttataaaacctttatcatagggcatgagtgcgtggtgtttaaaatcattggcgatgcatttttacgctctagcgtgcgtttgatcattcaagcatgcgttcaatactccttagaaaaaatcacgctcgctgaaattcaagcacaaatccataacctcaaagccactataagaacgcccataatggctaatggcttgtatttgcacagggtgtattattga

SEQ ID NO: 22509 - DNA, 1026 bp, Helicobacter pylori
atggaagtttcacgcaagaaaatttacaaccccaattctacagaaagtgtgaatgaaagaaagatttttgggggcaatcctacaagcatgtttgatttgaataagatcaagtatcaatgggcggatcatttgtggaaaacgatgctcgctaacacctggtttgctgaagaagtgagcatgaatgatgacaaaagggattatttgaaattaagcgcagaggaaaagatcggttatgacagagctttagcgcaactcatttttatggacagcttgcaagcgaataatttaattgacaatatcaatcccttcatcaccagccccgaaatcaatttgtgtttggtgcgtcaagcttatgaagaagccctacacagccatgcgtatgcggtgatggtagaaagcataagtgcgaatactgaagagatttatgacatgtggcgtaacgatatgcaattaaaaagcaagaacgactatatcgcgcaagtgtatatggaattagccaaaaaccccacagaagaaaacattctcaaagcgctttttgctaaccagattttagaggggatttatttttatagcgggtttagctatttttacactttggctaggagcggtaaaatgctaggatcggcacaaatgattcgttttatccaaagagatgaggtaacgcatttgattttgttccaaaacatgatcaacgctttaaggaatgaaagagcggatctcttcacgccgcaattgattaatgaagtcataggaatgtttaaaaaagcggtagaaattgaagctttgtggggggattatatcacgcaaggcaagattttagggctcacttcaagcttgattgagcaatacatccagtttttagcggatagccgtttgagtaaggtgggcatcgctaaagtttatggcgtccaacaccccattaaatgggtagagagcttttcaagtttcaatgagcagcgctctaatttctttgaggctagggtgagcaattacgctaaagggagcgtgagttttgatgatttttaa

SEQ ID NO: 22510 - DNA, 93 bp, Helicobacter pylori
gtggcgaaattggtagacgcactagacttaggatctagcgccgcaaggcatgaaggttcgattcctttcttccgcaccattcttaatgattaa

SEQ ID NO: 22511 - DNA, 1377 bp, Helicobacter pylori
atgaataaagtgaataaagaaaataaaaaggtagaaaaaaaagagctttcacgcattttgatcgctaatagaggcgagatcgctttaagagcgatccaaaccattcaagaaatgggtaaagaatccatagccatttattctatcgctgacaaggacgcccactacctcaatacggctagcgcaaaagtgtgtatagggggggccaaatccagcgagagctacttgaatatccctgcgatcattagcgcggcggaattgtttgaagcggatgcgattttccccgggtatgggtttttgagcgagaatcagaattttgtagagatttgctcgcaccattctttagaatttattggtccaagcgcgaaggtcatggctttaatgagcgataaatccaaggccaaaagcgtgatgaaggaagccggcatgcctgtgattgagggcagtgatgggttgcttaaaagctatcaagaagctgaagaaatcgctgataaaatcggctaccctgtcatcattaaagcagccgctggtgggggcgggagaggcatgcgtgtcgtaggagataaatccaagcttaaaaacctttatttagccgcagaaacggaagctttgagcgcgtttggcgatgggagcgtgtatttagaaaagttcatcaacaagcccaagcacattgaagtccaaattctagccgataagcatggcaatgtcattcatgtgggcgaaagggattgctcggtgcaaagacgccaacaaaagctcattgaagaaaccccggcagtggttttagaagagggcgtgcgtgagcgtttgctagaaacagcgatcaaggccgctaaatatatcggctatgtgggggcggggacttttgaatttttgttggattctaacatgaaagatttttatttcatggagatgaacactcgtttgcaagtggaacacaccattagcgaaatggtgagcgggttaaacctcattgagtggatgattaaaatcgctcaaggcgaaaaattgcccaagcaagaaagcttttctctcaaagggcatgcgatagaatgccgaatcacggcagaagatcctaaaaaattctacccaagcccgggcaaaattaccgaatggatcgctcctggtggggtgaatgtgcgccttgattcgcacgcgcatgccaattatgtcgtgcctacgcactatgattcgatgattggcaagctcattgtgtggggtgaaaacagagaaagagcgatcgctaagatgaaaagggctttaaaggaatttaaagtagaaggcattaaaacgaccattcctttccaccttgaaatgcttgaaaatgcggatttcaggcaagcaaaaatccacacgaagtatttagaagaaaatttttaa

SEQ ID NO: 22512 - DNA, 471 bp, Helicobacter pylori
atgaacctttctgaaattgaagagttgatcaaagaatttaaagcttctgatttggggcatttgaaattaaagcatgagcattttgagttggttttggataaagaatccgcttatgcgaaaaaaagtgcgttaaatcccgcccattctccagcccccattatggtagaagcgagcatgccaagcgtccaaacccctgtgcctatggtatgcacccctattgtggataaaaaagaagatttcgtgctttcgcctatggtaggcactttttatcatgcaccctcccctggggctgagccttatgtcaaagcgggcgatacgcttaaaaaagggcaaatcgtgggcattgtagaagcgatgaaaatcatgaatgaaattgaagtggaatacccttgcaaggtggtttctgttgaagtgggagacgctcaaccggtagaatacggcacaaaactcatcaaagttgaaaagctttaa

SEQ ID NO: 22513 - DNA, 2103 bp, Helicobacter pylori
atgctaagattcgttagtaaaacgatttgcttgtctttaatcggcttgttcaaccctttagaagcctttcaaaaacaccaaaaagacggcttttttatagaagctgggtttgaaactgggttattagaaggaacgcaaactaaagaagaagtcataaccacccaaaaaatctatgaaaaccccctaacccacccacaaactaaagaacagcctaaagaacaaaataaaagcgatacggccaccccacaaagcgcttacggaaaatactacataccccaaagcaccattttaaaaaatgcaacggctttattcaccacggacaagatagaaaatggcttaactttttattctcaaaaccctgtgtatgcgaatatggttaatgggagcgtaaccatacaaaactttctgccttataatttaaacaatgttgaactgagttttaaagacgctcaaggcaaggtggtcaatttaggcgtgatagagaccatccctaaacaatctcaaattaccttgcctgcaagcttgtttaatgattcagaatttgaacaagctgatagctttaattaccaacaacttcaagccactgccacacaattttctgacgctaacacgcaaagtttgtttcaaaagctcagcaagatcacaaccaatgtaacaatgagttatgaaaacgccgataccaacaattttaaaggtaattgccatgattgtgtgtcagatttcaccccacaaaccgcagaagaattgaccaatttaatgctagatatgattgcggtgtttgactctaaatcgtgggaagaagccgttttaaacgctcctttccaattttctaacagctcatcagagtgcggctctgactttcctaagtgcgtgaatcctttcaataacgggcgtgtcgctcccatctatgaaaaatacgtgctaaccccacaatccgttatagatgcgtttagaagaacgatcaatcttgaagtgaatatcctaaaatcagggtttgtagggctagggtatgaacttgatgataatgatggtaatctggggatagaagcttctgccttaaatcctgaaaaattgtttggtaaaactttgaacaaagttgatattgtggaattaagagacattatccatgaatttagccacactaaaggctatacgcataatgggaacatgacttatcaaagagtgcgcttgtgtcaagaaaacggcggagccatacaagaatgtgagggtgggaaagaagagttagtcaatggaaaagaagaactaaaatttacaaatgggaaagaagtgaaagatcaggatggttacacctatgatgtatgttctttttataaggacaaccaccaagtctatacagcgagcaattaccccaattccatttatacgaattgcgctcaagtccctgctgggcttataggggttaccaccgctgtctggcaacagctcatcaatcaaaacgctctgcccattaatttcgctaatctaaatagcccaaccaaccacttaaacgccgggttgaacgcacaaaattttgcaacctctatagtcagcgcgatcgcgcaaaatttttccaccacttccaccaccacttaccgctcttcaagtaagaattttagaagccctattttaggggttaatgttaaaataggctaccaacattatttcaatgactacatagggttagcctattacggcattatcaaatacaattacgccaaaactaacgatgaaaaaatccagcaattaagctatggtgggggaatggatgtgttgtttgatttcatcaccacttacgctaacaaaaagcaagacaacccaactaaaaaagtttttgcttcctcttttggggtgtttggggggttaaggggcttatacaatagctattatgtcttcaaccaagtcaaaggaagcggtaatttagatatagttactgggtttaattaccgctacaagcattctaaatattctgtaggcattagcgttcctttaatccaaagcggtattaaaatcgcttctaataatggcatctatgcgaactccgttgttttgaatgaagggggcagtcattttaaagtgttttttaattacgggtggattttttag

SEQ ID NO: 22514 - DNA, 681 bp, Helicobacter pylori
atgcgttttgtctatcaccctttagccaaagagcctgttttaaaaatagaaggcgagagttatacgcatttataccgatcaaggcgtgtcaaaagtgcgagtcgtttggatttgagaaatttaaaagacggctttttatacacctatgagcatgcagaaatcactaaaaaacacgcccttttaaagctagtgggcgcgcgattattagaggttatggccagtaaaaaaacgcatttgattttaagcgtgattgaaatcaaaaacattgaaaaaatcctaccctttttaaatcagttaggcgtgagcaagttgagtttattctatgcggattttagccaacgcaatgaaaaaatagacatcgctaaattagagcgctttcaaaagattttgatccattcttgcgagcagtgtggtaggagtgctttaatggaattggaagtgttttcaaacactaaagaggcgctaaaagcctatcctaaggcgagcgttttggattttaagggcgaaaccttacccgcaagcgcggattttgaaaagggcgttatcatagggcctgaggggggctttagcgaaccagaaagagggtattttaaagagcgtgaaatttatcgcatcccgttagatatggtgctaaagtctgagagtgcatgcgtgtttgtagcgagtatcgcacaagtttag

SEQ ID NO: 22515 - DNA, 2811 bp, Helicobacter pylori
atgaagaatctcaaaagcctgctttcttttttgctggcttctttttgggtcgctatccctttaatcgcactctatgccttagcgtgcgcgatagccacttttatagaaaacgattacggcacgagcgcgagtaaggcgattgtgtataacaccccttggttcaatttcttgcatgcgtatttattggtggttttaataggcacattcattaattctaaagctttggagcgcaaaagatacgccagcctttttttccacagctccttgattttcatcattttaggggcagccatcacgcgtttttttggcgtagaagggcttatgcatgtgcgagaaaatagcgcgcaaagctcttttgaaagcgcggacacttaccttaatatcactcttaatgacaccaccaaactttctttaaaaacgcctttaaccttttatcattccaaacgattaagacccattcatgccactttaaatcacaagcctttaattttagaacccttagaaatttacaagcaaaacgccattaaaaaagatgacgctaccattttagtgttaaaggcgacttataacggcgtgagccgcaaattcaacctcattaaaaccaacaggaatgaaggcatagaagaaagcgaggtgtttaaagacgacaagctctctttaagttttggatccgcttacattgaattgccctttcaaatcaaactgaagcgttttgaattagagcgctacgccggctctatgagcccttcatcttacgcttcagaagtggaagtgttgaaattggataacactttaatcaaaccttataggattttcatgaaccatgttttagattatgaaggctatcgctttttccaatcttcttatgacatggatgaaaaaggcacgatcctttctgtcaataaagatccgggtaaaatccccacttatttagggtatgcgatgcttattttgggggctttgtggttgcttttggataaaaatgggcgttttttgaagctttcacgctttttaaaatcccaacaagttgctagtttcttgctcgctttaattttaatcagcccttttacttcttcgtttgctaatgaggctccaattgacatgcatgggggaaaaagcgctaaaattgagcgacaaagcgtagaaaattccgcccaaaaagaaaactctaaaagcgcgattttagagcgtttgaagcgtttaagagagtattccaaagaccacttaaaagcctttcaaaggcttcaagtccaggattttgacgggcgtatcaaacctttagacaccattagcattgaatatatccataagattttaaaaaaagatgattttcaagggctaaacgccatgcaggtgcttttagggatcatgtttttccccaatgattggcgcagtattaagatgatttacacttccactaaagccttaagaaagcttattggcacgcctttagacgaaagccgtatcgcttttagagatgcgtttgatagccgtgggtataaattaaaaaatttggttgaagaagttaatcaaaaatcccctaacgcacgcaacgagttggataaagatgtcttaaaagtagatgaacgcatcaacttagtctatacgctttttagcgctcaatttttacgcattttccctagcgataaaaccaccgcttggctctcgcccattgaagcgatcagcagccccaataaagaaatttcaagcgtggcaacggagtttttaaaaaatatttttagcgggtttgatgacgctttaaaaaccaaccaatgggataaggtagaaaaaaccctaaaagatttaagcatttaccaaaaagagcatgccaaaaacctctatttatcctcttctaaagtggattctgaaatttttttaaaccacaccaatttttttaaccgcctgaccttgccttatatccttcttgggttattgctttttatcgttgtgatcagctctctggttaaaaacacgattccaaatatttggctcactaaaatcctttattttgctatcttgctttgcgcgctcgctcattctatggggctagttttacgctggtatgtgagcgggcattcgccttggagcaacgcttatgagtccatgctttatatcgcatgggcttctgttatcgcagggtttattttacgctccaaactcgcgctatcggcttctagctttttagccggtatcgcgctctttgtggctcatttaggctttatggatcctcaaatcggccatttagtgccggtattaaaatcctattggctcaatatccatgtctctgtcattaccgctagttatagctttttgggcttgtgttttgtgctagggattttgagtttggttttgtttattttgcgcaaacaagggcgtttcaatttggacaaaaccattctctccattagcgctatcaatgaaatgagcatgattttaggcctgttcatgctcacagccgggaatttcttaggcggggtgtgggcgaatgaatcttgggggcgttattgggggtgggaccctaaagaaacttgggcattgatttctatttgcgtctatgctttaatcttgcatttgcgttttctaggctctcacaattggccctttattttagcgagcagcagcgtgctagggttttattcggttttaatgacttattttggcgtgaattactacctttctggcttgcacagctatgccgcaggcgatcccttgcctatccctactttcttatactttttggtagcgataccttttgctctcgtgatcttggcttatttcaaacgccatttgagtttgcctaaattagcttaa

SEQ ID NO: 22516 - DNA, 1347 bp, Helicobacter pylori
atgtatgttgaaaaaattctccagtctttacagaaaaaatacccttatcaaaaagagttccatcaagccgtctatgaagctatcacttctttaaaaccccttttagacagcgataaaagttatgaaaagcatgcgattttagagcgtttgattgagcctgaaagggagattttttttagggtgtgttggctagatgataacaatcaaatccaagtcaatcgggggtgtagggttgagtttaattcggctattggcccttataaggggggtttgagattccaccctagcgtgaatgaaagcgtgatcaagtttttaggctttgagcaagtgttgaaaaattcgctcaccactttggctatggggggcgctaagggggggagcgattttgaccctaaagggaagagcgagcatgagatcatgcgtttttgccaagcgttcatgaatgaattataccgccatattggagccacgactgatgtgccagctggggatattggagtgggcgaaagagagattggctatctgtttgggcaatacaaaaaattagtcaatcgttttgagggcgtattgaccggtaaaggactcacttatggagggagcttgtgcagaaaagaagctaccggttatgggtgcgtgtattttgctgaagaaatgttgcaagaaaggaacagctctttagagggtaaggtttgcagcgtttctgggagcgggaatgtcgcaatttataccattgaaaaattgcttcaaataggagctaaaccggtaacggcgagcgattctaatggcatgatttatgacaaagacggcattgatttagagcttttgaaagaaattaaagaagtgcgtcgtgggaggatcaaagaatacgctttagaaaaaaagagcgcggaatacaccccaacagaaaattaccccaaaggggggaatgcggtgtggcatgtgccttgttttgcggcttttcctagtgcgaccgagaatgaattgagcgttttagacgccaaaaccctcctttctaatgggtgtaaatgcgtggctgaaggggcgaacatgccctcaagcaatgaagcgattggattgtttttgcaggctaagatttcttatggtataggcaaggcggctaatgctgggggggtgagcgtgagcggcttggaaatggcacaaaacgcaagcatgcacccttggagttttgaagtggtggatgcgaaattgcaccatattatgaaagagatttataagaatgtctctcaaaccgctaaagagtttaaagaccctactaattttgtattaggggccaatatcgctggttttagaaaagtagcgtctgcgatgatagcgcaaggggtttga

SEQ ID NO: 22517 - DNA, 831 bp, Helicobacter pylori
atgaccctttcgcaagccctaaacaaagccaaaaaaggattatcgcaaaaaggttttagggggggcttagaatctgaaattttattaggctttgtcttgcaaaaagaaagggtttttttgcacacgcatgcctatttagagttaaaccacgaagaagaggtgcgtttttttgaattggtagaaaagcgcttgaataactgccccatagagtatttattagaaagctgtgatttttatgggcgctctttttttgtgaatgagcatgttttaatcccacgacctgaaaccgagattttggtccaaaaagcccttgatattatttctcaataccatttaaaagagataggcgaaatcggcatagggagcggatgcgtgtctgtgagtttggctttagaaaaccctaatctctctatttatgcgagcgatatttcaccaaacgctttagaagtggcgtccaaaaatattgagcacttttgtctaaaagagcgtgtttttttaaaacaaacacgcctttgggatcatatgcccatgatagaaatgcttgtctctaacccgccctatatcgctagaaattatcctttggaaaaatccgtcctcaaagaaccgcatgaagccctttttgggggggttaaaggcgatgagatcttaaaagaaatcgtttttttagccgctaaattaaaaatcccttttttggtttgtgaaatggggtatgaccagttgaaaagcttgaaagaatgcttggaattttgcggttatgatgcagagttttacaaggatttgagcggctttgatagagggtttgtgggcgttttaaaaagttttttaagataa

SEQ ID NO: 22518 - DNA, 498 bp, Helicobacter pylori
gtgagcaaccaattaaaagatttatttgaaagacaaaaagaagctagtgcaggctctaaacaagaagacaatgaagaggttttgcaattcattggctttattattggcgatgaagaatacgccattcccattttgaatattttagaaatcgtcaaacccattggttacacgcgagtccctgaaaccccaaactatgtgcttggcgtgttcaatttaaggggtaatgtctttccgttgattagcttgcgtttaaagtttggcttgaaagctgaaaaacaaaacaaagacactcgttatttggtggtgcgacacaacgatcagatcgctgggtttttcatcgatcgcttaactgaagccattcgcatcaagcaaacggatattgacccagtgccagagactttgagcgataacaataacttaacttatggcattgggaaacaaaacgacagactcgtaaccattttaagagtggaagaaatcttaaaaaaagacttctaa

SEQ ID NO: 22519 - DNA, 669 bp, Helicobacter pylori
atgttagattatcgccaaaaaattgatgctctcatcaccaaaatagaaaaggctcgcaccgcctattcaaggcaccacattgtcaaaatcgtggctgtttcaaaaaacgcttccccagaagctatccaacattattataactgctctcaaagggcttttggagaaaataaagttcaagatttaaaaactaaaatgcattctttagagcatttgccccttgaatggcacatgataggctctttacaagaaaataaaatcaatgcgcttttgagtttaaagcccgctcttttgcattctttagactctttaaaactcgctttgaaaatagaaaagcgttgcgaaatattgggcgtcaatttaaacgctcttttacaggttaatagcgcgtatgaggaaagtaaaagcggggtggtgcctgaagaagcgctagaaatttattctcaaatcagtgaaacttgcaagcacctcaagcttaaggggcttatgtgtataggggcacacacagatgatgaaaaggaaattgaaaaatcctttatcaccaccaaaaagctttttgaccaaataaagaatgcgagcgttctttcaatgggcatgagtgatgattttgaattagcgattgcttgcggggcgaatcttttaaggattggctcttttttgttcaaagagtaa

SEQ ID NO: 22520 - DNA, 1671 bp, Helicobacter pylori
atgagcaagatagcagatgatcagaactttaatgacgaggaggaaaacttcgcaaaactctttaaaaaagaattagaaaaagaagaaaccctagaaaaaggcactatcaaagaagggctagtcgtttccatcaatgagaatgatggttatgccatggtgagcgtgggcggtaagacagaaggccgtttggctttgaatgagatcaccgatgaaaaggggcagttgctgtatcaaaaaaatgaccccattatcgtgcatgtgtccgaaaaaggtgaacaccctagcgtttcctacaaaaaggccatttcccaacaaaagattcaagctaaaattgaagaattaggcgaaaactatgaaaacgccattattgaaggcaagattgtaggcaagaataaagggggttatatcgtggagtctcaaggcgtggagtatttcctctcccgctcgcactcttctttaaagaatgacgcaaaccatatcggcaaacgcgttaaagcgtgcatcattcgtgtggataaggaaaaccattctatcaatatttctcgcaaacgattctttgaagtcaatgacaaacgacaacttgaggtttctaaggaattgttagaagccacagagccggtgttaggggttgtgcgccagatcaccccttttggcatttttgtagaagctaaggggattgagggcttggtccattattctgaaatcagccataagggaccagtcaatcctgaaaaatactacaaagagggcgatgaagtctatgtcaaagccatcgcttatgatgcagaaaaaagacgcctttcactctccataaaagcgactatagaagacccatgggaagagattcaagacaagctaaaacccggatacgccattaaggtagtggtgagcaacattgaacattatggggtgtttgtggatattggtaatgatattgaaggctttttgcatgtttctgaaatctcttgggataaaaatgtcagccaccctaacaattacttgagcgtggggcaagagattgatgtgaaaatcattgacattgatccaaaaaatcgccgcttaagggtttctttaaagcaactcactaacaggccttttgatgtttttgaatctaaacaccaagtgggggatgttttagaaggcaaagtggcgactttaacggattttggggcgtttttaaatctgggtggggtggatggtttgctccacaatcacgacgctttttgggataaagataaaaaatgcaaagaccactataaaattggcgatgtgatcaaagtgaaaatccttaaaatcaacaaaaaagataaaaagatttctttgagcgcgaagcacttggtgacttcccctacagaagaattcgctcaaaagcataaaacagacagcgtgattcaaggcaaagtggtgagtattaaggattttggcgttttcattaatgctgatggcattgatgtgctgatcaaaaatgaagatttgaaccccttgaaaaaagatgaaattaaaataggccaagaaatcacatgcgtggtggttgcgattgaaaaatctaacaacaaggtgcgtgcttctgtgcataggttagagcgcaaaaaagaaaaagaagaattgcaagcttttaacacgagcgatgataaaatgactttaggggatattcttaaagaaaaactctaa

SEQ ID NO: 22521 - DNA, 2295 bp, Helicobacter pylori
atgaaactgagcattaatgatttgaatgtttttgtcaatacgcctaaagatatagccaaactctgtgaggatttgagtcgcttaggtttagaagtggaaagctgtatcccttgtatcgctcctaaaaatgtggttgtgggtaaaattttagaaaaagccccccataaaaacgctgaaaaactcagcgtgtgtcaagtggatgtgggtaaagaagtgttgcaaatcgtgtgtggggctaaaaatgtcgcgccaaaccaattcgtgccagtcgctttaaacggggcgctaatcggctcaaccaccatcgctaaaacggagcttaggggggttgaaagccatggcatgatttgctctagcattgaattaggcttccctaaaatcaatgatggcatcttggaattagatgagagcgttggggagttggttttagggaaagaattaaacgaatacgcccctttcaacacgcatgttttagaaatttcattgactcccaatcgtggggattgcttgagcgttttaggtattgccagagaaattagcgccttttatcacacgcccctaaagcctattaaggctttaaattttacgcccaaaagcggtttgatcacgcttagtgcgggtgaaaatattgaatcgcatctggcttattatttgatttgcaaccattcattaaaaacccctttaaatatcaaactttcgctcgctcataataatgccttgagtgagaacgatctgaacaatttcatagaatttagcacgcattttagtggggtaataatgaacgcttatagcctaaatacaacccctatggatttgagcgtgaaaaacgatgaaaacaaccttgaaagcgtttatatcaaccatcaaaaacgctccacgatcgctatcaagcatcaagttcaaaaagatttgagcgagtgtttgcttttagaggcaagttacaccgatccgataagcctgtctttaaaattacacgccctaaaagataaaacgcttcaaaaagacaacgcccttatttatagaagcgctagggggagtaaccctaatttatcagacggcttgaattttttaagcgctcatttgaaagccacgattttagaaagcaaacaaactgagcattctttaaaagatcgcacccttacattccagcttgaagacattactgaaattttggggcttgctgtagagaaagaaaaaattcaaggcattttaaaaaatttaggctttaaagtcagcgtaaaagagccaaactcaaaaccccaaattttagaggttattgcgccaaatttcaggcatgacattaaaacgatccaagatattgctgaagaaattttgcgctttgtagggattgataatctagtctcaaagccccttcattgtgtcagtagcaaaaattcaaaccccaattacgacacgcaccgcttttttgaaaaccttaaacacaaggctctcgcttgcggttttaaagaagtcattcattacgtgttttactctaaagaaaaacagcaaaaattaggctttgaagttttagaagatcccctagaattgcaaaaccctatcacaacggagttaaacaccctaaggacgagtcttgtttgcgggcttttagacgccagtttaaggaataaaaatttagggtttaaaagcatagccctttatgaaaaggggagcgtgtataactctaaaagagaagaaatccaaaaactaggctttttaataagcggcttgcaaaaaaaagaaagctaccctgatactaagggcaaggcttgggatttttactcttttgccgaatgcgtttcaaaagttataggggatttcagcttggaaaaactaaccactcaaacccccattaaccacccctaccagagcgctaaaatcattcaaaatcatgaaatcataggcgtgatcgctaaaatccaccctaaagtgatccaggaattggatttgtttgaaagctattacgctgagatagacgcttttaaactcaaacgccctgctatgctattaaaaccctttagcatttatcctagcagtgttagggatttgactctcatcattgatgagaataccgcttttagtgggattaaaaaagccctaaaggacgctcaaatccctaatttaagcgagattctaccccttgatatttttaaagaaagtaataattccatagccttaagcgtgcgttgcgtgatccattctttagaaaaaaccctgaatgatgaagaggtcaattcagccgtgcaaaaagcacttgaaattttagaaaaagaatttaacgcccgccttaaaggataa

SEQ ID NO: 22522 - DNA, 987 bp, Helicobacter pylori
ttgcacaccttaatagagcgattagaaaaggttactaatagcaaagagttagaagaagcgcgcttgaatgctttgggtaaaaaaggggtttttgcggataaattcaaccagctcaaacatctgaacggcgaagaaaaaaacgcctttgctaaagaaatccaccattataaacaagcgtttgaaaaagcctttgaatggaaaaaaaaggctattatagagcttgaattagaagaacgcttgaaaaaagaaaaaattgatgtgagcttgtttaacgctatcaaaacaagctcttctcaccctttaaactacactaaaaataaaatcattgaatttttcaccccattaggatacaagcttgaaatcggctctttagtggaagatgatttccataatttcagcgctttaaacttgcccccttaccatcctgcaagagacatgcaagacactttttattttaaagatcacaagcttttaaggacccacacttcgcccgtgcaaatccacaccatgcaagaacaaaccccacccattaagatgatttgtttaggcgaaacctttaggcgcgattatgatttgacccacacgcccatgttccaccaaattgaagggcttgtcgtggatcaaaaagggaatatccgtttcacacatttaaaaggtgtgatcgaagactttttgcattatttctttgggggcgtgaagttaaggtggcgctctagctttttccctttcacagagccaagcgctgaagtggatattagttgcgtgttttgcaagcaagaaggctgtagggtttgctcgcacacaggctggttagaagtgttgggctgtggcatggtcaataatgcggtgtttgaagccatagggtatgagaatgtgagcgggtttgcttttggcatggggattgaaagattagccatgctgacttgccagatcaatgatttgcgcagtttctttgaaactgatttgagagtgttggagagcttttaa

SEQ ID NO: 22523 - DNA, 1527 bp, Helicobacter pylori
atgattttagtattagattttgggagtcaatacacacagctgattgctagaagattgagagagagagggatttatacagaaatagtccctttttttgaaagcatagaaaacattcaaaaaaaagcccccaaaggtttgattttgagtggggggccagcgagcgtgtatgctaaagacgcttacaagcctagtgggaaaatctttgatttgaatgtgccgattttagggatttgctacggcatgcagtatttggtggatttttttgggggggtagtggttggtgcgaatgagcaagaatttggtaaggctgttttagaaatcactcaaaattctgtgatttttgaaggcgtgaagattaaaagccttgtgtggatgagccatatggataaagtcatagaactgcctaaaggctttactacccttgcaaaaagccctaattccccccattgcgcgattgaaaacggcaagatttttggcttgcaattccacccagaagtcgttcaaagcgaagaagggggtaagattttagaaaattttgcccttttagtttgcggctgtgaaaaaacttgggggatgcagcatttcgctcaaagagaaatcgcacgattgaaagaaaaaatcgctaacgctaaggttttgtgcgcggtgagtgggggcgtggattctacggtggtcgctacgctgttgcacagagccattaaggataatttgatcgctgtttttgtggatcatggcttgttgcgtaaaaatgaaaaagaaagggtgcaagcgatgtttaaggacttgaaaatccctttaaacacgatagacgctaaagaagtctttttgtctaaattaaagggcgtgagcgagcctgaattgaagcgaaaaatcatcggcgagacctttattgaagtgtttgaaaaagaagccaaaaagcaccatttaaaaggcaaaattgaatttttagcccaaggcactttataccctgatgtgattgaatccgtgagcgttaaagggccttcaaaagtgatcaaaacccatcataatgtgggcggactgcctgaatggatggattttaaactcatagagcctttaagggagttgtttaaagatgaggtgcgcttactgggtaaagaattgggcgttagtcaggattttttaatgcgccacccttttccagggcctgggcttgctgtaaggattttaggcgaaatcagtgagagtaagatcaaacgcttgcaagaagcggattttatttttatagaggaacttaaaaaagccaatttgtatgacaaggtttggcaagctttttgcgtgctgttgaatgtcaattctgtgggggttatgggggataaccgcacttatgaaaacgctatttgcttaagagcggtaaatgcgagcgatggcatgacggcgagcttttcatttttagagcattcttttttagaaaaggtttctaaccgtatcactaatgaagtgagcggtatcaatagggtggtgtatgacattacctctaaaccaccaggaacgattgaatgggaatga

SEQ ID NO: 22524 - DNA, 1872 bp, Helicobacter pylori
atgcgtttattattgtggtgggtattggtattatcgctctttttaaatcctttgagagcggttgaagagcatgaaacagatgcggtggatttgtttttgattttcaatcaaatcaaccagctcaatcaagtcattgaaacttacaaaaaaaaccctgaaagaagcgctgaaatctctctgtataacacccaaaagaatgacttgattaaaagtttgacttctaaagtgttgaatgaaagggataagatcgggattgatatcaatcaaaatttaaaagagcaggaaaaaatcaaaaagcgtttgtctaaaagcattaatggcgatgatttctacactttcatgaaagacagattgtctttagatattttgttgatagatgaaattttgtatcgttttatagataaaatcaggagcagtattgatatttttagcgaacaaaaagatgtagaaagcatcagcgatgctttccttttgcgtttagggcaattcaaactctacactttccctaaaaatttaggcaatgtcaaaatgcatgaattagagcagatgtttagcgattatgaattgcgtttgaacacttacaccgaagtcttgcgttacattaaaaaccaccctaaagaagtgcttcctaaaaacttgatcatggaagtgaatatggattttgtgttaaacaaaatcagcaaggttttgcctttcacaacccatagcttgcaagtgagtaaaatcgtgctagctttgacgattttagccttattgctgggtttaaggaagttgatcacttggcttttagccttattgttagatcgtatttttgaaatcatgcagcgcaataaaaaaatgcatgtcaatgtgcaaaagagcattgtttcgccggtttctgtctttttagccctatttagttgcgatgtggctttagatattttctactaccctaacgcatcgccccctaaagtttctatgtgggtgggcgcggtgtatatcatgcttttagcatggttagtgatagcgctttttaaaggctatggggaagcgttagttacgaatatggctaccaaaagcacgcacaattttagaaaagaagtgatcaacttgattttaaaagtcgtgtattttttgatctttattgtcgcgcttttaggggttttgaaacaactagggtttaacgtttcagccatcatcgcttctttagggattggggggttagcggtggctttggcggttaaagatgtgttagcgaatttttttgcttcggtcattttattattagacaattcgttttctcaaggggattggatcgtgtgcggtgaagtggagggcacggtggtggaaatggggttaaggcgcaccacgatcagagcctttgacaacgctcttttgtccgtgcctaattcagaattagccggaaaacccatcaggaattggagccgtcgtaaagtgggaaggcgtattaaaatggaaataggcttaacttatagctccagtcaaagcgctttacagctttgcgtgaaagacattaaagaaatgttagaaaaccaccctaaaatcgctaacggagccgatagcgctttgcaaaatgtgagcgattaccgctacatgtttaaaaaagatattgtttctattgatgattttttagggtataaaaacaatttgtttgtctttttagatcagtttgcggacagctctattaatattttagtgtattgcttttctaagacagtggtttgggaagagtggctagaagtcaaagaagatgtgatgctaaaaatcatggggattgtagaaaagcaccatttgagttttgctttcccatcacagagtttgtatgtggagagtttgccagaagttagcctgaaagaaggggctaaaatctga

SEQ ID NO: 22525 - DNA, 1953 bp, Helicobacter pylori
atgcaaaaatcactgatcacaacccccatttattatgtgaatgacatccctcatattggccatgcttatacgactttgattgcggacactttaaagaagtattacacgctccaaggcgaagaagtcttttttttaaccggcaccgatgagcatgggcaaaagatcgaacaaagcgcgaggcttaggaatcaaagccctaaagcttacgccgatagcattagcacgatttttaaagaccagtgggattttttcaatttggattatgatggttttatccgcaccacagacagcgaacatcaaaaatgcgtgcagaacgcctttgaaatcatgtttgaaaaaggggatatttataaaggcgcttatagcgggtattattgcgtgagctgtgagagttattgcgcgatctctaaagcggacaacacgaacgataaagtcctatgccctgattgcttgagagagaccacgcttttagaagaagagagttattttttcagattgagcgcgtatgagaagcctttgttggatttttacgctaaaaatcctgaagcgattttgcccgtttatcgtaaaaatgaggtaacttcttttattgagcagggtttattggatctgtctatcacgcgcacgagctttgaatggggcattcctttgcctaaaaaaatgaacgatcctaaacatgtggtgtatgtttggttggatgctttattgaattatgcgagcgcactagggtatttgaatgatttagacaataaaatggcgcattttgaatgcgctaggcatattgtgggtaaggatattttacgcttccatgccatttattggccggcttttttgatgagtttgaatttgcccctattcaaacagctttgcgtgcatgggtggtggacgatagagggcgtgaaaatgagtaagagcttgggtaatgttttagacgctcaaaaaatcgctatggagtatgggattgaagaattgcgctattttttattgcgtgaggtgccttttgggcaagacggggatttttctaaaaaagcgttaatagaaaggatcaatgcgaatttgaataacgatttggggaatttgttgaatcgtttgctaggcatggctaaaaaatatttcaatcattctctaaaaagcacaaaaatcaccgcttattattctaaagagctagaaaaagtgcatcaaattttagataacgctaattcttttgtgcctaaaatgcaattgcataaagctttagaggaattgtttaatgtttatgattttttaaacaaactcatcgctaaagaagagccatgggttttgcacaaaaacaacgaatcagaaaaactagaagccttattgagtttgatcgcaaacgcgcttttgcaatcaagctttttgctctatgcgttcatgccaaagagcgctgtgaaattagcgaatgctttcaacacagaaatcacgcccgataattacgaacgcttttttaaagctaaaaaattacaagatatgattttacaagacaccgagcctttattttccaaaatggagaaaattgaaaagacggaaaaagcgggagaagcctcaccagaaaaaaacgaaaaagaaaaaaaggacgcaaaagaaaaagccccactaaaacaagaaaactatatcggcattgaggatttcaaaaaagtagagatcaaagtggggcttatcaaagaagctcaaaggattgaaaaatccaataaattactgcgcttaaaagtggatttaggcgaaggccgtttgaggcagattatttcagggatcgctttggattatgagcctgaaagcttggtgggtcaaatggtgtgcgtggtggctaatttaaaacccgcaaagcttatgggcgaaatgagtgagggcatgattttagcggtgcgagatagcgacaatctagccttaattagccccactagagaaaaaattgcaggaagtttgatcagctaa

SEQ ID NO: 22526 - DNA, 1170 bp, Helicobacter pylori
atggttattgttttagtcgtggatagttttaaagacaccagtaatggcacttctatgacagcgtttcgtttttttgaagcgctgaaaaaaagagggcatgtgatgagagtggtcgcccctcatgtggataatttagggagtgaagaagaggggtattacaaccttaaagagcgctacatccccctagttacagaaatttcacacaaacaacacatcctttttgctaaacccgatgaaaaaatcttaagaaaggcttttaagggagcggatatgatccatacttatttgccttttttgctagaaaaaacagccgtaaaaatcgcgcgagaaatgcaagtgccttatattggctctttccatttacagccagagcatatttcttataacatgaaattggggtggttttcttggttcaacatgatgcttttttcgtggtttaaatcttcgcattaccgctatatccaccatatccattgcccgtcaaaattcattgtagaagaattagaaaaatacaactatggagggaaaaaatacgctatttctaacggctttgatcccatgtttagatttgaacacccgcaaaaaagcctttttgacaccacaccctttaaaatcgctatggtaggacgctattctaatgaaaaaaatcaaagcgttttaatcaaagcggttgctttaagcaaatacaaacaagatattgtattattgctcaaaggcaaagggcctgatgagaaaaaaatcaaacttttagcccaaaaactaggcgtaaaagcggagtttgggtttgtcaattccaatgaattgttagagatcttaaaaacttgcaccctttatgtgcatgcagccaatgtggaaagcgaagcgattgcgtgcttagaggccattagcgtggggattgtgcctgttatcgctaatagccctttaagcgcgaccaggcaatttgcgctagatgaacgatcgctatttgaacctaataacgctaaagatttgagcgctaaaatagattggtggttagaaaacaagcttgaaagagaaaggatgcaaaacgaatacgctaaaagcgctttaaattacactttagaaaattcagtcattcaaattgaaaaagtttatgaagaagcgatcagagattttaaaaataacccccatctctttaaaaccttatcataa

SEQ ID NO: 22527 - DNA, 1284 bp, Helicobacter pylori
ttgcttaacgctatcaagtttagaatttatcctaacgcccaacaaaaagaattgatttctaaacattttggctgttctagagtcgtgtataactactttttagattaccggcaaaagcaatacgcaaaaggcattaaagaaacttacttcaccatgcaaaaagtcttaacccaaatcaagcggcaagaaaaataccattacctcaatgaatgcaattctcaaagcttgcaaatggcgttaagacagctggtgagcgcttatgataatttctttagcaaaagagcgagataccctaaattcaaatccaagaaaaacgctaaacaatcttttgcaatccctcaaaacatagaaaccaaaacagaaactcaaaccatcgctctccctaaattcaaagagggcattaaggctaaattacacagagatttgcctaaagatagcgttatcaaacaggcttttatttcttgcatagcggatcaatatttttgttctctatcctatgaaaccaaagagcctatccctaaacccaccattatcaaaaaagcggtaggtttagacatgggcttaagaacgctcattgttacaagcgataaaataggatacccacacattcgtttttatcaaaaactagaaaagaaactcactaaagcgcaaaggaggttaagtaaaaaagtaaaagattccaacaacaggaaaaaacaagctaaaaaggtatccagattgcatttagcttgttcaaacactagagatgactacttgcataaaatcagtaatgagataaccaatcaatacgatctgataggagtagaaaccttgaatgttaaagctcttatgagaacctatcattctaaaagccttgctaatgcgagttgggggaaatttcttactatgctagagtataaagcccaaagaaaaggcaaaaccctcttatccatagacagatttttccctagctctcaattgtgttcttattgtggggtcaatacaggcaaaaaacatgaaagcatcactaaattcacttgtcctcattgtcaaaccacacaccacagagattataatgcgagcgtcaatatcagaaactacgctttaggcatgctagatgataggcataaagtaaagacagataaagctagggtagggattatccgaagcgattacactcatcacactaatgagtgtgtcaaagcttgtggagcttcctctaacggggttagttctaaatatggaaacatattggatctagctagttatggagctatgaagcaagaaaaagcccaatcgctttag

SEQ ID NO: 22528 - DNA, 741 bp, Helicobacter pylori
atgaaaaatactttcaaagcgtttgcctttttaattgtatttttttcaagcgctttattagcgcaggatttaaaaatcgctgctgctgctaatcttacacgcgctttaaaagcccttgttaaagaatttcaaaaagaacaccccaaagacactgttaatattagctttaattcttcaggcaaactctacgctcaaatcattcaaaacgccccttttgatttattcatttcagcagatatgattagacctaaaaagctttatgataaaaaaataaccccttttaaagaagaagtctatgctaaaggcgtgttggttttatggagtgaagatctaaaaatggattctttagaaattcttaaaaatcctaaaatcaagcgtatcgctatggctaatcctaaactagccccttatggaaaagccagcatggaagtcttagagaatttaaaactcactcccagtcttaaatctaaaatcgtttatggcgcttctatttctcaagcccatcaatttgtcgctactaaaaacgctcaaataggctttggagcgttatccttgatggataaaaaagataaaaacctctcttatttcatcattgataaagccctttataaccctattgaacaagccttgattatcactaaaaatggggctaacaaccctttagccaaagtctttaaagattttttattcagccctaaagccagagctatttttaaagaatacggctatattgtggattaa

SEQ ID NO: 22529 - DNA, 1392 bp, Helicobacter pylori
atgagtttgatcgttacgcgcttcgctccatcgcccactggctacctccacataggaggcttaagaacagccattttcaattatctttttgcacgagccaatcaaggaaaattttttttacgcattgaagacacggatttgagccgtaactctatagaagcggctaacgccattatagaagctttcaaatgggtagggctagaatacgatggcgaaatcctctaccaatccaaacgctttgagatttataaagaatacattcaaaaactcttagatgaagacaaagcctattattgttacatgagcaaagaagagttggacgctttgagagaagagcaaaaagccaggaaagaaaccccacgctatgacaatcgctatcgtgattttaaaggcacgcctcctaaaggcatagagcctgtggtaaggattaaagtcccccaaaatgaggtgattggttttaatgacggggttaaaggcgaagtgaaagtgaatactaacgaattagacgattttattatcgccaggagcgatgggacacccacttataactttgtggttactattgatgacgctttaatggggattactgatgtgattagaggcgatgatcacctttctaacacccctaaacaaatcgttctttataaggctttgaattttaaaatccctaattttttccatgtgccgatgattttgaatgaagaagggcaaaaattaagcaaacgccatggggccactaatgtgatggactatcaagaaatgggctatcttaaggaagctttagtgaattttttagcgcgtttggggtggagctatcaggataaagaggtttttagcatgcaagaattgctagaattatttgatcctaaagatttgaattcttcgcccagttgcttcagctggcacaagcttaattggctcaacgctcattatttaaaaaaccaaagtgtgcaagaattgttaaaacttttaaagccttttagttttagcgatctctcgcatttaaaccccactcaattggatcgcttgttagacgctctcaaagaaagatctcaaacactaaaagaattagcccttaaaatagatgaggttttaatcgcccctgtggagtatgaagaaaaggtttttaaaaaactcaatcaagcgctcgttatgcccttgttagaaaagtttaagctagaattaaacaaagccaatttcaacgatgaaagcgcgctagaaaacgccatgcgccaaatcattgaagaagaaaagattaaagcgggtagttttatgcagcctttaagattggcccttttgggtaagggaggcgggataggccttaaagaagcgctttttattttaggcaaaacagagagcgtcaaaagaatagaggattttttgaaaaactaa

SEQ ID NO: 22530 - DNA, 1800 bp, Helicobacter pylori
atgaaaaatattagaaatatcgctgtaatcgcgcatgttgatcatgggaaaaccactctagtagatggcttactttctcaatctggcacatttagtgagagggaaaaagtggatgaaagggtgatggatagcaatgatttggaaagagaaagagggattactatcctgtctaaaaacaccgctatttattacaaagacactaaaatcaatatcattgacactcccgggcatgctgattttgggggcgaagtggagcgcgttttaaaaatggtggatggggtgttgcttttagtggacgctcaagaaggggtcatgcctcaaactaaattcgtggttaaaaaggctttgagttttgggatttgccctattgtggtggtgaataaaattgataagcctgccgctgaaccggacagagtggtggatgaagtttttgacttgttcgtagccatgggggctagcgataagcaattggatttccctgtggtgtatgccgccgcacgagatggctatgcgatgaaaagtttagacgatgaaaagaaaaatttagagcctttgtttgaaacgattttagagcatgtgccaagccctagcgggagcgttgatgagcctttgcaaatgcaaattttcacgcttgattatgacaattatgtgggcaaaatcggtatcgctagggtgtttaatggctcggttaaaaagaatgaaagcgtgctgttgatgaaaagcgatgggagtaaagaaaatggccgtatcactaagcttataggttttttagggctggctaggactgagattgaaaacgcttatgcgggcgatattgtagcgattgccgggtttaatgcaatggatgtgggcgatagcgtcgttgatcctgctaaccccatgcctttagatcccatgcatttagaagagcctacgatgagcgtgtattttgctgtcaatgattcacccttagccgggttagaaggaaagcatgttactgctaataaattgaaagacaggctcttaaaagaaatgcaaaccaatatcgctatgaaatgcgaagaaatgggcgagggcaagtttaaagtgagtgggcgtggggaattgcaaatcactattttagctgaaaacttgcgccgtgaagggtttgaatttagcatttcacgccctgaagtcatcattaaagaagaaaatggcgttaaatgcgagccttttgagcatttagtgattgacacgccccaagattttagtggggctatcattgagagattgggcaaaagaaaagctgagatgaaagcgatgaatcccatgagtgatggctatacaagattagaatttgaaattcctgcaagagggcttatcggttataggagcgagtttttaaccgacaccaagggcgaaggcgtgatgaatcatagctttttagaattccgccctttcagcgggagcgtggaatcgcgcaaaaatggggcgctaatcagcatggaaaatggcgaagcgaccgctttttcccttttcaatatccaagaaagaggcacgctttttatcaacccccaaacgaaggtttatgtgggcatggtcattggcgagcacagccgggataatgatttagatgtcaatcctattaaatccaagcatttaaccaacatgagagcgagcgggagcgatgatgcgatcaaactcaccccgcctaggactatggtgttagaaagagcgttagaatggattgaagaagatgagattttggaagttacccccttgaatttaaggatcaggaaaaagattttagaccctaacatgaggaaaagggcgaaaaaataa

SEQ ID NO: 22531 - DNA, 1587 bp, Helicobacter pylori
atgaaattaaagaaacgaaaagttgcggctgcattgctaaagcgttttaccttgccactattgttcactacgggttcattaggggcggttacttatgaagtgcatggagattttatcaattttgctaaagtgggttttaaccattcgcccattaatcctgttaaaggtatctatcccacagaaacttttgttaaccttacgggtaagctagaggggtctgtgcatttaggtaggggatggaccgtgaatttaggcggtgttttgggcggacaggcttatgatggcactaagtatgataggtgggcgaaggattttacccccccaagctattgggataaaacttcttgcggtactgattctatgagtctttgtatgaatgccactaaaatgtggcagcaatcagggccaggtggcgtcattaaccctagaggtattggttgggaatacatgggtgagtggaacggcttgttccctaactactatccggctaacgcctacttgcctggtggctcaaggcgctatcaagtctataaagcaaatttgacctatgatagcgacagggtccatatggtaatggggcgttttgacattaccgagcaggagcaaatggattggatttaccaattgttccaagggttttatgggactttcaagctcactaagaatatgaaattcttgctctttagtggttggggtcgtggtatcgctgatggtcagtggttgttccctatctatcgtgaaaagccttggggggttcataaagcgggtattatttatcgccctacaaagaatttgatgatccacccttatgtgtatcttatcccaatggtaggcacattgcctggtgctaaaatagaatacgataccaatcctgaatttagcggtaggggcattaggaacagaacgactttctatgcgttgtatgactatcgttggaataacgctgaatacggtcgttacgcgcccgctcgttataacacttgggatccgttcttggataatggtaagtggcgtggcttgcaaggtcctggtggtgcgacgctccttttacgccaccatatagatattaacaactactttgtggttggtggtgcttatctcaacattggtaaccctaacatgaacttaggtacttggggtaaccctgtggctgttgatggtatcgaacaatgggtcggtagtatctatagcttagggtttgcggggattgacaacattaccgatgctgacgcgttcaccgagtatgttaaaggtggaggcaagcatggtaagtttagttggagcgtttatcagcgcttcactaccgctccaagggctttggaatatggtatcggtatgtatctagactatcagttcagcaagcatgttaaagcgggtctcaaactcgtatggttagagttccaaattcgtgcgggttacaaccctggaaccggtttccttgggccaaacggtcagccgcttaacttgaatactggtttgtttgagtcttcagcgttcgctcaaggccctcaaaacatgggcggtatcgcaaaaagcatcactcaagacagaagccatttgatgacacacattagttatagtttctaa

SEQ ID NO: 22532 - DNA, 1137 bp, Helicobacter pylori
ttgtttgaaaagttgaaattttttaaaatcaaaaaagacgatgaaattcagccagaagtcaatttaaattctgaaatctatgagcaatttaaggtctttagactcccgcttattttaatccaattgcttgtgcttttaggcactctgggatacttcgccctagaaaattatagccttatgcaagctttcttccaaacgacttacaccatgacagctacagggtttggtgctttaaatgaaagccagttcgggcctataagtatttttttaacttccattttaatgttttttggggcaggaatcattgcctttagcgtggctattttagttagcgtggtcaataaaggcacgcttaccagattgattaaggagaaaggtatgatttataaaatcgcgcgccttaaggatcattatgtgatttgttaccacaacgaatacaccattgaattgagcaagcagttccgctccgctcaaatcccctttgtggtcgtggataatgaccctagttttgaagaagaagccattaaacacaaatacccctactatatcataggcgatccgcacaccaatttagccatgctaaaaacccacttaagcagcgctaggggtgttgtggctttgtctaagattttaccggtgaatgtggcgttaatggtgagcgtgcgcttgtttgaaaaggaattaaaacgcaaaccttactacatcattgcgagcgcgcatagcgatgaaggcttagaaaaattaaaaaaattaggggctgatatggtggtttcccctacaaaactcatggcgcagagagtgagcgcgatggcggtgcgtccggatatggaaaatatcttagagcgttttatcaataaaaaagacacgcttttagacttagaggaagtgattgtccctaaaactagctggcttgtgttaaggaaattaaaagaagcccattttagagagatcgctaaagcgtttgtgattggtatcactcaaaaagatggcaaatacatccccatgcccgatggagaaacaatcattgcaagcgaatccaagctattaatggttggcacttcagaaggcgttgcgacctgtaagcaactcatctctaaccatcaaagacccaaagaagtggattacatttcattgtga

SEQ ID NO: 22533 - DNA, 189 bp, Helicobacter pylori
atggcaaaaagatgcgctttaacttttaaagggcctatgataggcaatcatgtcagtcatgcgaacaacaaaaataaacgccgtttactccctaacttgcgatcgattaagatccaattagacgacggcacgactaaacgcattaaagtggctgcttccactttaagaaccatgcgtaaaggggcttag

SEQ ID NO: 22534 - DNA, 1062 bp, Helicobacter pylori
atgctctattctttactatatggctatttcaatatcaatcttttccagtatttgacttttagagcagggttagggtttttcatagctttttttctcacgctttttttaatgcctaaattcattctatgggccaaggctaaaaaggctaaccagcccatttctagcttcgtgccaagccaccagaataaaaaagatacccctacgatgggggggattgtgtttgtttttgcaaccattgttgcgagcgtgttgtgcgcgtctttgggcaatctttatgtgttgttagggttaattgtgttagtgggttttagttttgtgggttttagagatgattacaccaaaatcaaccagcaaagtaatgccggtatgagcgcgaaaatgaaatttggcatgctttttatcctttcgcttatagtgtctgttttattgagccttaaggggttagacacttttttatacgcaccttttttgaaaaaccccttgtttgaaatgcctacgatgttagcggttggtttttgggtgttggtttttttatccacaagtaatgcagtgaatttaaccgacgggttagacggcttagcgagcgtgcctagcattttcactctcttaagcctttctatctttgtgtatgtggcagggaatgcggaattttctaaatatttgctttatcctaaagtcatagatgtgggggaattgtttgttgtctcgctggcgttagtgggatcgctctttggctttttgtggtataactgcaacccggcaagcgtgtttatgggcgatagcgggagtttggctttgggggggtttatcgcttataacgctatcgtttcgcacaatgaaatcttactcgttttaatgggatctatttttgtaatagaaactttgtcggtgatcttgcaagtagggagttataaaacccgtaaaaaacgcctttttttaatggcgcctatccatcatcattttgagcaaaagggttgggcagaaaataaggtgatcgtgcgtttttggatcatttctatgctgagtaatttagtcgctcttttaagcttgaaggtgcgttaa

SEQ ID NO: 22535 - DNA, 1269 bp, Helicobacter pylori
atgaaaatctctttattggggcatggcaaaaccactctagccctagggcgtttttttaaaaaaaaccataacgaagtcaaattttttgatgataaattcctttcatcttttaaagatagcgagggttttctttgttatcctagtaaggattttaaccctaatgattcccaactagaaatagtcagccctggcattagtttcacgcaccctttagtcataaaagccaagcatttagtgagcgaatacgattatattaatagcttgtttgatttggttttcacgcctactataatcagtattagcggcactaacgggaaaaccaccacgacagaaatgctcaccatgcttttagaagattttaaggctgtgagtggggggaatatcggcacgcccttgattgaattgtttgaaaaacgatcgcccttgtgggtgctagaaacaagctccttttctttgcattacaccaataaggcttaccctttaatctacttgcttatcaacatagaagccgatcatttgacttggcattgcaattttgaaaattatttgaacgctaaactcaaggttctaacattgatgcctaaaacttcgctcgctatcctccctttaaaattcaaagaacaccccattattcaaaactcgcaagcgcaaaaaatcttttttgacaaaagtgaagaggttttagagcgtttaaaaatcccttctaacgctcttttttttaagggagcgtttttattagacgcggctttagcccttttagtttatgagcaatttttaaaaataaagaatttaaaatggcaagattatagagaaaacgcccttaaaaggctgaacgcttttaaaattggctcgcataaaatggaagaatttagggataaacaagggcgtttgtgggtagatgacagcaaagccacgaacattgatgccaccttgcaagccctaaaaacctttaaaaaccaaaaaatccatttgattttagggggcgatattaaaggggtcaatttaacccccctttttgaagagtttaaaaactataaaataagtctttatgccataggttcaagcgcttttatcatccaagccttagcgttagaatttaatgtttcttgtcaggtttgtttggagttagaaaaagcggttcaagaaattaaaagcgttttatcgcaaaatgaaatcgctttgctttcacctagtgcagccagtttggatcaattttcttcgtataaagaaaggggtgaaaaatttaaagcgtttgttttaaaggattaa

SEQ ID NO: 22536 - DNA, 1329 bp, Helicobacter pylori
atgggaaaattttctaaattaggctttattttagccactttgggtagctctatcggtttagggcatatttggcgctttccttatatggtaggtcataatggggggagtgcgtttgtgcttttatatctggtgctaaccttgagtttaggcattgctatgcttttagtggaaatgctgattgggaatttgggtaaaaaagatgttgtttctaattatcaaatactagatcctaaaaggaaaaaatattaccctttcacttctttttttattttaggcggccctctcattttatccttttatgcggtggtgttaggctgggtgctttactatctttttgtagtaacttttgatttgcctaaagatttagagcaggccaaaatgcaatttagcatgctccaaaatggcagtttaatctggcctgttattggctttagcgcatgcttattgccgacaatttggtttgtttctagggggattgaagaggggattgaaaaattaaatgtagtgctgatgccgttgttgtttgtgattttcatagggcttttaatctatgcgatgactttagaaagcatgcctaaggctttgcactttttatttaattttgagattcaaaagattgattttaaggttgttatggacgctttagggcagatgttcttttctttgagtttgggggtaggcacgattattacttattcggcttttacgcccaaaaaagaaaatctattcaaaagctctttatttattgtcttgcccggtattttaatctctttgattgctggggtgatgattttcacctttgtgtttgaataccatgcagatgtgtctcaagggccagggcttgtttttatttccttacctttgactttcgctaaaatgggcatgagcgggcagattgtctcgctttttttctttatggcgcttgtttttgccgggatcacttccacggtttctttgatagagcctttagcgctttatctcatcaatcgttttaatttttcgcgccttcaagcgtcgctatggataggggttgttgtgtatgttttgggcgttttagtcattctttctatgaatgaacgatacgctaagtttttgagttttgctcataagagcgtgtttgggtggctggatttcatcacttcttcatttttaatgcctttgggaggcttgttttcagtcttgtttataggatggattttaaataaaaagcgctcttttttagccacgaagcatttctttaacgcaaacgcttttaaagcgtggcattttagcgttcgttttatcgcgcctgtagtgattttagcgattttcatcttgcaatttaagtga

SEQ ID NO: 22537 - DNA, 1125 bp, Helicobacter pylori
atgaaaatcagtgttagtaaaaacgatttagaaaatgctttgcgctacttgcaagcttttttggataaaaaggacgcttcttctatcgcttcacacatccatttagaagtcattaaagaaaagctttttttaaaagccagcgattccgatattgggctaaaaagctatatttttacgcaatctagcgataaagagggcgtaggcacgatcaacgggaaaaagtttttggatattatctcatgtttaaaagactccaatattattttagaaactaaagatgatagcttggcgatcaaacaaaataaaagctctttcaaactccccatgtttgacgctgatgagttccctgaattccctgttattgatcccaaagtgagtatagaagtcaatgccccttttttggtagatgcgtttaaaaagatcgctcctgtgattgagcaaaccagccacaaaagggaattagccggtattttaatgcaatttgatcaaaaacatcaaaccctttcggtggtaggcacggataccaaacggctttcttacacgcagttagaaaaaatctctatccattccactgaagaagacatctcttgcattttacctaaaagagctttattagaaatccttaagcttttttatgaaaatttcagttttaaaagcgatggcatgttagcggtaattgaaaacgaaatgcacacttttttcaccaaactcattgatgggaattaccctgattatcaaaaaatcctccctaaagaatacatttcttctttcactttaggcaaggaagaatttaaagagagcattaaattgtgcagttctttaagctccaccattaaactcactttagaaaaaaacaacgctttgtttgaatctttggattctgagcatagcgaaacggctaaaacctctgttgagattgaaaaaggtttggatattgaaaaagcctttcatttgggcgtgaacgctaaatttttccttgaagccttaaacgctttagggacaacgcaattcgttttaagatgcaatgagccttcttcgccttttttgattcaagagtctcttgatgaaaagcaaagccacttgaacgctaaaatttccactttgatgatgccaatcacactataa

SEQ ID NO: 22538 - DNA, 2322 bp, Helicobacter pylori
atgcaaaattaccagagccatagtattaaggttttaaaaggcttagagggggttaggaaacgccctggaatgtatattggtgataccaatgtgggtgggttgcaccacatggtgtatgaagtcgtggataacgctgtagatgagagcatggcgggtttttgcgatacgattaatatcactttgaccgatgagggttcatgcatcgtagaagataacgggcgaggcattcctgtagatattcaccccacggaaaaaatccccgcttgcaccgtggttttaacgattttgcatgcggggggcaagtttgataacgatacttataaagtttcaggcggtttgcatggcgtgggcgtttcggttgtgaacgctttgagcaaacgcttgattatgaccattaaaaaagagggtcaaatttatcgccaagagtttgaaaagggtattcctactagcgagcttgaaatcattggcaaaaccaaaagcgctaaagaaagcggcacgactattgaatttttccctgatgaaagcgtgatggaagtcgttgaatttcaagcgggtattttacaaaaacgctttaaagaaatggcgtatcttaacgatggcttaaaaatttctttcaaagaagaaaaaacccaactgcaagagacttatttctatgaagacggcttgaaacaattcgttaaagacagcgctaaaaaagaattgctcacccccattatttcgtttaaaagcatggatgaagaaacgcgcacttctatagaagtcgctctagcgtatgctgatgattataatgaaaacactttaagctttgtgaataacattaaaacttctgaaggtggcacgcatgaggcgggctttaaaatgggcttgtctaaagcaattttgcaatatattggcaataatattaaaaccaaagagtcacgccccatctctgaagatattaaagaggggttgatcgctgttgtgagcttgaaaatgagcgagcctttgtttgaagggcagactaaatccaaactcggcagttcgtatgcgcgcgcgttggtttcaaaattagtctatgataaaatccatcaatttttagaagaaaaccctaacgaagccaaaatcattgccaataaagccctactagctgcaaaagccagagaagccagtaagaaagccagagagcttacaaggaaaaaagataatttgagtgtcggcactttgcctggaaaattagccgattgccagagtaaagaccccttagagagtgaaatctttttagtggagggcgatagtgcgggcgggagcgctaaacaagggcgcgatagggttttccaagcgatcttgcccctaaaaggtaagattttaaatgtggaaaaaagccatttatcaaaaatcctaaaatcagaagaaattaaaaacatgatcacggcttttgggtgcggcattcaagagagttttgatatagaaagattgcgctatcataaaatcattatcatgaccgatgctgatgtggatgggagccatatccaaaccttgctgatgacttttttctatcgttatttgcgcccgctgattgaacaagggcatgtttatatcgctcaagcccctctttacaaatacaagaagggcaagacagaaatttatcttaaagacagcgtcgctttggatcattttttaattgagcatggcatcaattcggtggatattgaagggattggcaagaacgatttgatgaacttgttaaaagtggcacgccattaccgctatgcgcttttggaattagaaaaacgctacaatttgctagaaattttacgctttctcattgaaactaaggacgccttaagccttgatatgaaagttttagaaaaaagcattttagaaaaattagagggcttgaattatcagatcttacgctcttttgccactgaagaaagcttacatttgcacacgcaaacccctaaaggcttggtggaatttaacctagatgacaatctctttaaagaagtgttgtttgaagaagcgaattacacttaccaaaagcttatggagtataatttagacttcttagaaaataaggatattttggcgtttttagaagaagtggaaaatcacgctaaaaagggagcgaatatccagcgctataaggggctaggcgagatgaaccctaatgatttgtgggaaacgaccatgcataaagaaaaccgcagcttgatcaaactcaaaattgaagatttagaaaaaaccgatgcagtcttttcgctttgcatgggcgatgaagtagagcctagaagagcctttatccaagcgcatgctaaagatgtgaaacaactagatgtgtaa

SEQ ID NO: 22539 - DNA, 1359 bp, Helicobacter pylori
atgttaaggcttttgataggacttcttctaatgagttttataagcttgcaatcagcctcttggcaagaacccttaagagtgagtatagaatttgtggatttgcctaaaaaaatcattcgttttccggctcatgatttgcaagtgggggagtttggttttgtcgttactaaactttcagattatgaaatcgttaattctgaagtggtcattattgccgttgaaaatggcgtcgcaacggctaaattcagagcgtttgagtctatgaaacaaaggcatttacccactccaagaatggtcgctagaaagggtgatttagtctattttaggcaattcaacaaccaagcgtttttaatcgctcctaatgatgaactctatgagcaaatcagagcgactaacaccgatattaattttattagttctgatttgttggttacttttttgaatgggtttgacccaaaaatcgctaatttaaggaaagcgtgcaacgtttatagcgtgggggtgatttatattgtaaccaccaacacgctcaatattttaagttgtgagagttttgaaattttagaaaaaagagagctggatacaagcggcgttactaaaacttccacgccgtttttttctagggttgagggtattgatgcaggcacgctagggaaacttttttcaggcagtcagtctaaaaattacttcgcttactatgacgctttagtgaagaaagaaaaacgcaaagaagtgaggattaaaaagagggaagaaaagattgattctagagaaattaaacgagaaatcaagcaagaggccattaaagagcctaaaaaagccaatcaaggcacacaaaacgctcctactttagaagagaaaaactaccaaaaagcagagcgcaaacttgatgctaaagaagaaaggcgttatttgagagatgaaaggaaaaaagccaaagccaccaaaaaggctatggaatttgaagaaagagaaaaagagcatgatgaaagggacgaacaagagactgaaggaagaagaaaagctttagaaatggataaaggcgataaaaaagaagaaagagtcaaacccaaagaaaatgagcgagaaatcaagcaagaagccattaaagagccaagtgatggaaataacgccacccaacaaggcgaaaaacaaaacgctcctaaagagaacaacgctcaaaaagaagagaataaaccaaattctaaagaagaaaaacgccgcttgaaagaagaaaagaaaaaagccaaagccgaacaaagagcgagagaatttgaacaaagagcgagagagcatcaagaaagagatgaaaaagagcttgaagagcgaagaaaggcgctagaagcgggtaaaaaataa

SEQ ID NO: 22540 - DNA, 765 bp, Helicobacter pylori
atgaaaatcggtgtttatggagcgagcggtcgtatagggaaactgcttttagaagaattaaaaggggggtataagggattagcgctatctagcgtgtttgttaggcaaaaatgcgaaaccgatttcagctctttttcgcacgcccctttagtaaccaacgatttaaaagcgtttgtgagggcatgcgaatgcgtgattgatttttctttacctaaaggcgtggataatttgctagaggctcttttagaatgccctaaaattttagtttctggcacaaccggtttagaaaaagaaacgctagaaaaaatgcaacaattagccttaaaagcaccgcttttgcatgcgcacaacatgtctatagggattatgatgctcaaccaattagcctttttaacttctttgaaattaaaagatgcggatattgaaattatagaaacgcaccacaatctcaaaaaagatatcccgagcggcacggcgttgagtttgtatgaaacttgcgctaaggctagggggtatgatgaaaaaaatgccctaatcactcacagagaaggtttgcgctctaaagaaagcattggcatagccgctttaagggggggcgatgtcgccgggaagcacacgatagggttttatttagagggcgaatacatagagcttagccatacggcgactaaccgatctatttttgctaaaggggctttagaagtggccctgtggcttaaggataaagccgctaaaaaatatgaaatcaacgagatgtttggttga

SEQ ID NO: 22541 - DNA, 1446 bp, Helicobacter pylori
atgatagtaagaactcaaaatagtgaaagcaagatcaaagaattttttgaattttgcaaagaaaatgaagtggaatttgtggattttagattcagcgatattaaaggcacttggaatcacatcgcttattcttttggggctttaacgcatggcatgcttaaagaggggattccttttgatgcgagttgttttaaaggctggcaaggcattgaacactccgatatgattttaacccccgacttggtgcgttatttcattgacccttttagcgcggatgtgagcgtggtcgtgttttgcgatgtgtatgatgtgtataaaaaccagccttatgagaaatgccctagaagtatcgctaaaaaagccttacaacatttaaaagattcaggtttgggcgatgtggcttattttggcgcggagaatgaattttttatctttgattccattaaaattaaagacgcttccaattcccaatactacgaagtggatagcgaagagggcgaatggaatagggatagaagctttgaaaacggcgtcaattttgggcatagaccgggcaaacaagggggttatatgcctgtgccgccaacggatacgatgatggatattcgcacagaaattgtgaaagtcttaaaccaagtggggctagaaacttttgtcgtccatcatgaagtcgcgcaagcgcaaggcgaagtgggcgtgaaatttggggatttagtggaagcggctgataatgtccaaaaactcaaatatgtggttaaaatggtcgctcatttaaacgggaaaaccgccactttcatgccaaaacctttatacggggataacgggagcgggatgcacacccatgtgagcgtttggaaaaacaacgaaaacctttttagcggcgaaacttacaagggcttgagcgagtttgccttgcattttttagggggcgtgttgcgccacgctagaggattggccgctttcactaacgcttccactaattcttacaaacgcctaattccgggatatgaagccccatccattttaacttattcggctaataacaggagcgcgagcgtgcgtatcccttatgggatttctaaaaatagtgctaggtttgaattcagattcccggacagctcatcaaacccctacttggcttttgcagcgattttaatggcaggcatggatggcgttaaaaataagattgatcccggcgaggcgatggatattaaccttttcaaattgactttagatgaaattagggaaaaaggtatcaaacaaatgccccacactttaaggagatcgttagaagaaatgctagccgataagcagtatttaaaagaaagtcaggtctttagcgaagaatttattcaagcctatcagtctcttaaattcaacgctgaagtgttcccatgggagagcaagccccatccttttgaatttatcaccacttattcatgctaa

SEQ ID NO: 22542 - DNA, 453 bp, Helicobacter pylori
atgatgaaagttctattattagaagatgtgaaaaatttaggcaaagcgggtgaagtgtgtgaggttaaagatggctatgggaataactttttaatcgctaaccaaaaagccaaactcgctactaacgaagtgatcaacaaatacaaagccgaagtcaaaaagaaagcggaaaaagaagccctagaaaaggcacaaaaattgcaaatggtagaaaccttacagactatcacgctgactatccataaaaaagtcggcgcgaacggctctttatttggagcgatcacgaaagaagaaatcacggagcgtttgaaagaacagcatgcgagtttaaatttagataaaaaagacattgagctcaaacacccgattaaaagcacagggatttatgagattgaagtcaagcttggatcgggggttgtgggcgtgtttaaaattgatgtggtggctgagtag

SEQ ID NO: 22543 - DNA, 543 bp, Helicobacter pylori
atgtttgaagcgacgacgattttaggctatagaggggaattgaatcataaaaagttcgcgctcattggaggcgatgggcaggtaactttgggtaattgcgtggtcaaagccaatgcgacaaaaatcagaagcttgtatcacaaccaggttttaagcgggtttgccggaagcaccgcggacgcttttagtttgtttgatatgtttgaacgcattttagagagcaaaaagggggatttgtttaaaagcgtggtggatttcagtaaagaatggcgcaaagataagtatttacgccgactggaagcgatgatgatcgttttaaacttcgatcacattttcattttgagcggcatgggcgatgttttagaagctgaagacaataagatcgctgctattgggagtggggggaattacgctttaagcgcggctagggctttagatcatttcgctcatttagagcctagaaaacttgtagaagagtccttaaaaatcgcaggggatctttgcatttacaccaacacgaatattaaaattttggagctttaa

SEQ ID NO: 22544 - DNA, 909 bp, Helicobacter pylori
atgatgaaaactaaggcgggctttgtagctcttataggcaaaccaaacgctggaaaaagcactcttttaaacactttattaaacgctcatttagcccttgtttcgcataaggctaatgcgaccagaaaattgatgaaatgcatcgtgcctttcaaagataaagaatggtatgagagccaaatcatttttttagacacaccagggctccatcatcaagaaaaattactcaaccaatgcatgctctcacaggctttaaaagcgatgggcgatgctgaattgtgcgtttttttagcttctgtgcatgatgatttaaaaggctatgaagagtttttgagtttgtgccaaaaaccccatatcttggctttgagcaagattgacaccgccacgcataagcaggttttgcaaaaattacaagagtatcaacaatacgattcgcaatttttagccctagtgcctttgagcgcgaaaaaatctcaaaatttaaacgcgcttttagaatgcatcagccagcatttaagccctagtgcatggctttttgaaaaggatttgatgagcgatgaaaaaatgcgcgatatttataaggaaatcattagggagagtttgtttgattttttgagcgatgaaatcccttatgaaagcgatgtgatgattgataaatttatagaagaagaacgcatagacaaggtgtatgcgcgcattatcgtagaaaaagaaagccaaaaaaaaatcgtgataggcaaaaacggggtgaatatcaaacgcatcgggactaacgcacgattaaaaatgcaagaagtgggcgaaaaaaaggtttttttaaacttgcaagtgatcgctcaaaaatcatggagtaaggaagaaaagagcttgcaaaaactgggttatatccatagaaggaatagggattga

SEQ ID NO: 22545 - DNA, 5784 bp, Helicobacter pylori
atgaatgaagaaaacgataaacttgaaacttctaaaaaagcccaacaagattcaccccaagatttatccaatgaagaagcaacagaagccaatcattttgaaaatcttttaaaagaatccaaagaaagctcagatcatcatcttgacaaccccacagaaactcaaacccattttgatggagacaagtcagaagaaacccaaactcaaatggattctgaaggtaatgaaacttcagaatctagcaatggcagtctagcagacaagttattcaaaaaagccagaaaattagttgataataaaaaacctttcactcagcaaaagaatttagatgaagaaacccaagaactgaacgaagaagacgatcaagaaaataatgagtatcaagaagaaactcaaacggacttaattgatgatgaaacttctaaaaaaacccaacaacattcaccccaagatttatccaatgaagaagcaacagaagccaatcattttgaaaatcttttaaaagaatccaaagaaagctcagatcatcatcttgacaaccccacagaaactcaaaccaattttgatggagacaagtcagaagaaacccaaactcaaatggattctgaaggtaatgaaacttcagaatctagcaatggcagtctagcagacaagttattcaaaaaagccagaaaattagttgataataaaaaacctttcactcagcaaaagaatttagatgaagaaacccaagaactgaacgaagaagacgatcaagaaaataatgagtatcaagaagaaactcaaacggacttaattgatgatgaaacttctaaaaaaacccaacaacattcaccccaagatttatccaatgaagaagcaacagaagccaatcattttgaaaatcttttaaaagaatccaaagaaagctcagatcatcatcttgacaaccccacagaaactcaaaccaattttgatggagacaagtcagaagaaataactgacgactctaacgatcaagagattatcaaaggaagcaaaaagaaatatattattggtggcattgtagtcgctgttcttatcgtgattattttattttctagaagcatttttcactacttcatgcctttggaagataaaagctctcgttttagcaaagacaggaatctttatgtcaatgatgaaatccaaataaggcaagagtataaccgattgctgaaagaacggaatgaaaaaggcaatatgatcgataagaatcttttcttcaatgacgatcccaatagaaccttatacaactatttgaatattgcagaaattgaggacaaaaacccgttgagagccttttatgaatgtattagtaatggtggcaactatgaagaatgtttgaagcttatcaaagacaaaaaacttcaagatcagatgaaaaagactctagaggcttataacgactgcatcaaaaatgccaaaactgaagaagaaaggatcaagtgtttagatttaatcaaagatgaaaacctaaaaaaaagcttactgaaccaacaaaaagttcaagtggcgctagattgtttgaaaaacgctaaaaccgatgaagaacgaaacgagtgcctaaaactcataaatgaccctgagattagagagaaattccgtaaggaattagagcttcaaaaagagcttcaagagtataaggattgtatcaaaaacgccaaaacagaagctgagaaaaacaaatgcttgaaaggcttgtctaaagaagctatagagagattgaaacagcaagcgctagattgtttgaaaaacgctaaaaccgatgaagaacgaaacgagtgcttgaaaaatattccccaagacttgcaaaaagaactattagctgatatgagcgtcaaggcttacaaggattgcgtatcaaaagctagaaatgaaaaagagaaacaagaatgcgagaaattgctcacgcctgaagcgaggaaaaagttagaacaacaggttctagattgtttgaaaaacgctaaaaccgatgaagaacgaaaaaagtgtttgaaagatctccctaaagacttacaaagcgatattctagccaaagagagcctgaaagcttataaagactgcgtatctcaagccaaaaccgaagctgagaaaaaagaatgcgagaaattactcacccctgaagcgaaaaaacttttagaagaagaagccaaagagagcgttaaggcttatttggattgcgtatctcaagccaaaaccgaagctgagaaaaaagaatgcgagaaattgctcacccctgaagcgaaaaaaaagttagaagaagctaaaaaaagcgttaaagcttacttggattgcgtatcaagagctaggaatgaaaaagagaaaaaagaatgcgagaaattgctcacccctgaagcgaaaaaacttttagagcaacaagcactagattgtttgaaaaacgctaaaaccgataaagaacgaaaaaagtgtttgaaagatctccctaaagacttgcagaaaaaggttttagctaaagaaagcgttaaagcttacttggattgcgtatctcaagccaaaactgaagctgagaaaaaagaatgcgagaaattactcacccctgaagcgagaaaacttttagaagaagctaaaaaaagcgttaaggcttatttggattgcgtatctcaagccaaaactgaagctgagaaaaaagaatgcgagaaattactcacccctgaagcgagaaaacttttagaagaagakgccaaagagagcgttaaagcttacttggattgcgtatctcaagccaaaaacgaagctgagaaaaaagaatgcgagaaattgctcacccttgaatcgaaaaaaaagttagaagaagctaaaaaaagcgttaaggcttatttggattgcgtatctcaagccaaaaccgaagctgagaaaaaagaatgcgaaaaattgctcacgcctgaagcgaaaaaacttttagagcaacaagcgctagattgtttgaaaaacgctaaaaccgaagctgataaaaaaaggtgtgtcaaagatctccctaaagacttgcagaaaaaggttttagccaaagagagcctgaaagcttataaagactgcgtatcaaaagctaggaatgaaaaagagaaaaaagaatgcgagaaattactcacccctgaagcgaaaaaacttttagaagaagctaaaaaaagcgttaaggcttacttggattgcgtatctcaagccaaaactgaagctgagaaaaaagaatgcgagaaattactcacccctgaagcgagaaaactcttagaagaagctaaagagagcgttaaagcttataaagactgcgtatcaaaagctaggaatgaaaaagagaaaaaagaatgcgagaaattactcacgcctgaagcgaaaaaacttttagagcaacaagtgctagattgtttgaaaaacgctaaaaccgaagctgataaaaaaaggtgtgtcaaagatctccctaaagacttgcagaaaaaggttttagctaaagagagcgttaaggcttatttggactgcgtatcaagagctaggaatgaaaaagagaaaaaagaatgcgagaaattgctcacccctgaagcgaaaaaacttttagaagaagccaaagagagtcttaaagcttataaagactgcctctctcaagctagaaatgaagaagaaaggagagcttgcgagaaactactcacgcctgaagcgagaaaactcttagagcaagaagttaagaaaagcattaaggcttatttggactgcgtatcaagagctaggaatgaaaaagagaaaaaagaatgcgagaaattactcacgcctgaagcgagaaaatttttagcgaagcaagtgctaaattgtttggaaaaagctggaaatgaagaagaaagaaaagcatgtcttaaaaatctccctaaagacttacaggaaaatattttagctaaagagagtcttaaagcttataaagactgcctctctcaagctagaaatgaagaagaaaggagagcttgcgagaaactactcacgcctgaagcgagaaaactcttagagcaagaagttaagaaaagcgttaaggcttatttggactgcgtatcaagagctaggaatgaaaaagagaaaaaagaatgcgagaaattactcacgcctgaagcgagaaaatttttagcgaaagaactccaacaaaaagataaagcgatcaaagattgcttgaaaaacgccgatcctaacgacagagcggctatcatgaagtgtttggatggtttgagcgatgaagagaagctcaaatacctgcaagaagctagagaaaaggctgttgcggattgtttggctatggctaaaaccgatgaagaaaaaaggaaatgccaaaacctttatagcgatttgatccaagaaatccaaaataaaaggacacaaaacaaacaaaatcaattgagtaaaacagaaaggttgcatcaagcaagcgagtgcttggataacttagatgaccctactgatcaagaggccatagagcaatgtttagagggcttgagcgatagtgaaagggcgctaattctaggaattaaacgacaagctgatgaagtggatctgatttatagcgatctaagaaaccgtaaaacctttgataacatggcggctaaaggttatccattgttaccaatggatttcaaaaatggcggcgatattgccactattaacgccactaatgttgatgcggacaaaatagctagcgataatcctatttatgcttccatagagcctgatattgccaagcaatacgaaacagaaaaaaccattaaggataagaatttagaagctaaattagctaaggctttaggtggcaataaaaaagatgacgataaagaaaaaagtaaaaaatccacagcagaagctaaagcagaaaacaataagatagacaaagatgtcgcagaaactgccaagaatatcagtgaaatcgctcttaagaacaaaaaagaaaagagtggggaatttgtagatgaaaatggtaatcccattgatgacaaaaagaaagcagaaaaacaagatgaaacaagccctgtcaaacaggcctttataggcaagagtgatcccacatttgttttagcgcaatacacccccattgaaatcactctgacttctaaagtagatgccactctcacaggtatagtgagtggggttgtagccaaagatgtatggaacatgaacggcactatgatcttattagacaaaggcactaaggtgtatgggaattatcaaagcgtgaaaggtggcacacccattatgacacgcttaatgatagtctttactaaagccattacgcctgatggtgtgataatacctctagcaaacgctcaagcagcaggcatgttgggtgaagcaggggtagatggctatgtgaataatcactttatgaagcgcataggctttgctgtgatagcaagcgtggttaatagcttcttgcaaactgcgcctatcatagctctagataaactcataggccttggcaaaggtagaagtgaaaggacacctgaatttaattacgctttgggtcaagctatcaatggtagcatgcaaagttcagctcagatgtctaatcaaattctagggcaactgatgaatatccccccaagtttttacaaaaacgagggcgatagtattaagattctcacaatggacgatattgattttagcggtgtgtatgatgttaaaattactaacaaatctgtggtagatgaaattatcaaacaaagcaccaaaactttgtctagagaacatgaagaaatcaccacaagccccaaaggtggcaattaa

SEQ ID NO: 22546 - DNA, 768 bp, Helicobacter pylori
atgaaaataggcgtttttgatagcggtgtgggagggtttagcgttttaaaaagccttttaaaagcgcaactatttgatgaaatcatctattatggcgatagcgctagagtgccttatggcactaaagaccccaccacgatcaagcaatttggcttagaggctttggattttttcaaaccgcaccagattaaattattgattgtggcatgcaacaccgcaagcgctctggctttagaagagatgcaaaagcattccaaaatccctgttgtgggcgtgattgagccaagcattttagcgatcaaacggcaagtgaaagataaaaacgcccctattttggtgctagggacaaaagcgacgattcaatccaacgcctatgataacgccctgaaacaacaaggctatttgaatgtttcgcatttagccacttctctttttgtgcctttgattgaagaaagtattttagagggcgaattgctagaaacttgcatgcgttattatttcactccattagagattttacctgaagtggttattttaggttgcacgcattttcccttgatcgctcaaaaaattgagggctattttatggagcattttgccctttcaacgccccccctactcatccattctggcgatgctattgtggaatatttgcaacaaaattacgcccttaagaaaaacgcatgcgcgttccctaaagtggaatttcatgcgagcggcgatgtggtttggctagaaaaacaagctaaagaatggcttaaattgtaa

SEQ ID NO: 22547 - DNA, 1317 bp, Helicobacter pylori
atgaacgaaaacgcgcctacgcacaaaagttcgcacaaagtcaaaacacacacgccagtgagcggttatcacattgaagatttacgcacctaccctactgaaaagcttttagaaatcgctaacaagctcaaagtggaaaacccccaagaattcaaacgacaagacttgatgtttgaaattttaaaaacccaagttacgcaaggcggatacattctttttaccgggattttagaaatcatgcctgatgggtatggctttttaagagggtttgatgggagtttttcagacgggcataacgacacatatgttagcccttctcaaatcaggcgttttgctttaaggaatggcgatattgttaccggtcaagtgcgatcccccaaagatcaagaaaaatactacgcccttttaaaaatagaagctatcaattactcgccttcagatgagattagaaaccgccccttatttgacaatctaacccccctattccctgatgaacagatcaaattagaatacgaacccactaaagttaccggcagaatgctagatttattcagccctgtggggaaaggccaaagggctttgatcgtcgcgccaccaaggactgggaaaacggagctgatgaaagaactcgcccaaggcatcacttctaaccaccctgaagtggagctgattatccttctagtggatgagcgccctgaagaagttacggatatgcaacgaagcgttaagggtcaagtttttagctccacttttgatttgcccgcaaacaaccacataagaatcgctgaattagtcctagaaagggccaaaaggcgcgtggaaatgggcaaagatgtggtggttttattggattctatcacccgtttagccagagcgtataacgctgtaacgccttcaagcggtaaggttttaagtggaggcgtggatgcaaacgccttgcataggcccaagcgtttttttggagccgcaaggaatattgaagaaggcgggagcttgacgattatcgctacggcgttgattgaaacgggatctagaatggatgaggtgatttttgaagaatttaaaggcaccgggaatagcgaaatcgttttagcgaggaatattgcggacaggcgcatttacccggcctttgatattttaaaatccggcacacgaaaagacaatatcttgcttggcaaagaccgcttgactaaagtgtgggttttaaggaatgtgatgcaacaaatggacgacatagaagccttaagctttgtgtattctaaaatgcaacaaactaaggacaatgaagaatttttaaatttaatgaatgaaaaataa

SEQ ID NO: 22548 - DNA, 204 bp, Helicobacter pylori
atgaaaaaaggcattcaccccgaatatatcccatgcaaagttacttgcgtaacgagcgggaaagaaattgaagttttaagcaccaaacctgaaatgcgtattgatatttctagcttttgccaccctttttatactggtagcgataaaatcgctgacactgcagggagagtagaaaaattcaagcaacgctacaacttgaagtaa

SEQ ID NO: 22549 - DNA, 864 bp, Helicobacter pylori
gtgctgtattttttgcccactcctataggtaatctcgctgacattacgctacgcgccttagaagttttagagcgttgcgaggtttttttatgcgaggatacaagggtgagtaagaggttgttgcacttgctcgcacaaaaccctattattagccattctttccccaatatcgctactaaaaaaagggagtttatcgcattccattcgcacaatgaccaggaatttttaaaccaaataaagccttctttttttgacaaagaaatcgctgtgatgagcgatgcgggcatgccaagtttgagcgatccaggcatgagtttagccgcttacgctttaaaacataacattcaatacgatgttttgcccggagctaacgcgctcactacggcgttttgcgcgagcgggtttttagaagggcggtttttttatgctggctttttaccccataaaagcaaggaaaggcgcttaaaaatcgctaaaattttaaacgctttagcgtatttggaagaaaaaaccccggtggttttttatgaaagcccgcaccgattgttggagactttaaaggatttaaacgatctggctaaaggcatgcatttgtttgcggctaaagagcttaccaaactccaccaacaatattatttaggagaggtttctcaaatcatagagcggttgcaacaaagcactatccaaggggagtgggttttagtgcttttgaatgagaaaaaaatagagccttgcatggggctatcggcgttattggagttggatttacctcctaaaattaaggctaaaattgaagccgttatgacacaaaaaaacgctaaagagctttatttccagcgtttgttagaagaaaaaaatcaataa

SEQ ID NO: 22550 - DNA, 939 bp, Helicobacter pylori
atggccgtttatttagattttgaaaatcatattaaagagattcaaaatgaaattgaattagcccttattagaggcgatgaggacgctaaagaaatcttagaaaaaagattggataaggaggttaaaagcatttattccaatctcactgattttcaaaaactccaattagcaagacaccctgacagaccctacgctatggattacattgatctcatcttaaaagataaatatgaagtctttggggataggcattataacgatgataaagcgatcgtgtgctttgtagggaaaattgataatgtcccagttgtggtgatcggagaagaaaagggcagagggactaaaaacaaactcttaagaaattttggcatgcctaacccttgtggctatcgtaaggctttgaaaatggcaaagtttgctgaaaagtttaatttgcctattttaatgcttgtggatacagccggggcgtatccggggattggtgcagaagaaagggggcaaagtgaagcgatcgctaaaaatctccaagagttcgcctctttaaaagtccctactatttctgtaattatcggtgaggggggcagtggtggtgcgctagcgattgcagtggctgacaaattggctatgatggaatattccatttttagcgttatatccccagaaggttgtgcggcgattctttgggatgaccctagcaagactgaagtggctattaaagcgatgaaaatcacgcctagagacttaaaggaggcggggcttattgatgatattatcttagagcctagcaaaggggctcatagagacaaattttcagccgctaacacgatcaaagagtattttttagacgctctaagaactatccaacaagaccctcatttccttgacaaccgctatcaaaaattaatgtcgcttggttcgtttgtggagagcatgaattag

SEQ ID NO: 22551 - DNA, 1239 bp, Helicobacter pylori
gtgcgtcggattgtagtaactggaatgggaatgatcaattcgctaggtttaaataaagaagattcttttttagcgatcgctaaaggggaatgcggtatcaaacacatagaaagttttgatgcgagcgcgtttcctgtgcgtattgctggagaaatcactgactttgaccctacagaggtgatgaatcccaaagatgttaaaaaggcgggtcgtttcattcaattagccttgaaagccacaagagaggcgatgaaagatagtgggattttagacgctcacaatagatgccctgaagaattggcaaatcgcatgggcgtaagctctggctctgggattggcgggttaggcaatattgaagcgaattccattttttgttttgaaaaaggccctagaaaagtcaatccctttttcatcacttctgcgttagtgaatatgattggtggtttcacttccattgagtttggcattaaagggcctaatctctctagcgtaacggcttgtgcagcaggcactcatgccattattgaagccgttaaaaccattttgcttaatggggctgataaaatgctagtcgtgggagcggaatccaccatttgtcctgtagggattggggggtttgcgagcattaaagccctttctacaaggaatgatgatcctaaaaaagcttcaagaccttttgataaggatcgcaatggctttgtgatgggcgaaggcgctggggctttggtgcttgaagaatacgagagcgcgaaaagaagaggggcaaaaatttatgcagaatttgccgggtatggcgagagtggcgatgctaaccatatcacagccccagcccctgagggcgaaggggcttttagagccatgaagatggctttagaaatggcgaaagtggaaataggctatgtgaacgctcatgggactagcacgcattataacgatctatatgaaagcatcgctctaaaaaatgtgtttggttctaaagaaaaagtccctcctgtcagctccactaaagggcagattgggcattgcttgggtgctgcgggcgcgttagaagccgttatttctatcatggccatgaatcaaggaatcttacctcctaccatcaatcaagaaatgcctgacccagaatgcgatttggattatatccctaatgcggccagagaaaagcgagtggatgcagtgatgagtaactcatttggttttggtggcactaatggtgttgtgattttcaaaaaagcctag

SEQ ID NO: 22552 - DNA, 237 bp, Helicobacter pylori
atggctttatttgaagatattcaggcagttattgctgagcagttgaatgtggatgcggtgcaagttacgccagaggcggaatttgtgaaggatttgggtgcagactctttagatgtcgtggaattaatcatggcgttagaagaaaagtttggcgttgagattcctgatgagcaagcggaaaaaatcatcaatgtgggcgatgtggtgaagtatattgaggataataaactggcttaa

SEQ ID NO: 22553 - DNA, 744 bp, Helicobacter pylori
atgcaattcacagggaaaaatgttctcattactggggcttctaaaggcattggggctgaaatcgccaaaactctcgcttctatggggctgaaagtttggatcaattaccgcagtaatgctgaagtggctgacgctttgaaaaatgagcttgaagaaaaaggctataaggcagctgtcattaaatttgatgcggcttctgaaagcgattttattgaagcgatacaaaccatcgtccaaagcgatggggggttgtcttacttggtgaataacgccggtgtggtgcgcgataaattagcgatcaaaatgaaaacagaagactttcaccatgtcatagacaataacctcacttcagcctttataggttgccgagaggctttaaaggtgatgagcaagagtcgttttgggagcgtggtcaatgtcgcttctatcattggtgaaagaggcaatatggggcagacaaactactcagcgagtaaggggggaatgattgcaatgagcaagtcctttgcttatgagggagctttaaggaatattcgtttcaactctgtaacgcccggttttatagaaaccgacatgaacgccaatttgaaagacgaactcaaagcggattatgttaaaaacattcctttaaacaggctagggtctgctaaggaagtggcagaagcggtagcgtttcttttgagtgatcactctagttacatcactggagagactctcaaagtcaatggcgggctttatatgtag

SEQ ID NO: 22554 - DNA, 213 bp, Helicobacter pylori
atgccagggattaaggttagagaaggcgatgcgtttgatgaagcttataggagattcaaaaagcaaaccgatcgcaatttagtggtaacagaatgccgtgctagaaggttctttgagtctaagactgaaaaacgcaaaaaacaaaaaatcagcgctaaaaagaaggttttgaagcgtctttatatgttaaggcgttatgagtcaagactataa

SEQ ID NO: 22555 - DNA, 1101 bp, Helicobacter pylori
atgggcttgtctgtaggcattgtgggtttgcctaatgtgggcaaatccagcacctttaacgcgctcactaaaacccaaaacgcccaaagcgcgaactaccctttttgcaccattgaacccaataaagccattgtgaatgtgcctgataggcggcttgatgcgttggctcaaatcgtaaagcctgaacgcattttgcattctgtggtggaatttgtggatattgccggattgattaagggagcgagcaagggggagggtttaggcaatcagtttttagccaatatcaaggaatgcgaagtgatcttgcaagtggtgcgttgttttgaagatgataatatcacgcatgtgaacgacaagattgatcctttgaatgatatagaaactattgaattggagttgattttagcggatattgccgctttagacaaaaggatcgatcgcttgcaaaaagccttaaaaagctcaaaagacgctaaaaatcttttagaatgcgctttgagtttaaaaacgcatttagaagaattaaaaccggcgaaaactttccccttgaatacaagcgaggcttttttggagttggacaaggaattgcgttttttatctcataaaaaaatgatctatgtcgctaatgtgggcgaagaagatttaaacgcgctcaatgagcatgccaaaaaagtcaaaaaccatgcgaaagaacaaaatagcgagtttgttgccttgtgtgctaaattagaagaagaaatggtttctatgagtggagatgaagtcaaagaatttttgcaaagtttgggcgtagaagaaagcgggctagaaaagaccattcgtttgagttttaaggaattaggtttgatcaattattttaccgctggagtcaaggaagtgcgatcatggacgattaaaaaaggctctagtgcgcctgtggctgctggggtgatccataaggattttgaaaaaggcttcattagagctgaaaccatcagttatgatgactttatcgcttataagggcgaagccggagcgaaagaaaagggagcgttacgcattgaaggtaaggattatatcgttcaagatggcgatgtgttgcattttcgcttcaatatctag

SEQ ID NO: 22556 - DNA, 1491 bp, Helicobacter pylori
atgttaaaaatcaaattagaaaaaaccacttttgaaaacgcaaaagctgaatgcagtttagtttttattatcaataaggattttagccacgcttgggtcaaaaataaagagttgctagaaacctttaaatacgaaggcgaaggcgtatttttagaccaagaaaataaaatcctgtatgcgggcgttaaagaagatgatgtgcatttattgagagagagcgcgtgtttagccgttcgcacccttaaaaaactcgcttttaaaagcgttaaagtgggcgtttatacttgtggtgcacattctaaagataacgcgcttttagaaaacttgaaagcgctgtttttgggcttgaaattaggtttgtatgaatacgacacttttaaatccaacaaaaaagaaagcgttttaaaagaagccattgtcgctttagaattgcacaaaccttgcgaaaaaacttgcgcaaattctttagaaaagagtgctaaagaagcgttaaaatacgctgaaatcatgacagaaagcttgaatatcgttaaagatctagtcaataccccccctatgattggcactccggtttatatggctgaagtggcgcaaaaagtggctaaagaaaaccatttagaaatccatgttcatgatgaaaaatttttagaagaaaagaaaatgaacgcctttttagcggtcaataaagcctctcttagcgtcaatcctcctcgcttgatccatttagtctataagcctaaaaaagcgaagaaaaaaatcgctttagtgggtaagggcttgacttatgattgtgggggtttgagcttgaaaccggccgattacatggttactatgaaagcggataaaggcggtggctctgcggtgattgggcttttaaacgcattagccaaactaggcgtggaggctgaagtgcatggcattattggggctacagaaaacatgataggcccagccgcttataaaccagatgatattttgatctccaaagaaggcaagagcatagaggtccgtaataccgacgctgaggggcgtttggttttagcggattgtttgagctacgctcaagatttaaaccctgatgtgatcgtggattttgcgacccttactggggcatgcgttgtaggcttaggcgaattcacttcagcgatcatggggcataatgaagagttaaaaaacctctttgaaacttcagggttagaatccggcgaattattagccaaactcccctttaaccgccatttaaagaaattgattgaatctaaaatcgctgatgtgtgcaatatttcttcttcacgctatggcggtgcgatcacagcgggcttgtttttaaatgaatttattagagatgagtttaaggataagtggctacacattgacattgcaggccctgcttatgtggaaaaagaatgggatgtgaatagctttggagcgagtggggctggcgtgagagcttgcacagcttttgtggaagagcttttgaaaaaggcttga

SEQ ID NO: 22557 - DNA, 456 bp, Helicobacter pylori
atgaataagctcttaaagttttctcaagtttttataggcagcgatcatgcagggttgcatcttgcagagtttgtccagcgttttttagaagacaaggattttaagatccaagcttttttacccaccatgagagtggattaccctgattacgccaaattagtgtgccaaaaggtcttagaaaatgcgcaaagctatggcattttagtgtgcgccacagggataggcatgagcatgggcgctaatcgctttaagggtattagagccgctttgtgccttgatgcttacatggctaaaatgactcgcttgcacaataacgctaatgttttgtgtttgggcgaaaagattagcggcattggcgtggtggaaagcattttagaagcgtttttctctacagaatttgaacaaggccgtcatgtgttgcgcatccaaaaactagatgaatcgctgaaatcataa

SEQ ID NO: 22558 - DNA, 873 bp, Helicobacter pylori
atgaaatttttacgctctgtttatgcattttgctccagttgggtagggacgattgttattgtgctgttggttatcttttttatcgcgcaagcctttatcattccctctcgctctatggttggcacgctctatgagggcgacatgctctttgtcaaaaagttttcttacggcatacccattcctaaaatcccatggattgagcttcctgttatgcctgattttaaaaataacggacatttgatagagggggatcgccctaagcgtggcgaagtggtggtgtttatccctccccatgaaaaaaagtcttactatgttaaaaggaattttgccattggaggcgatgaggtgttgttcactaatgagggtttttatttgcacccttttgagagcgacacggacaaaaattacatcgctaaacattaccctaacgccatgacaaaagaatttatgggtaaaatttttgttttaaacccttataaaaatgagcatccgggtatccattaccaaaaagacaatgaaaccttccacttaatggagcaattagccactcaaggcgcagaagctaatatcagcatgcaactcattcaaatggagggcgaaaaggtgttttataagaaaatcaatgacgatgaatttttcatgatcggcgacaacagagacaattctagcgactcgcgcttttgggggagtgtggcttataaaaacatcgtgggttcgccatggtttgtttatttcagtttgagtttaaaaaatagcctagaaatggatgcagaaaataaccctaaaaaacgctatctggtgcgttgggaacgcatgtttaaaagcgttggaggcttagaaaaaatcattaaaaaagaaaacgcaacgcattaa

SEQ ID NO: 22559 - DNA, 2037 bp, Helicobacter pylori
atgaaatccctatctaatgcccttttttcgctctttttaaaaggtttttatttcaccttttttatgagcttgttgtttgtgtttaatcgtatcggctttatcctttatactggctattataagcatgctttaaaaaaccctgtttttgatgaaatcatcaaaaccctattcaatggagccagatatgataatcgtgtggtctcaagcttagcgattctttttatcatcatcgggttattggggttatttatccctaaacaccaaaccaaaatgcttaatattgtggcgtatttttctatcgctattatcctgtttttaaacattgcaaacattgtttattatggtatttatgggaatgtgtttgatgaaaatttattggaatttttgcatgaagacacgctcacgattttaaaaatgagcggggaataccctattttttctagtttttcactctttttaatccttagcgttttaacctcttttatctatttcaaactccaaaacgacctttttaaacccaaaaatgcttatcaagccgcccacaccaaaccccttaaaactttcattttatttgcgcttttttccctcacacaaatgttttacattaacgcgcaattgagttttgtgggcgcgtctttagatctcagcatagagccagccaaagatccttttttaatgaaaattacccccggagcgtttcgcaacctttatcttttagcacgcaattacagacaaagccataaccttaaattcagcgattttgctaaagaaacgcctttagaagtggcgaaaaattatttccatcttaaagagaacccttcaaacaacctctatgagttgctaactcagacaagccgcaacaattccaatcaaaccattcaacatgttttttatatcgtttcagagtctttgagttcatggcattttgatccaaaatttgacgctatagggctaacgagcgctttacaagacttggttaaaaaagagcatgcccacatgctttctgcttttattgaaagcgccccacggaccgttaaaagcctagatgtccaaatcacaggcttaccctatatcaatgataataacttagtcaattcaggggtgatcctccctagctttcctatggcgattggcaatatcacaaaaactctgggttataaaaacaacttttattatgggggtagcgggatttggaacaaactcactagtttcaccaaaaaacaaggttttcacgccctttatttcaataaccatctcttagaatttgcccaaaacaagccctaccctaaacccatagagagcaactggggagtgcatgataatattttatttgactatattttagaaaacaccaacccccatgaaaaaactttcagcatggtcatgactttaagcaaccatgcgatcaaaaacgtgaatctcaaagcctttggcgtgcctttagaaaaaatccaacaatttgtggaaaaaacccccaaatcagaaaatttaccggacgctaattctttagggcatatttactggtatgacaaagtaatcgtcagtttcatcaaaaaagccagccaaaaattccctaactcgctttttatcatcacaggggatcattttgacaggagctatgaatacgctaaaaacgatttgtatatcattaaatccgtgccgcttattttatatgcccctactttaaagcctaaaaaaatcagtcaggtcggatcgcatttagacatcgcccctacgattattgaattagtcgcccctaaaggctttcaattcgtgagttttgggaagcctttattttctaacaatacaacaaaccccccaagccaccccaattacgcgctaggctatgaagcgatcgctaccaaagattatttttataacccaagtttggggttaaggtatttgaacgaaagccctaaagagccaaaggataaacaaaacgacaaaatagaagcttctaagttttatcagcaattagaatctttgaaagcccttagttattacttgctctatcatggggctaatcttaaagattga

SEQ ID NO: 22560 - DNA, 1020 bp, Helicobacter pylori
atggaaatcacgctttttgaccccatagacgcccacttgcatgtgcgagaaaacgcacttttaaaagcggtgttaggatattctagcgagccttttagtgctgcagtgatcatgcctaatctcagtaagcccttgattgacactccaaccacccttgaatacgaagaagaaattttaaaccattcttcaaacttcaagcctctaatgagtttgtatttcaatgatggcttgactttagaagaattgcaatgcgcaaaagaaaaaggcgtcaggtttttaaagctctaccccaaaggcatgaccacaaacgcgcaaaacggcacttcggatttgttgggtgaaaaaactttagaggttttagaaaacgcccaaaaattaggctttattttatgcatccatgcagaacaaaccgggttttgtttggataaagaatttttatgccatagcgttttagaaacttttgccctttcattccctaaactcaaaatcattatagagcatttgagcgactggcgcagtatcgctttgattgaaaaacatgacaatctctatgcgactttgactttacaccatatcagcatgactttagatgatttattaggggggagtttgaacccgcattgtttttgcaaacccttaatcaaaaccaaaaaagaccaagaaaggcttttatcccttgctttaaaagcccaccctaaaatctcttttggctctgatagcgccccgcatttcatttctaaaaagcatagcgctaacatcccggcgggcatcttttctgcccctattttattgcctgcgttgtgcgaactttttgaaaaacacaacgctttagaaaacttgcaagcctttatcagcgataacgctaaaacaatctatgggctagaaaatttgcccagtaaaaaagcgcgtttgtctaaaaaaccctttatgatccctacacacacgctttgcttgaatgaaaaaatcgctatcttaagagggggcgaaacgctatcttggaaccttcaagaaatcgcctaa

SEQ ID NO: 22561 - DNA, 975 bp, Helicobacter pylori
atgccggaaaattctaaactacaacctgctaagttagggaaaaattttgaccctgtggatcattctaacaggaattttttcttttctctcattctgtctgtattgttacactggttgatttattttttatttgaacacagagaagatttttttccttcaaaacccaagcttgttaaattaaatcctgaaaatttattggttttaaaaagaggccattcgcaagatcccagtaaaaacacccagggcgctcctaaacccacgctggctggcccccaaaaacctccaacgcctcccacacccccaactccgccaaccccgccaaccccgccaaaacctatagaaaagcctaagcctgagcctaaaccaaaacccaaacctgaacccaaaaagcccaatcataaacacaaggctcttaaaaaagtggaaaaagtggaagagaaaaaagtagtagaggagaaaaaagaagagaaaaaaatcgtagagcagaaagtagaacaaaaagtagagcagaaaaaaatagaagagaaaaaacctgtcaaaaaagaatttgaccctaaccagctttctttcttgcctaaagaagttgcgccacccagacaagaaaataataaaggcttggataaccaaaccagaagggatattgatgaattgtatggcgaagaatttggggatttaggcacagccgaaaaagatttcatcaggaataatttaagggatattgggcgcatcacgcaaaaatatttagaataccctcaagtagcggcttatttagggcaggacgggacgaatgcggtagagttttacttgcaccctaatggcgatattaccgatcttaaaatcatcattggctctgaatacaaaatgcttgatgacaacaccttaaagaccattcagatcgcttataaggattacccacgccccaaaactaaaaccctcattcgcatcagagtgcgttattacttagggggcaattaa

SEQ ID NO: 22562 - DNA, 3006 bp, Helicobacter pylori
ttgggttgcgtttttaccaatttcagattaagacgctcgcaaacaccaaaggcaaaaacaccaatgatttttgaaaagcaagactaccaacaagagtgtatctacaatatcatcacgcttttagacggctttgattttaagcgccacgatgccttaaatctaaaagattgtttaaatcaatttcatgctgcatgcgaaattcctgtcaaaaatgtaagcggcaagctcaatgttgatgttttgatggaaacaggcacgggcaaaactttcacttacttgaatttgatctttgcactccataaggcttatgggcaaaataaattcatcatctttgtcccacgaaaagccattttggagtcggttaagcaaaatatccgccttacgaaagattatttttatttagaattcaaacgccacctgaaaacctacacttatgaaggggttaaatcaccaagcaacattatcaatcattacattaaaaaccaagatgaactgagcgtcttgctcctcactaacagcgcgattgacaaggagggaaacatactcaataaaaacagcgaaaacctttttaacaccaaaagcatttttgaaaatatcgctgatttaaagcctatttctatcatagacgagccgcatttgcttaagggtgaagcgtttggtaagtattttggtaaaataggcgcgctttattttcgctttggggcgacttttgccaaagaaaaagagcatgctttaagcaatgttgccttttgtttggattcaatcagcgcgtttagaaattaccttgtcaaacaaatccgcatccattctgtcatgcaagatgcgcaaagcccgtttttgctcaatgcggattcaaaaagcgcaaaaattgccttttacaaagcgggcattcttaaacaaatcacgctttcaaagggagaggatttaggcaaaattaacgcttcttttaacggcgttagtttggttaaaaccgccaaagacaaggcttatttgagtaatggcgctacgcttgaaaaggcttcttataaactcgcgcaagatgaaatcagcgctcttttagaaaaagccattgatttgcattttgaaaaagaggcgtttttatttgatcaaaacattaaagcgttaagtctgttttttatccccaaaattgaggattttaggcaaattgataacaaaggcacgccctttattaaaaccgaatttgaaaggctttacaaactcaaacgcgcttcaattctagcaagggaaaatttatcgccaagctataaagaatatttgaaaagagattttgatgagagcggtaatttacgcgtccatcaaggctattttagcggcgatagcgtagcgctcaataaaggcaaaaaagaaagcaaaaaagaagacattgaagccaacgacattaaaatgattttaagcgaaaaagaaaaactgctttcatttcaaacgcctttgcgttttatttttagcgtgtgggctttgcaagagggctgggataatccaaacatttttacccttattaaactggcaaattctaccagcgaaaccagccgccatcagcaagtggggcgcgggttaagaattgcgattaatcaagagggcaagcgcgttacgcatggatttttaaaaggcaatgacaacgctttttataaaataaactaccttgatatgttagtgagtggcgaagaagtgggctttatagagggtttgcaaaaagagattgaagcgagcagctttattggtggtggcaacgcgctagacagagaggatttagccaagttagggcttaatgaaagagagataaataaacttttcgttgaattagaaaattcaaacgccctagaatttgacgaaaccaacaacgcttacaaaatcattgcccctatttgtgagacgatgcaaaacaatgaagaaaggataaaagactttttaagcgatgaagaataccacgccgttttaagcgcctttaaaatggctgaaaatccaaccaacaagcgcgatcaaattataaacgctaaccaacctcaagaaaaagttaaaatccgccaaaatttagctaaggaatttaaagagttgtggcaaaccatcaacgcgcaaagccaattaagctatcaaaatatccaaaaaaccaagctgatagaatctatcgccaaagcgtttaatgagagccatgtgagtgctgaggtaatcaaatttgaaagcaaaaggtatgacccacaaaccaacaggatcatcacagagcaatcaagcaccttaaaaatcagagactacgctaacgctttacaaaaagaaatcaacgcgcttttgcttgactttgccaaagatgagcgcttacccttaaaattcacgcttgaactctacaacgctttaaacaaagagcatttcacaaactcacccaaaaaagcctttaaattgcttaaaggcatcattaaagataagttgcatgaaaacttgctttcttgcgtgagttatggattttgccaaaacgccttttctaacacggcttttgataaaaccgatccgctttattgtgaagatggctcgcccaaaaatgagattgaaaaacacaaaataggcaaatacaaaagtgcgcaaactccaagcccaaactatctttatgagacgatcatttatgattctaaaattgaagaagaagtgagtgaagagggggtgcaaacactggaaggtaaaagcatagaagtttttgccaagctccctaaatttaaaatcccaacgccttataaaaactatgagcctgattttgcttatttgcttaaagatgaaaagggtgcaaaaatcttttttgtttgcgaaaccaaaggttatgaaaaagaaagcgacatcccgccagatgaaaagcgtaaaattgaatacgctaagaaattttttgaaacgctatctcaaaatttaaagaacgcgaaaaaagaaatacgagtcgtttttgccacacgcattaacaaacaagatttattcaacacgcttaaaaacgcattaaaggaaacgccatga

SEQ ID NO: 22563 - DNA, 1980 bp, Helicobacter pylori
atgctaaaaaagattttttatggttttatcgttttatttttgattgtcatggggttattagccattcttatcgctcaagtttgggtaactacggataaggatattgctaaaattaaagattatcgcccaggcgtcgcttcacagattttagaccgaaaagggcgtttgatcgctaatatctatgataaggaatttcgtttttatgcgcgttttgaagaaatccccccacgatttattgaaagccttttagcggtagaagacaccctcttttttgaacatggggggatcaatttagacgctatcatgcgcgctatgattaaaaacgctaaaagcggtcgttacaccgaggggggtagcaccctaacccaacaattcgttaaaaacatggtgctcacacgagaaaaaaccctaaccagaaaactcaaagaagcgatcatttctatacgcattgaaaaagtcttaagcaaagaagaaattttagagcgttatttgaaccaaactttttttgggcatgggtattatggcgtgaaaaccgcaagtttagggtattttaaaaaaccccttgacaaactcacgcttaaagaaatcaccatgctagtcgccttgcctagggctccgagtttttatgatcctaccaaaaatttagaattttcactctctagggctaatgatattttaaggcggttgtattctttaggctggatttcttctaacgagctcaaaggcgctctcaatgaagtgccaattgtttataaccaaacctccacgcaaaacatcgccccctatgtcgtagatgaagtgttgaagcaattggatcaattagacgggttaaaaactcaaggctataccataaagctcacgatagatttggattaccaacgcttagcgttagagtccttgcgttttgggcatcaaaaaatcttagaaaaaatcgctaaagaaaagccaaaaactaacgcgtctaatgaagatgaagacaacttaaacgctagcatgatcgttacagacacgagcaccggtaagattttagctttagtgggggggattgattataaaaaaagcgctttcaatcgcgccacgcaagccaaacggcagtttgggagcgcgataaagccttttgtgtatcagatcgcttttgataatggctattccacgacttctaaaatccctgataccgcgcgaaactttgaaaatggcaattatagtaaaaacagtgaacaaaaccacgcatggcaccccagcaattattctcgcaagtttttagggcttgtaaccttgcaagaagccttgagccattcgttaaatctagccacgatcaatttaagcgatcagcttggctttgaaaaaatttatcaatctttaagcgatatggggtttaaaaacctccctaaggacttgtctattgtgttagggagctttgctatctcacccattgatgcagctgaaaagtattctttattttctaattacggcaccatgctcaaacccatgctcattgaaagcatcactaaccaacaaaacgatgtcaaaactttcacgcctatggaaaccaaaaagatcacctccaaagaacaggcttttttaaccctttcagtgctgatggatgcggtagaaaatggcacagggagtttggctcgcattaaaggtttagaaatcgccggtaaaaccgggacttctaacaacaatattgacgcttggttcattggctttacccccaccttgcaaagcgtgatctggtttgggagggacgataacacgcctattagcaaaggagcgacagggggtgttgtgagtgcgcctgtgtattcgtatttcatgcgtaacattttagcgattgaaccttctttaaaaagaaagtttgatgtccccaaaggcttgcgtaaagaaatcgtggataaaatcccctactattcaacccccaattccatcacccccacccccaaaagaacagacgatagcgaggaacgcttgttgttctaa

SEQ ID NO: 22564 - DNA, 3087 bp, Helicobacter pylori
atgtataaaacagcgattaatcgtcctattacgaccttaatgtttgctttggcgattgtcttttttgggactatggggtttaaaaaattgagcgtggcgcttttccctaaaattgatttgcctacggtggtggttactacgacttatcctggggctagcgctgaaatcatagagagtaaggtaaccgataagattgaagaagcggtgatggggattgatgggatcaaaaaggttacttccacgagttctaaaaatgtgagtatcgtcgtcattgaatttgagttagaaaaacctaatgaagaagccttaaacgatgtggtgaataaaatttcttcggtgcgttttgatgactctaacattaaaaaaccctctatcaataaatttgataccgacagccaagccattatttcattgtttgtgagcagttcaagcgtgccggctacaacccttaatgactacgctaaaaacaccatcaaacccatgctccaaaaaatcaatggggtagggggcgtgcagctcaacggctttagggagcgccagattaggatttatgcaaatcccactttgatgaataaatacaacctgacttatgcggatcttttcagcacgcttaaagcggagaatgtggaaattgatggggggcgcattgtcaatagccaaagggaattttctattttaatcaatgcgaatagttatagcgttgcggatgtggaaaagattcaagtgggtaatcatgtgcgtcttggcgatattgcaaaaattgaaatcggtttggaagaagacaacacttttgcgagctttaaagacaaacccggtgtgattttagaaatccaaaagattgccggagcgaatgaaattgaaatcgtagatagggtgtatgaagctttaaagcgcattcaagccattagccctaactatgaaatcagaccctttttagacaccacgggctatatccgcacctctattgaagacgtgaaatttgatctagttttaggggcgattttagcggttttagtggtgtttgcgttcttgcgtaacggcacgatcaccctcgtttcagcgatctctatccctatttctatcatggggacttttgcgctcatccaatggatgggcttttcattaaacatgctcaccatggtggctttaacgttggcgatagggattatcattgatgatgcgatcgtggtgattgaaaacatccataaaaagctagaaatgggcatgagtaaacgaaaagcgagctatgagggggtgagagaaattggctttgctctagtggcgatttcagcgatgctgctctctgtttttgtgcctatagggaacatgaaaggcattattgggcgtttttttcaaagttttgggatcacggtggctttagcgatcgctctatcgtatgtggtggtcgttacgattatccccatggtaagctcagtcgtggtcaatcccaggcattctcgtttttatgtgtggagtgagcctttttttaaggctttagagtctcgttataccaagttgctccaatgggtattaaaccacaagatcattatctctatagcggtggttttggtgtttgtgggatcgctttttgtggcttctaagattggtatggagttcatgctgaaagaagatagggggaggtttttggtgtggcttaaggctaaaccgggcgtgagcatagattacatgacacaaaagagtaagatctttcaaaaagcgattgaaaaacatgctgaagtggaattcaccaccttgcaagtgggttatggcaccacacaaaacccttttaaggctaagatttttgtgcaactcaagcctttaaaagagcgtaaaaaagagcatcaattggggcaatttgagttgatgagcgttttaaggaaagagttgagaagcttgcctgaagctaaaggtttagatactattaatctttctgaagttactcttatagggggcggtggggatagttcgcccttccaaacctttgtgttttcccattctcaagaagcggtggataaaagcgtggagaatttgaaaaaattcttattagaaagccctgaattaaaaggcaaggttgaaagctatcatacaagcacgagcgaatcgcaaccgcaattgcaactcaaaatcttaagacaaaacgctaacaaatacggcgtgagcgctcaaaccattggatcagtggtgagctctgctttttctgggacttctcaagcgagcgtgttcaaagaagatggcaaagaatacgacatgatcattagagtgcctgatgacaagcgcgtttctgtagaagacatcaaacgcttgcaagtgcgtaacaaatacgataaattgatgtttttagacgctttagtggaaatcacagaaactaaaagcccgtccagtatttctcgctataaccgccaacgcagcgttacggtgcttgctgagcctaataggaatgcgggcgtttctttaggcgagattttaacgcaagtgagcaaaaacactaaagaatggttggttgaaggggcgaattacagatttaccggagaagcggataacgccaaagagagcaacggggagtttttagtcgctttagcgacagcgtttgtgctgatttatatgattttagcggcgttgtatgagtccattttagagccttttatcatcatggttaccatgcctttaagtttttcaggggcgttttttgctctaggtttagtccatcagcctttgagcatgttctctatgataggcttgattttgctcattggtatggtgggtaaaaacgccacgcttttaattgatgtggcgaatgaagagcgtaaaaaaggtttgaatatccaagaggccattttatttgccggcaaaacccgtctaagaccgattttaatgacgaccattgcgatggtttgcgggatgctgcctttagcgttggcgagtggggatggagcggcgatgaaatcccctatagggattgcgatgagtgggggcttgatgatttctatggtgttaagcttactcattgtgccggtgttttatcgtttgctcgctcccatagacgacaaaatcaagcggttttatcaaaaccaaaaaactttagaatga

SEQ ID NO: 22565 - DNA, 3717 bp, Helicobacter pylori
atgacttatagaagtagcaaaacagatttaaagaatgaacgctttagtaaaaaccgctcttttaagggcattaaaaagaaaatcgctaaaaaatatacaatcaaaaactcgcctttgacaatctattccttaaaaacgcattcaaatccttctctatccattaataaaaaaatcttcttagggcttgggtttgtttcggctttgagcgctgaagattataatagttcagtgtattggctcaatagcgtgaatgaaaataataacaacaaatcctactatatcagccccttacgcacttgggctggggggaataggaatttcacgcaaaattataacaatagtcagttatacatagggacaaaaaacgcttcttcaacgcccaatcattcttctgtatggtttggggaaaagggctatgtaggttttattacaggggtttttaaggcaaaagacatttttatcacaggggctgttggatcgggcaatgagtggaaaaccggtgggggggcgatactggtttttgaaagctcaaacgaattaagcgctaatggggcttattttcaaaataacagagccgggacgcaaacttcttggatcaatttgatttccaataacagcgtgaatttgacaaacacagattttggcaaccaaacccctaatgggggctttaatgctatggggcgaaagatcacctataatggcgggattgtcaatggcgggaattttggctttgataacgtggatagcaatggcgcaaccaccattagcggagtaactttcaacaataacggcgcgctcacttataagggtgggaatggtattggggggagcatcactttcactaactctaatatcaatcattacaaactcaatcttaacgctaatagcgttacctttaataacagtgctttagggagtatgcctaatggcaacgctaatactataggaaacgcctatattcttaatgcaagcaatattacttttaataatttgacctttaatgggggatggtttgtttttaatatacctgatgctcatgttaattttcaaggcacaaccacgatcaacaaccccacttcgccttttgtcaatatgaccggtaaagttactattaatcctaatgcgatttttaacattcaaaattacacgcctagtatagggagcgcttacacgctctttagcatgaaaaatggctctatcacctataatgatgtcaataacttatggaatatcatcaggcttaaaaacacgcaagccacaaaagacgctgataaaaatcatacaagttcaaataacaacacccacacttactatgtaacctacaatttaggcggcacgctttataatttcagacaaatttttagccctgattctattgttttgcaatctgtctattatggcgcgaacaatctttactacaccaatagcgtgaatatccatgataatgtttttaatttaaaaaatattaatgatgataaagctgacacgattttctacctcaatggcttaaacacttggaattacactaatgcgagattcactcaaacctatggcgggaaaaacagcgctttagtctttaacgctacgaccccttgggctaatggcagcatccctaaatctaacagcacggtgcgttttggggggtatgagggagtcaattgggggaaaacgggctatattactggcactttcacagccgatagggtttatatcaccggtaacatgatgactggtaacggcgctcaaaccggtgggggggcgactttgaattttgtgggcgcgactgaaattaatatcgctggagccacttttaaaaacctaaaaaccacttcacaaaactcttacatgacttttatggcattaggggatagctctgggagcgctaagatcaatgtttctcaatctgatttttacgattggacgggtggggggtatgattttaccggtaatggcgtttttgatagcgtgaatttcaacaaggcttattacaaatttcaaggcactgaaaattcttacaattttaaaaacacgaactttttagcagggaattttaagtttcagggcaagaccaccattgaaaaatccgttttaagcgacgcttcttacacttttgatggcacgaataacacctttactgaagacaagtttaataatggctcgtttaattttagtcatgcagagcagacagacgcttttaataacaactcgtttaatggcggttcgtttagttttaacgccaagcaagtaaattttagtgggaactcgttcaatgggggcgtgtttaatttcaataatacccctaaagtcagtttcactgatgacacttttaatgtgaataaccaattcaaaataaatggtactcaaacaactttcactttcaataagggcgttgttttcaacatgcaagggcttttgagcagtttaagcgtaggcacgacttatcaattgcttaacgctaaaagcgtggattataaggataataacgctttgtatcaaatgctgcgttggattagtggggaaaaccctagcggcacgctagtaaataaggatcagtccgcgccaaacagcgctaaaatttataatgtccatttcaccgataacggcttgacttactacatcaaagaaaattttaataatgggatcacgctcactcgtttatgcactctaggctatacgcattgcgtgaatattgataacgatgcgtttaatcttaaaaatgtcaataacaacgccagtaacaccgtgttctatctcaatggcatgacgacttggaagatcgctggcacaggcgttttcacgcaagattacagcggcgctaacagcgttttagtgttcaaccaaaccaccccttttcttgctggggcgaatcccacttctaatagcgtggtgagttttgggaaaacttcaggggctgaatgggggttagtgggctatattcaaggcgtttttaaagccaatcaaattgacattaccggcacgattcgctctggtaatggggccaaaaccggtgggggcgcgactttagtgtttaacgctcaaaagcgtttgaatatcgctaacgctcatttgaataacgataaagccggtttgcaaaattcatggatgaatttcattgtcaataatggtaatttgaatgtaacaaacgcaaaatttagcaaccaaaccccacatggaggctttaaccttaaggccaataacattacttgggataaaggctctgtgaatggaggggggaattttggcgtggataacgccgatagcaatggcgcaaccaccattagcggagtaactttcaataataacggcactttgatttataaagggggtgaaaatagcgccggaaattctttaaccctagaaaacaacactttcaattcctacaatatcaacgcaaaagcgcaaaacctaatttttaacaacaactcgtttaatggcggtagctattcgtttaatgacactaaaaacaccacctttaaaggcacaaacacgctcattaacagcgatccttttagccgccttaaaggatcagtttctattgaaaataatagtgtttttaatattgaaagggatttgaccgataaaaccacttacacgcttttaagcggaaatagtatcaaatacaataaccaagctttagcgggacaatgctttttcaaaaaatttatggaatttaatccattatggtggcgaacaagggactctattaagagcggataa

SEQ ID NO: 22566 - DNA, 5832 bp, Helicobacter pylori
gtgcaattcacccaaagcaacggccaaaaatttgtttttgaagaaacttttaatccgggctctatcacctataaatatttcactatccattcttcgcttttccacacagacgctgattctaaggatatttggagtcaagtgaggaagcaatttgatttcattccaggaaaaacccctgtgtgtgttggcgtgtgctatatcgcgccttataaaaatcaagaccttattggctctagcgcttttgcgtggtcgctgaactttggggccacggtggtagggactttgcttttagggagcgctcaagaaaaagccaataataatggcggatcgatctggtttggtaagaataatttgctgtatttgcatggcaatttcaacgcgactaatatctttttaacgaataattttaatgtcggcaaccctaacgctggcggtggggcgacgattaattttaacgctgatgaaaccttgaacgctgacgggttaaattacacgaatttccaaaccgtggctttgggcttacaaaccagtgcgagccagcattcatgggcgaattttaattccaagctttctatggagattaaaaattctaactttagggatttcacatggggaggctttaattttaattcagggcgtatcacttttgaaaacaccacttttagcggctggaccaatattaacggagcgactgagagcggctcatcgtatgtgaatatggttgcgaatacggatttgatattttctaattccattttaggagggggcattcgctatgatttgaaagctaataacattattttcaataactctcaaatggttattgatgtgtctaagaatgtgaatcagtcatcattgaatgggaatgttactttcaataattccaggctttcagtcaagcccaatgcggctattaatattggggatagccaaacccaaacggctttagaaaacgcttcaagcctttctttttacaacaacagcgtggcgaattttaacggcacaaccgcttttaacggggtgtcttatttgaatttgaaccctaacgctcaagtaagcttcaatcaagtaaatttcaataacgctaatgtaactttttatggcattcctttatttggtaaaacgcctgattttggcaactctgcacgccttatcaatttcaaagggaatacgaattttaatcaagccacgctcaatttaagggctaaaaatatccatatcaatttccaaggcgtttctacttttaaacaaaactctacgatgaatttagctgaaagttcccaagcgagctttaacgctcttaaagtggaaggggaaacgaatttcaatctcaataactcaagcttgttgaatttcaatggcaatagcgttttcaacgctcctgtgagtttttatgctaatcattctcaaatttctttcactaaattagcgacttttaattctgacgcttcttttgatttaagcaacaacagcaccctgaattttcaaagcgttcttttaaatggtgctctaaaccttttaggcaatggcagtaacaatctagcgatcaacgctaaagggaattttagttttgggtctaaagggattttgaatctgtcttatatgaatctatttgggggggataaaaaaacttccgtttatgatgtgttgcaagcccaaaatattgatggcttaatggggaataacggctatgagaagatccgtttttatggcatacagattgacaaggctgattactcgtttgataacggcgttcattcttggagattcactaacccgctcaatacgactgaaacgattacagaaaccttgcataacaaccgcttgaaagtgcagatctctcaaaacggcgtttctaataataagatgttcaatctcgctcctagcttgtatgattaccaaaaaaacccttataatgaaaccgagaattcctataattacacaagcgataaggttggcacttattatttaacgagcaatatcaaaggctttaatcaaaacaataaaacacccgggacttataacgcgcaaaaccaacccttacaagccttacacatttacaatcaggctatcactaagcaagatttgaacatgatcgccagtttgggtaaggagtttttgcctaaaatagccaatcttttatcttcaggggctttggataatctcaatagcccgaatagttttgaaactctttttggtatctttgaaaagtatggtatcactttaaaccaagaaaattggaagagcttattaaagattatcaataatttttccaacacaactaattatgatttctctcaaggcaatctcgttgtaggagcgatcaaagaggggcaaacgaacactaaaagcgtggtgtggtttggaggcgaaggctataaagagccatgtgcggttggggataacacttgccagatgttcagacagactaatttagggcaattgctccattctagtacgccttatttaggctacattaacgctaattttagggctaaaaacatttacattaccggaaccatcggcagcgggaacgcttgggggagtggagggagtgcgaatgtgtcttttgaaagcggcactaatttagtgcttaatcaagctaagattgacgctcaagggaccgataaaatcttttcttacttggggcaagggggtattgaaaagctttttggagaaaaaggtttagggaatgcgctttctaatatcatttatgaagagagcttgaatgataacgctatccctaaagatttagccaacatgatccctaaagattttggatctaagactttaagctcattgcttagccctactgaagtgaataacctcttaggcgtgagcgcattcaaaaacgcgatcatggaaattttaaattctaaaacggtgggcgatgtttttggtgaaaacgggcttttaaacgcgctagatcctacggaaagaaaaaaaattgatcaaatgcttttagagcaaatccaagcccattcttcagggtttgaaaaattcatcgtgaaaactttagggattgaaaatgtagagaatttcatcaataactggtatggcaagcaaagcttgagttcttttgccaataattttgtgcctggaggcttgaatcaagcccttgataaaataggctctagctctgatgccaaagacttacagaacttcttggataaaacgacttttggggatattttaaatcaaatgattgaacaagcccccttaatcaataaactcatttcttggctgggtccgcaggatttgagcgttttagtgaatatcgctttaaatagcatcactaaccctagtaaagagctgactagcaccatttctagcataggtgaaaaagcgttaaatgacttattaggcgatggcgtagtgaataaaatcatgagcaatcaagtcttagggcaaatgatcaataaaatcattgctgataagggctttggaggcgtttatcagcaaggtttaggctccatactgcctcaatctttacaagatgaattgaagaaattgggcatgggctctttactaggatctagggggttgcacaatctttggcaaagagggaatttcaattttgtggctaaagattatttattcactaataacagctcgtttagtaacgccacagggggggaattgaattttgtggcgggcaagtctattatttttaacgggaaaaatacgatcaatttcacgcagtatcagggtaagctttcgtttatttctaaagatttttctaacatttcattagataccttaaacgctactaacggattaacgcttaatgctcctaaaaatgacattagcgttcaaaaaggtcagatttgcgtgaatgttttaaattgcatgggcgagaaaaaagctcattcttcaagcgcgacagccccaaccaatgaaacactagaagcgaatgcgaataatttcgcttttttaggtgcaattaaggctaatggattagtggatttttcaaaagttttacaaaatactacgatcgggactttagatttagggccaaacgctacttttaaagcgaatcatttgatcgtgaataacgcttttaacaataactctaattacagggctgatattagcggtaatctcaatgtggttaaaggagcggctctcagcacgaatgaaaatggtttgaatgtggggggcgatttcaagagcgaagggtcattaatctttaatcttaacaataaaaccaatcaaacgattattaatgtggctggcaattctacgatcatgtcttataacaatcaagctttaatccattttaatacccaactcaagcaaggcgcttacacgcttattaatgcgaaacgcatgctttatggttatgacaatcaaatcattcgtggagggagcttgagcgattacctcaagctttacaccctcattgattttaacggcaaacgcatgcaattaaacggcgattcactaagctatgacaaccaaccggtcaatattaaagatgggggtcttgtggtaagctttaaagacaatcaggggcaaatggtgtattcatctatcctttatgataaagttcaagttagcgtctctgataagcccatggatattcatgcccctagtttggagtattacattaaatacattcaaggcagtgctggtttggatgcgatcaaatctgcaggcaataattccattctgtggttgaatgagctttttgtggctaaagggggtaatcccttgttcgctccttattatttgcaagacaatcccactgaacacattgttactttaatgaaagatattactagcgctttaggcatgctttctaaacccaatcttaaaaacaattccaccgatgctttacagctcaacacttacacgcaacaaatgagccgtttagccaagctttctaatttcgcttcctttgattcaacggattttagcgaacgcttgagcagtcttaaaaaccaaagatttgctgatgcaatccctaatgcgatggatgtgattttaaaatactctcaaagggataaactaaaaaacaacctttgggcgaccggcgttgggggcgtgagctttgtggaaaatggcacaggaacgctctatggtgtcaatgtgggctatgacagattcattaagggtgtgattgttggagggtatgcggcttatgggtatagcggtttttatgaacgcatcactaattctaaatccgataatgtggatgtgggcttgtatgcgagggctttcattaaaaagagcgagctaacctttagcgtcaatgaaacttggggggctaataaaaaccaaatcagctccaacgacactctgctttctatgatcaatcagtcctataaatacagcacatggacgacgaacgcaaaagttaattacgggtatgatttcatgtttaaaaacaaaagcatcattttaaaacctcaaattggtttaaggtattactatatcggcatgaccggtttagaaggggtgatgcataatgcgctctataaccagtttaaagcgaacgccgatccgtctaaaaaatccgttttaacgattgaacttgctttggagaaccgccattatttcaacacaaactcttatttttatgcgattggcggctttggtagagacttattagttaattctatgggggataaattggtgcgttttattggtaacaacactttgagctacaggaaaggcgagctttataacacttttgcgagcatcactacaggcggggaagtgaggttgtttaaaagcttttatgcgaatgctggggtgggggctaggtttggattggactataaaatgatcaacattaccggaaatattggaatgcgtttagcgttttaa

SEQ ID NO: 22567 - DNA, 1971 bp, Helicobacter pylori
atgataaaaagccaaaaagaatatttagaaagaattgcatatttaaacaccctatcgcaccattattacaaccttgatgaacccatcgtaagcgatgcgatctatgatgaactttaccaagaattgaaagcttatgaagaaaaaaaccctaatggcattcaagctaattcccctacccaaaaagtgggggctactaccaccaattcgttcaataaaaacccccatttaatgcggatgtggagcttagatgatgtgttcaatcaaagcgaattgcaagcgtggttgcaacgcattttaaaagcctatcctagtgcttcgttcgtgtgttcgcccaaacttgatggggtttcgctcaatcttttgtatcaacatggcaagctagtgaaggcgaccactaggggcaacggcttagaaggagaattagttagcgcaaacgctaaacacatcgctaatatcccccacgctatcgcttataatggagaaatagaaatcaggggcgaagtgatcatttctaaaaaggattttgacgctttgaatcaagagcgcttaaacgctaatgaacccctattcgctaaccccagaaacgccgcatcagggagtttgaggcaacttgatagcgaaatcactaaaaagcgtaaattgcaattcattccttggggcgtgggcaagcattctttaaattttttaagctttaaggagtgtttggattttatcgtctcgttaggttttagcgccattcaatacttaagcctaaacaaaaaccaccaagaaatagaagacaattaccacaccctaattagagaaagggagggcttttttgcccttttagacggcatggtgatcgttgtgaatgaattaaatattcaaaaggagctaggctacacgcaaaaatcccctaaattcgcttgcgcttataaattcccggctttagaaaaacacaccaaaattgtaggagtcattaaccaagtggggcgcagcggggcgatcacaccggtcgctcttttagagcctgtggaaattgctggagctatgattaatagagcgaccttacacaattattctgaaattgaaaaaaagaatatcatgctcagtgatagggtcgttgtcattagaagcggcgatgtgatccctaaaatcatcaagcctttagaatcttatagagacggctcgcaacataaaattgaacgccccaaggtttgccctatatgttcgcatgagcttttgtgcgaagagatttttacttattgtcaaaaccttaattgcccggcaaggttgaaagaaagcttgattcatttcgcttctaaagacgctttaaacattcaaggcttgggcgataaagtcatagagcaactttttgaagaaaagctcatttttaacgctctggatttgtatgctttaaaattagaagatttaatgcggctagacaaatttaaaattaaaaaagctcaaaatctattagacgctattttaaaaagcaaaaaccctcccttatggcgtttgattaacgctttagggattgagcatattggtaagggagcgagtaaaacgctggccaaatacggcttaaatgtgttagaaaaaagcgaagccgagtttttagaaatggaaggctttggggtggaaatggcgcgctctttagtcaatttttatgcgagcaatcaagaatttatccgatcgttatttgagttattaaaccctaaaaatagcgatatggctgaagaaaagcaaaaaagctcttctgttttcaataataaaacgattgttttaaccggcacgctttctaaaccacggcaagaatacgctcaaatgttagaaaatttaggggcaaaaatttcttcaagcgtgagcgctaaaaccgattttttaatcgctggagaaaaccccggctcaaaactcgctctggcacaaaaacatggcgtgagcgttttgaatgaagaagaattattaaagcgccttaaagaattggattaa

SEQ ID NO: 22568 - DNA, 1734 bp, Helicobacter pylori
atgcgaagtcatttttgcacagaaattagtgaaaaagatgtgggtaaaatagtcaaagtggccgggtggtgtaacacttatagagaccatggaggcgtggtttttattgatttaagggataaaagcggtttagtgcaattagtctgtgatcctagctctaaggcttatgaaaaggctttagaagtcaggagtgaatttgtgctagtggctaaaggaaaagtgcgtttgagaggcgctgggttagaaaaccctaaactaaaaacgggtaaaattgaaatcgttttagaagagttaattattgaaaataaaagcgctaccccaccgattgaaattggcaacaaacatgtgaatgaggatttgcgcttgaaataccgctatttggatttgcgctctcctaattcttatgaaatttttaaattgcgcagcgaagtggctttaatcactcgtaacactctagcccaaaagggctttttagagattgaaacccccattttgtctaaaactacgcctgagggggctagggattatttagtgccaagcagggtgcatgagggcgaatttttcgcgcttccccaaagtccgcaattgttcaaacagcttttaatggtggggggaatggataggtattttcaaatcgctcgttgctttagagatgaagatttaagagcggacaggcagccagaattcacgcagattgatgcagaaatgagtttttgtgatgaaaacgatgtgatgggcgtggtggaagatttgttgcaagagatttttaaagcggttgggcatactatttctaaaccttttaaacgcatgccttataaggaagcgatggaaaattacgggagcgacaagccggatttacgctttgaattgcctttaatagaagtgggggattgttttagggacagctcaaacgctattttttctaataccgcaaaagatcctaaaaacaaacgcatcaaagctttaaacgttaagggggctgatgcgctttttagccgcagcgttttaaaagaattagaagaatttgtgcgccaatttggggctaaaggcttagcgtatttgcaaattaaagaagatgaaattaaaggacctttagttaaatttttaagcgaaaaggggcttaagaatattttagaaaggactgatgcgcaagttggggatattgtcttttttggagccggggataaaaaaatcgtgttagattacatggggcgtttgcgcttgaaggtggctgaaacgcttgatctgattgataaagacgctttgaatttcttatgggtagtcaatttccccatgtttgaaaaaaccgaaaacggctatcatgccgcgcaccacccttttacgatgcctaaaaatatagaatgcgaagatatagaagaggttgaagcgcatgcgtatgatgtggtgcttaatggcgtggagcttggtggggggagcataaggattcataaagaagaaatgcaaaaaaaagtctttgaaaaaatcaatatccatgaagaagaagcgcaaaaaaaatttggctttttattagaagcgctaaaatttggcgctcctcctcatggaggctttgcgataggatttgatcgcttgatcatgttaatgactaaatctcatagcattagagacgtgatcgctttccctaaaacgcaaaaagcttcatgcttattgacgaacgcgcctagccccattaatgaagagcaactaagagaattacacattcgcttgagaaaataa

SEQ ID NO: 22569 - DNA, 576 bp, Helicobacter pylori
atgaaacaactatttttgatcattggagccccagggagtggtaaaaccactgatgcagagcttatcgctaaaaataacagcgaaacaatcgctcatttttctaccggggatttactcagggctgagagcgctaaaaagaccgagcgaggcttattgattgaaaaattcacttctcaaggcgaattagtgcctttagaaattgtggtagaaacgatcctttcagcgattaaaagctctggtaaagggatcattttaattgatggttatcctaggagcgtggaacaaatgcaggctttggataaggaattgaacgctcaaaacgaagtgatcttaaaaagcgtgattgaagtagaagtgagtgaaaacactgctaaagaaagggttttagggcgctctaggggggctgatgataatgaaaaggtgtttcataaccgcatgcgggtgtttttggatccgttgggcgagatccaaaatttttacaagaataagaaggtgtataaagcgatcgatggggagaggagcattgaagagattgtgggcgaaatgcaagagtatatcttgtctttcggtaattaa

SEQ ID NO: 22570 - DNA, 2289 bp, Helicobacter pylori
ttgtcagacgctccaaaaagatcccttaatccaaccctaatgatgaataataataataccccacccaaacccctagaagaaagcctggatttaaaagagtttatcgctctttttaaaaccttttttgccaaagaaagagatactattgctttagaaaacgatctcaagcaaactttcacttatttaaacgaagtggatgcgatcggtttgcccacccctaaaagcgtgaaagaaagcgatcttattatcatcaaactcaccaaattagggacgctccatttagatgaaatttttgagattgtcaaacgattgcactacattgtcgttttacaaaacgcttttaaaactttcacgcatttaaaatttcatgaacgccttaacgctattgtcctgccccctttttttaacgatctgatcgctttatttgatgatgaagggaaaatcaaacaaggggctaacgctaccctagacgctttgaatgaaagtttgaaccgccttaaaaaagagagcgtaaaaatcattcaccattacgcccgctctaaagagcttgccccttatttagtggatacgcaaagccatcttaagcatggttatgaatgccttttattgaaaagcgggttttctggcgcgattaaaggcgttgtgctagaaaggagcgctaatggctatttctatcttttgcctgaaagcgcccaaaaaatcgcccaaaaaatcgcccaaattggtaatgaaatagattgttgcattgttgaaatgtgccaaactctaagccatagcttgcaaaaacaccttttatttttaaaattcctttttaaagaatttgattttttagacagcttgcaagcccggcttaatttcgctaaagcctacaatttagaatttgtcatgccaagctttacacaaaaaaaaatgattttagaaaacttttcacaccccattttaaaagagccaaagcccttaaatttgaagtttgaaaaatccatgcttgctgttaccggcgtgaatgcgggcgggaaaaccatgctcttaaaatcgcttttaagcgcggcttttttaagcaagcatctcattcctatgaaaatcaacgcccatcattccattatcccctattttaaagaaatccacgccattattaatgacccccaaaacagcgcgaacaatatctctacttttgccggcagaatgaagcaatttagcgctcttttatccaaagaaaacatgcttttaggcgttgatgaaatagagctagggactgacgctgatgaagcgagcagtttgtataaaaccctgttagaaaaattgcttaaacaaaacaaccaaatcattatcaccacgcaccacaaacgcttgagcgtgttaatggcagaaaacaaggaagtggaattactagccgctctttatgatgaagaaaaagaacggcccacttacacttttttaaaaggggttattggcaaaagctatgcgtttgaaaccgctttgcgctatggcgtgccgcattttttgattgaaaaagcgaaaaccttctatggcgaagataaggaaaaattgaatgttttgattgaaaattccagcgcgctagaaagggaattgaaacaaaagaatgaacatttagagaacgctttaaaagagcaagaatatttgaaaaacgcatggcttttagaaatggaaaaacaaaaagaaatctttcacaataaaaaattggaattggaaaaatcctaccaacaagccctaaatatcttaaaaagcgaagtcgcttcaaaagatactagctccatgcataaagaaatccataaagcgagcgaaattttaagcaaacacaaaacaaaccaagagatcccacaaatcataacgaactttcaagccaacgaaaaagcgcgctacaagaatgaaagcgtgctgattgtacaaattttagacaagggctattattggatagaaaccgagcttggcatgcgtttaaaagcgcatgggagtttgttgaaaaaaatccaaaaaccccctaaaaacaaattcaaaccccctaaaacaaccattcctaaacctaaagaagcgagcttgcgccttgatttaagggggcaacgcagcgaagaagccctggatttactagacgcttttttaaacgacgcgcttttagggggctttgaagaagtgctgatttgccacggcaaagggagcgggattttagaaaagtttgtgaaagaatttttaaaaaaccaccccaaagtggtgagctttagcgacgctcccattaatttaggcggcagtggggttaaaatcgttaaattgtag

SEQ ID NO: 22571 - DNA, 1350 bp, Helicobacter pylori
atgcttgaaaccccaaaagttttactcaaaaacctgcaagattgcaagatccattttatcggtataggggggattggcatttcaggcttggccaaataccttaaagcgcaaggggctacaatcagcggctctgatattgccataagccctagcgttaagtatttgaaagctttaggcgtagaaattaatatcccgcatgatccaaaagcgatcaacaatcaagatgtcattatccattcagccattattaaagaagacaataaagaaatacaaagggctaaggaattagaaatccctattttgtctcgtaaagacgctttgtattctatccttaaagacaagcgcgtttttagcgtgtgtggggctcatggaaagagcagtatcacggccatgttgagcgcgatttgcccatcgtttggagcgattattggggcgcattctaaagaatttgattccaatgtgcgagagagcgcgaatgatagcttagtttttgaagccgatgagagcgattcgagttttttattttccaacccttatgctgcgattgtgcctaacacagagccagaacatttggagcattatggccacgatttagagcgttttttctttgcttatgagtattttttagaccatgctcaaaaaagagtgatctataaagaagatccttttttaaaaaactattctaaaaacgctattgttttagaaaaaaaagacatttataatatccaatacattttaaaagacggcgagccttacacttcatttgaattgaaagatttgggggcttttttggtgtgggggttaggcgaacataacgctacgaatgcgagtttggcgattttaagcgctttagatgaattgcatttagaagaaattagaaataatttattgaatttcaaaggcattaaaaaacgctttgatattttgcaaaaaaacgcgctcatcctcattgatgattacgcccaccaccccactgaaatcagtgccactttaaaaagcgctaggatttatgctaacttattgaacacgcaagaaaaaattatagtgatctggcaagcgcacaaatattctcgcttaatggataatttagaagagtttaaaaaatgtttttcagagcattgcgacagattgatcattttacccgtttatagcgcgagtgaagtcaaaagagacattgatttgaaagcccattttaaacattataaccccacctttatagacagggtgcgtaaaaagggggattttttagagctcttagtcaatgataatgtggtagaaacgattgaaaaaggctttgtgataggttttggagcgggggatattacctatcaattaagaggcgaaatgtaa

SEQ ID NO: 22572 - DNA, 1080 bp, Helicobacter pylori
atgctagaaaatagagttaagaccaagcaaatttttatcggtggcgtggccatagggggtgatgctcccataagcacgcaaagcatgacctttagcaaaaccgctgatattgaaagcactaaaaatcaaattgacagactcaaactcgccggggccgatttagtgagggtggcggtgagtaatgaaaaggacgctctagccttaaaagaattgaaaaaagtgtcccctttgcctttaatcgctgatattcatttccattataaattcgctctcattgccgctcaaagcgtggatgcgatcaggattaaccccggaaacatcggctctaaagagaagatcaaagcggtggttgatgcttgtaaagaaaaaaacattcctataagaattggcgtgaatgctgggagtttagaaaagcagtttgatcaaaaatacggacccaccccaaaaggcatggtagaaagcgctttgtataacgccaaacttttagaagatttggattttaccaattttaagatttctttaaaagcgagcgatgtgattcgcaccatagaagcttacaggatgcttcgccctcttgtgatctatcctttccatttgggggttacggaggcggggaatctttttagctccagtatcaaatccgctatggctttaggggggcttttaatggagggcattggggatacgatgcgcgtatccatcacaggggaattagaaaatgaaatcaaagtggccagagcaattttacgccatagcgggcggttgaaagaagggattaattggatttcttgccccacttgcgggcgcattgaagccaatttagtggatatggcgatcaaggtagaaaaacgcttaagccacatcaaaacccctttagacattagcgtgatgggttgcgtggtgaatgctttgggtgaagccaagcatgcagacatggcgatcgcttttgggaatcgcagcggtttgatcattaaagagggtaaagtcattcacaaactggctgaaaaggatttatttgaaacttttgtgatagaagtggaaaatttagctaaagaaagagaaaaaagtttaaaggattag

SEQ ID NO: 22573 - DNA, 1209 bp, Helicobacter pylori
gtgtttgagttagaagaaggattaaaagaattgtttgacatttatgaaaaatcctctcatgagctttacttggtaggggggtgcgtgcgcgattatttaatgggcattaccccaaaagattacgatttaacctcaaacgctttagtcaatgaaagcaaagagcttcttttaaagcgccattttagggtgctagaaaccggtatcaaacatggtacgatcacggctcttaaaaaccatcaaagctatgaaatcacaacttttagaattgaaaaggggcatatcaaacaccgaaagcctaaagaattggtttttagcgttcatttaacagacgatttaaagcggcgcgattttagcatgaatgcgatcgcttatagccctacaaaagggctgattgatccttttaaagggcagaatgcgattgaaaatcaaatgattgaatgcgtgggggaagcgcgattaaggttttttgaagacgctttaaggattttaagatcgctgcgattcagtgcaactttaggctttaagatagcgccaaacaccaaagaagcggtttttgcgtgtaaggatttgttaaaacacctttctaaagaacgcttacaaagtgaattgaataagcttcttatggggaaaaacgcctatgaagtggctaaagaatatcaagaaattttagagttggttattcaagaaaaaatagaaaatttagggtttttaaaaaacgcgcctttcaatctggaattaagattgttagggttttttaagcatcaaaaaagtttagaaagtttacgctaccctaaaaaaacgatcgttttattttccaaagctaaagaatgccataaatcttttttaaatattcataacaaaacagagttaaaatttttattgaaaaactacgatttagagccttttaatttggctttagatttttatgcgctcaaaaaccccaaacatgctttaaaaattaaaggcttgttaaaagaaatctttgattctaacgagccttttaaaaaagaacacttggcccttaagggcggtgcgcttcaaagcttgggttaccagcaccaaaaaatcggcgaaattttaaacgcatgcttagatttagtcatcgctaaccctaaaaataacgctttagaatggctgattgaatgggttaagggtcattatttacctaatgatactataaatctttcgccaataggcagaagaaattaa

SEQ ID NO: 22574 - DNA, 822 bp, Helicobacter pylori
atgattaaaaaatgcctttttcctgctgcgggctatggcacgcgctttttgccgatcactaaaaccattcctaaagaaatgctgcccattgtggataaacctttaatccaatacgctgtggaagaagcgatggaagcgggctgtgaagtgatggcgatcgttacaggcagaaacaaacgaagtttagaagattattttgacacgagctatgaaatagagcatcaaatccaaggcactaacaaagaaaacgccctaaaaagcattcgtaacattatagagaaatgctgtttttcctatgtgcgccaaaagcaaatgaaaggcctagggcatgcgattttaaccggagaagccctcataggcaatgagccttttgcggtgattttagccgatgacttgtgtataagccatgatcacccaagcgtgttaaagcaaatgacttcattgtatcaaaaataccaatgctccattgtagccattgaagaagtggcgttagaagaagtttcaaaatacggcgtgattaggggcgaatggttagaagagggggtgtatgagattaaagacatggtagaaaaaccaaatcaagaagacgccccaagcaacctagccgtgatagggcgctacattttgactccggatatttttgaaattttaagcgagacgaaaccgggtaaaaacaatgaaatccaaatcacagacgccttacgcactcaagccaaaagaaagcgcatcatcgcttaccaattcaaaggcaaacgatacgattgcgggagcgtggaaggctatattgaagcgagtaacgcttattataaaaaacgcttataa

SEQ ID NO: 22575 - DNA, 1269 bp, Helicobacter pylori
ttggattttttagagattgtaggacaagtccctttaaaaggagaggtagaaatttcaggggcgaaaaactccgcgctccccattttagccgccacgcttttaagccgccaagaagtcaaaatcaaatccttgccccaagtggtggatataaaggcgatggcgttattgttgcaaaatttaggcgcaagcttagaatggcttaatcctaacacgctccaaattggcgccaaatccttgaaccacaccgaagccacttacgatttggtgcgtaaaatgcgcgcttccattttggtgttaggcccactattagcgcgttttaaagaatgcttggtgagtttgcccggtgggtgcgctataggagcaaggccagtagatttgcacttaaaagcgatgcaacaattaggggctaaaatcactattgagcaaggctatatccatgcgaaagcccctaaaggcttgaaagggaatgatattttatttgataaaatcagcgttacaggcacagaaaacgctctcatggcagccagtcttgccaaagggatcacgcgcatcattaacgctgctaaagagccagaaatcgctcaattgtgcgcgtttttacagagtgggggggtagaaattcatggcattggcagtagcgagttaaagattaggggggttgaaaatgacgctttgaatttaaaagacattcaaatcatacccgataggattgaagcaggcacttatttatgcgtgggggctatcactaatagccagcttaaaatcaatcatatcatccctaaccatcttcaagcgatcaccgataagctcatagaaattggtttttcgctagacattcaagaaaattctatagaaattcatccggctaaaaaacgccaagcctttgaaatcaccacgaaagaatacccaggctttcccacagacatgcaagcgcaattcatggcgttagccacgcagtgtttggggacgagcgtgattgaagagacgctttttgaaaaccgcttcatgcatgcaagcgaattgcaacgcttgggggctaatatcagcctaaaaaccaatgttgctaccattagcggatccacagagcttaccggaagcgatgtgatggcgaccgatttaagggcttcttcggctctcgttttagccgctttagtggctaagggcgtgagtagggtgcataggatttaccacttggataggggttatgagagattagaggataaaatcaacgctttaggggcaaaagttgcgcgcttaaaagaaaaataa

SEQ ID NO: 22576 - DNA, 624 bp, Helicobacter pylori
gtgcaaaaactagccgtttttgattttgactccacgctagtcaatgctgagacgattgagtctttagcgagggcgtggggggtttttgatgaagtgaaaacaatcactttgaaagctatgaatggcgagacagattttcataaaagtcttattttaagggtttccaaactcaaaaacatgcccttaaaactagccaaagaagtttgtgaaagtctgcctttatttgaaggagcgcttgagcttgttagtgccttaaaagagaaaaattacaaggtggtttgcttcagcggaggctttgatctagcgaccaatcattacagggatttattgcatttagatgcggctttcagcaacacgctgatagtggaaaatgacgccttaaacggcttggttacggggcatatgatgttttcacactctaagggcgaaatgctactcgttttacaacgcttgttgaatatcagcaaaacgaacactttagtcgtgggcgatggggcgaatgacttgagcatgttcaagcatgcccacattaaaatcgctttcaacgctaaagaggttttaaaacagcacgctacgcattgcatcaatgagcctgatttagccctaatcaagcctttgatttaa

SEQ ID NO: 22577 - DNA, 1428 bp, Helicobacter pylori
atgatgccatttgaagctgtaatcgggctagaagtccatgtccaactcaacaccaaaaccaaaatcttttgctcttgctctacaagctttggagaatcccctaattctaacacctgccctgtgtgtttgggtttaccgggagctttgccggtattgaataaagaagtggttaaaaaagccatccaattaggcacagccattgaagccaatatcaaccaatattctatttttgcgaggaaaaattatttttaccctgatttgcctaaggcttatcaaatttcgcagtttgaagtccctattgtgagcgatgggaaattagagattgacactaaagagggtgcaaaaatcgtgcgtattgaaagggcccacatggaagaagacgccggtaaaaatatccatgagggcagttattctttagtggatttgaaccgcgcttgcacccctttattagaaattgtcagtaagccggacatgcgaaatagtgaagaagctatagcgtatttgaaaaagctccatgctatcgtgcgttttatagggatttctgatgcgaacatgcaagaggggaatttcaggtgcgatgcgaacgtgtccattagacccaaaggcgatgaaaagctttatacgagagtagagattaaaaatctaaatagctttagattcattgctaaagcgattgaatacgagatagagcgccaaagcgcggcgtgggagaacgggcgctataatgaagaggtggttcaagaaacgcgcctttttgacacccataaagggatcaccctttctatgcgcaataaagaagaatcagcggattaccgctattttaaagatccggatttgtatcctgtttttattgatgaaaaacttttaaaagaagctcaaaagatcaatgaattgcctagcgcgaaaaaaatccgctacatgaaagattttaaccttaaagaagacgatgcgaatttattggtgagcgatcctttattggcgcagtattttgaaagcatgctccatcttggggttaaggctaaaacgagcgtgacatggctttgcgtggaattattagggcgcttgaaagccgaaatcactttagaaaattgcggagttagcactcacatgttaggcgctttagccaaacgcattgatgagggcaagatttcaggtaagagcgctaaagatgtgttagacaagcttttagaagagcaagggggcgatgtggatgcactcattgaacaaatgggcctatctcaagtcaatgacacggaagcgattgttaaagttatagaagaggtgcttaaaaacaacgctgataaggtgcttgaatacaaaagcggtaaggacaagctttttgggttttttgtaggccaagcgatgaaaaatttaaaaggcgctaatcctagcgtggtgaatgctattttgaaagagaaattgggttga

SEQ ID NO: 22578 - DNA, 1098 bp, Helicobacter pylori
atgaacactttggggcgttttttaaggctcacgacttttggggaatcgcatggggatgtgatagggggggtattagacggcatgcctagcgggattaaaatagactatgcgctattagaaaatgaaatgaagcgccgccaaggggggaggaacgttttcattacgccacgaaaagaagacgataaagtggaaataacaagcggggtttttgaagattttagcacagggactcctatagggtttttaatccacaaccaaagggctaggagcaaggattacgataacattaaaaacctttttaggcctagccatgcggatttcacttattttcataaatacggcattagggattttaggggtggggggaggagttcggccagagagagtgctataagagtggctgctggggcgtttgctaaaatgcttttaagagaaatcggtattgtttgtgaaagcgggattatagaaattgggggtattaaagccaaaaattatgattttaatcacgccttaaaaagcgagatttttgccctagatgaagaacaagaagaagcgcaaaaaacagccattcaaaacgctatcaaaaaccacgatagcatagggggtgtggctttgattagagcgaggagcataaaaaccaatcaaaagctccccattggcttaggtcaagggctatacgctaaattagacgctaaaatcgctgaagcgatgatggggcttaatggggtgaaagcggttgaaataggcaagggggtagaaagctctttattaaaaggctcagagtataatgatttaatggatcaaaaggggtttttgagcaatcgtagcggaggggttttagggggcatgagcaatggggaagaaatcattgttagagtgcatttcaaacccacgccaagcattttccaacctcaacgaaccatagacattaatggcaatgagtgcgaatgcttgttaaagggcaggcatgatccttgcattgcgattagagggagcgtggtgtgcgagagtttgttagcgttggtgttggctgatatggtattactcaatttgacttcaaaaatagagtatttaaaaacgatttataatgagaattaa

SEQ ID NO: 22579 - DNA, 1302 bp, Helicobacter pylori
atgaatgaaaatattaatgaaaatatttttgaagaagtaggggacgcttgcgttaaatgcgctaagtgcgtgccaggctgcaccatataccgcattcataaagacgaggcgacttcgcctagaggctttttagatttgatgcgcttaaacgctcaaaacaagctccaattagacacgaatttaaaacaccttttagaaacttgctttttatgcaccgcttgcgtggaaatttgcccttttcatttgcccatagacaccttaatagaaaaagccagagaaaaaatcgctcaaaagcatggcatcgcttggtataaaaaatcctatttttcccttttaaaaaaccgcaaaaaaatggatagggtgttttcaactgcgcattttttagccccttgcgttttcaagcaagtaggggatagtttagagcctagggcggtgtttaaaggtttgttcaaacgctttaaaaaaagcgcgctgcctcctttaaatcaaaaaagttttttacaaaagcatgcagaaatgaagcttttagaaaaccccattcaaaaagtggccatttttatagggtgcttgagcaattaccattaccagcaagtgggggaaagcttgttgtatattttagaaaaactcaacattcaagcgatcatccctaagcaagaatgctgctcagcgcctgcgtattttaccggcgataaagacaccacgctttttttagtgaaaaaaaacatagaatggtttgaaagctatttagataaagtggatgcgatcattgtgcctgaagccacatgcgctagcatgctcatcaacgattattacaaggtgtttttgggcgaaaaagataaggatttgtatgtgaagcgcttggaaaaaatcacgcctaaaatctatctggcgagcgtgtttttagagaaacacacccctttaaaaagtcttttagaaaaaatccctaagggaaaaaaagagactatcacctatcataacccttgtcatgccaaaaaaaccctaaacgctcacaaagaagtgcgcaacttgctcaatttgcattatgaaattaaagaaatgccggacaattgttgcggttttggggggattacgatgcaaacacaaaaggcgggattttctttaaaagtggggcttcttagggctaaagaaatcatagacaccaaagctgcaattttgagcgctgaatgcggggcatgccatatgcaattaaacaacgctttaaagtctttagacgaccctaacactccgccatttttgcaccctttagaactcatcgctaaagccttaaaaagcgctgaataa

SEQ ID NO: 22580 - DNA, 2802 bp, Helicobacter pylori
atgacccaagcctggttgatgaagccacttttaaagaaaaaatcaaaatctttggaagcgatgatggcaaccaatcacaacgatgaaaaaaccctttttgacgctatcttactgcaagatctagcggacgctatgtataatgtcatgcccactaaattaggggacaggaattattgggaaaatttcactaaaaaaacgggcaacatcgcaaggaccttgaacaaccgcctaaaaattatttttgacaaaaaccctgaatttttccacggctttttggattccttaagggaaaatatccatcaaaacattaaagaagatgaagccttagacatgatcacttctcacatcatcactaagcccatttttgatgcactttttggggacaacatcaaaaaccctatcgctaaagccttggataaaatggtagaaaaactctccactttaggattagaaggagaaactaaagatctgaaaaacctctatgaaagcgtgaaaaccgaagccttgcacgccaaaagccaaaaaagccaacaagaactcattaaaaacctctacaacactttctttaaagaagcctttaaaaagcaaagcgaaaaactagggatcgtttatacgcccatagaggtggtggatttcattttaagagccactaacggcattttgaaaaagcatttcaacacggattttaacgatcaaagcatcacgatttttgacccattcaccggcaccgggagttttatcgctcgtttgctttctaaagaaaacgcgctcattagcgatgaagccttaaaagagaagtttcaaaaaaatttgttcgcttttgacatcgtgcttttgtcttattatatcgctttaatcaatatcacccaagccgcgcaaaatagggatggctcgttaaacaatttcaaaaacatcgcgctcacggacagcctggattatttagaagaaaaaaccaataaaggggtgctccctttatatgaggatttgaaagaaaacaaaggcatcaaagacactctagccaaccaaaatattagagtcatcatcggcaacccgccttattcagccggcgcaaagagccaaaacgataacaaccaaaacctctcacacccaaagcttgaaaaattagtttatgaaaaatacggaaaaaattccacatctagaagtgtgggaaaaaccacacgagacacgctcattcaaagcatccgcatggcgagcgatgttgttaaagataggggggtgataggctttgtggtgaacgggggttttattgactctaaaagcgcggatgggttcagaaaatgcgtggccaaagaattttcgcatctttatgtattgaatttgagaggcaatcagcgcacttctggggaagtgtcaaaaaaagagggagggaaaatctttgatagcggatcgagggcgacggtagcgattatcttttttgtgaaagataagagcactcctgataatacgattttttattatgaagtggaagattacttgaaaagagaagccaaactcaactggctcgccaattttgaaaatttggattttgtgccttttgagaaaatcaccccgaatgataaaggcgattggatcaaccaaaggaatgacgcttttgaaaaactcatccctttaaaaagagacaaaacactccaaaacgacagcgtttttgacatcaattctcttggcgtggtgagcggtcgtgatccttgggtgtataacttttctccaaacattttaacccaatcggtgcaaaaatgcattgacacttataacgctgatttgaagcgcttcaatgcgcgttttagggaagctttcaaacaacgcgctcaaagcgtcaaagcaggcgatctttacaaacaacttaatgataaagaaatcaccaccgataaaacgaaaatcgcttggactgatggtttgaaaaacaaactcattaaaaataaatctgcaagagaaagcagtgaggagcgtgtaaggttggccttgtatcgcccttttaacaaacaatggctttattgggataaggattggataaacaggcaaagagaattttcaaaaattttcccggataaagacgctcagaatgtggtgattaataccggtgtgggaaatggtaaagattttagcgctttggtaagcgattttatttctgattatagtttgatctcacccaatcaagcttaccccttgtattattacgatgatttggggaatcgccattacgccatcagcggctattgcttaaacctcttcaggaggcattatggggataatctgatcgctgaagaagagattttttattacatttatgcgattttccaccataaaggctatttagaaaaatacaaaaattccctcgccaaagaagcgccgcgcatcgctttgagcgaagattttaaagaactctctgtgcttggcaaagaattggccgaattgcacctgaactatgagagtggggaaatgcatgataatattaaatacaccacactgatgaacgccgaaatagagggttattatgatgtggataaaatgaccaaaaaaggggattgcatcatctataaccaaaacatcgctatcactaagatccctaaaaaagcctttgactatgtcattaatggcaagagcgcgattgactgggtgatcgaacgctatcaaaaaactatggataaagaaagcctgattgaaaacaacccgaacgattacgccggcggaaaatacgtttttgaactcctttgtagggtcatcacactttcggtaaaaagcgtggatttgatagaaaagatcagcgaaaagaggtttgagtga

SEQ ID NO: 22581 - DNA, 1089 bp, Helicobacter pylori
atgaaacaccccctagaagaattgaaagaccctacagaaaatcttttgctatggattgggcgctttttgcgttacaaatgcacgagcctgtctaattcccaagtgaaagaccaaaataaggtttttgaatgcttgaacgaactaaatcaagcgtgcagctcaagccaattagaaaaagtttgtaaaaaagcgcgtaatgccggattgcttgggatcaacacctacgcattgcccctactcaaatttcatgaatacttcagcaaagctagactaataactgaaaggcttgcttttaattcgctcaaaaacattgatgaagtcatgctagctgaatttttgagcgtttataccgggggtttgagtttagccactaagaaaaattacaggatcgccctactcgggctttttagctatatagacaagcaaaatcaagatgaaaatgaaaaatcttatatttataatatcacgcttaaaaacatcagtggagtcaatcaaagcgcaggcaataagctccctactcatttaaataatgaagaattagaaaaatttttagagagcattgataaaatagaaatgtccgctaaagtgcgtgcacgaaaccgcttgctcattaaaatcatcgtttttacaggcatgcgatctaatgaagccttgcagcttaaaataaaggattttactttagaaaatggctgttatacgattttgattaaaggtaagggcgataaatacagagcggtgatgctcaaagctttccacattgagagccttttgaaagaatggctgatagaaagggaattgtatcctgttaaaaacgatttattgttttgcaaccaaaaaggcagtgctttaacgcaagcttatttgtataagcaagtggagcgcatcatcaattttgcaggactcaggcgagagaaaaatggggcgcacatgttaaggcattcttttgcgaccttgctttatcaaaaacgccatgatttgattttagttcaagaagctctagggcatgcgagcttgaataccagtaggatttacacgcattttgacaagcagcgtttagaagaagcggcgagcatttgggaagaaaattaa

SEQ ID NO: 22582 - DNA, 507 bp, Helicobacter pylori
atggttttataccactactattttaagacccctaagagtttccctttagagtatttgcatttgtgcgctaatgagagccatttattgagattggattttgatgcggccaatttttctcataacacccctatgaataccccattaaaactcagcgttcaagccttggagcgttatttcttaggacaactttttgaatttaatacgcctttggatttgatagggactttttttcaaaaacaagtttggtctgcgttaatgactatcccttatggtaaaacaaaaagttacgatgaaatcgcaaagctcattaataaccctagatcttgcagagctgttggcaacgccaatcgcaataaccctatttctttgatcgtgccttgtcatagagtggtgcgtaaaaatggcactttaggggggtataatgggggcatagaagtcaaaaagtggctgttagaatttgaaagcaaaattttaaaccagcaagctaaaaactctttaatttcttaa

SEQ ID NO: 22583 - DNA, 870 bp, Helicobacter pylori
atgctttttgcgatgattggttcaggggggtttatcgctcccaagcacttgcaagcgattagagatacagggcattttttggattgctcttttgatattcatgatagcgtgggggttttagatgagtatttcgcgcaatcagagttttttacgaatattgaagattttgaaaagcatttagagcaatctaaggatatgggtaaagaaatcaactatttgagtgtttgcacgcctacgcacacgcattttgatcacatccgtttcgggttaagaaacggcatgcatgtgatttgtgaaaaacccttagttttagaccctggcgaaatacaagaattgaaagatttagaggtgaaacaccaaaaaagggtgtttagtcttttacccttgcgcttgcattgcgacacgctggctttgaaagaaaaaattaagagcgaattagacaaaaaccctagcaaggtgtttgacatcacgctcacttatatcagcgttcaagggaaatggtatttttcttcatggcgagcggatgtgaataggagcggagggttagccactcaaatgggggtgaatatttttgacactttaatctatttgtttggaagcgttaaagacaaggttatcaataaagaagagcctgattgcgtaggggggatactctttttagagcatgccaaaataagatggtttttttccatcaatccagaacacatgggagtagccaaagaaaaggtttatcataaaatgatcctagagggcgaagaagtcaatctcacgcagagctttgataacttgtatatagaaagctacaaacagattttagctcaaggggggtttggtttggatgacgctatggcgtctgtcaaattggcttaa

SEQ ID NO: 22584 - DNA, 2367 bp, Helicobacter pylori
ttgattacagtggttaaacgaaacgggcgcattgagcctttggacattaccaaaatccaaaaatacactaaggacgctacggacaatttagagggcgtgagccaaagtgagctggaagtggatgcgaggttgcaattcagggacaagatcactactgaagaaatccaacaaactttgattaaaaccgctgtggataagatagatattgacacgcctaattggagttttgtcgcctcaaggctttttttgtatgatttataccataaagtaagtggttttacagggtataggcatttgaaagagtattttgaaaacgctgaagaaaagggccgcatccttaagggctttaaggaaaaatttgatctagagtttttaaatagccagatcaagcctgaaagggatttccaattcaattatttagggattaaaaccttgtatgatcgctatttgttaaaagacgctaacaacaaccctattgaattgccccaacacatgtttatgagcattgcgatgtttttagcacaaaacgaacaagaacccaataaaatcgccttagaattttatgaagttttgagcaagtttgaagcgatgtgcgcgacccccactctagcgaacgcccgcaccaccaaacaccagctcagctcatgctatattggcagcacgccggataatattgaggggatttttgacagctataaggaaatggcgctgttgtccaaatacggcggagggattggctgggatttttctttggtgcgctctattgggagttatattgatgggcataaaaatgcgagcgctggcacgatcccttttttaaaaatcgctaacgatgtggcgattgcggtggatcaattaggcacacgaaagggcgcgattgcggtgtatttggaaatttggcacattgatgtgatggagttcattgatttaaggaaaaatagcggcgatgaaaggcgaagagcgcatgatttattcccggctctttgggtgtgcgatttgtttttgaaaagggttttagaagatgcgatgtggactttatttgacccttatgagtgtaaggatttgactgagctttatgggcaggattttgaaaaacgctatttagagtatgaaaaagatcccaagatcattaaggaatacattaacgctaaagatttatggaaaaaaatcttaatgaattattttgaagccggtttgcctttcttagcctttaaagataacgccaatcggtgcaacccaaacgctcatgcaggaatcattcgatccagcaatctatgcacggagattttccaaaataccgcgcctaaccactactacatgcaaatagaatacaccgacggcaccatagagttttttgaagaaaaagagttggtaacgacagatagtaatatcactaaatgcgctaacaagctcactagcaccgatattctaaagggcaagccaatctatatcgctactaaagtcgctaaagacgggcaaacggcggtgtgcaatctggcgagcatcaatttaagcaaaatcaacactgaagaagacattaaaagggttgtgccgatcatggtcaggcttttagacaatgtgattgatttgaatttctaccctaaccgcaaagtcaaagccactaatttacaaaatagggccatagggttaggggttatgggtgaagcgcaaatgctcgcagaacaccaaatcgcttgggggtctaaagagcatttagaaaaaattgacgctttaatggagcaaatcagctaccatgcgattgacacgagcgcgaatttagcgaaagaaaaaggggtttataaggattttgaaaattcagaatggagtaaggggattttccccattgataaagccaataatgaagccttaaagctcaccgaaaaagggctttttaatcacgcttgcgattggcaaggtttgagggaaaaagtcaaagccaatggcatgcgtaatggctatttaatggcgatcgctcccacaagctccatttctattttagtaggcacaacccaaacgattgaacccatttataagaaaaaatggtttgaagaaaatttgagcgggcttattcctgttgtggtgcctaatttgaatgtagaaacctggaatttttacacatcagcctatgatattgacgctaaagatttgattaaagcagcggccgtgcgccaaaagtggattgatcaaggccaaagccttaatgtgtttttacgcatagaaaacgccagcggtaaaaccttgcatgacatctacacgctcgcttggaaattaggactcaaatccacttattatttgcgcagcgaaagccctagcatagatgaaaaaagcgtgttggatcgatcggtggagtgttttaattgccaataa

SEQ ID NO: 22585 - DNA, 1302 bp, Helicobacter pylori
atgctttctgtcatcatactggccgctggtaaaggcactcgcatgcgttctagcctgcctaaaactttacacaccatttgtggggagcctatgttgttttacattttagaaacggctttttcaatcagcgatgatgtgcatcttatcttacaccaccaacaagaacgcattaaagaagcggtgttggagcgttttaagggcgtcatttttcacactcaaattgtggaaaaatattcagggacaggtggggctatcatgcaaaaagataaaacgcctatttctacgaaacatgagcgggttttgattttgaatgcggacatgcctttaatcactaaagacgctctcgcccccttattagaaagcaagaataacgctataggcttactccatttagctgaccctaaaggttatgggcgcgttgttttagaaaaccatcaggttaaaaagattgtagaagaaaaggacgctaatgatgaagaaaaagaaattaaaagcgtgaatgctggcgtgtatgggtttgaaagggattttttagaaaaatacttacccaagctccatgaccaaaacgcccaaaaagaatactacctcacggatttaatcgctctagggatcaatgaaaacgaaacaattgacgctattttcttaaaagaagagtgttttttaggggtgaatagccaaacagaaagggcgaaagctgaagaaatcatgctagaaagactgcgcaaaaacgccatggacttgggggtagtgatgcaattgcctaatagcatttatttagaaaaaggcgtgagttttaagggggagtgcgttttagagcaaggggtgcgtttgattgggaattgtttgatagaaaacgcgcatattaaggcttatagcgtgatagaagagagccagattgttaatagcagtgtggggccgtttgcccatgcgcgccctaaaagcgtgatttgtaatagccatgtggggaattttgtagagactaaaaacgctaaacttcaaggcactaaagcagggcatttgagctatttaggggattgtgagatagggaaaaacacaaatgtaggggctggcgtgatcacttgcaattacgatggtaaaaagaaacaccaaacaatcatcggtgaaaatgtctttatagggagcgatagccagctagtcgcccccataaatatcggctctaatgtcttaatcggcagcggcaccactatcactaaagacattcctagcggttcgttgagcctttcacgcgcccctcaaaccaacattgaaaacgggtattttaagttttttaagaaaccttaa

SEQ ID NO: 22586 - DNA, 2304 bp, Helicobacter pylori
atgaaaagaattttagtctctttggctgttttgagtcatagcgcgcatgctgtcaaaactcataatttggaaagggtggaagcttcaggggtggctaacgataaggaagcgcctttaagctggaggagcaaggaagtgagaaactatatgggatctcgcacggtgatttctaacaagcaactcactaaaagcgccaatcagagcattgaagaagctttgcaaaatgtgccaggcgtgcatattagaaacgctacgggtattggagctgtgcctagcttttctgttaggggctttggtgggggaagttcagggcattccaatacggctatggttttagtcaatgggatccctatttatgttgcgccctatgttgatattagcattcctattttccctgtaacctttcaatctgtagatagaatcagcgtaaccaagggtggggagagcgtgcgttatggccctaatgtttttggcggtgtgattaatgtgatcactaagggcattcctaccaagtgggagagtcaggtgagcgagagggccactttttggggcaaatctgaaaatgggggctttttcaatcaaaattctaaaaaccttgacaaaagcttagccaataacatgctttttgacacttacttaagaacagggggcatgatgaataagcattttggaatccaagctcaagccaactggcttaaagggcaagggtttagatacaacagccctacgaacattcaaaactacatgctagattccttgtatcaaattaatgatagtaataagatcactgcttttttccaatactataattattttatggcagaccccggatctttaggcatagaagcgtataatcaaaatcgttttcaaaacaaccgccctaataacaataaaagcgggagagcgaagcgatggggagctgtgtatcaaaacttttttggggatacggacaaaataggtggggatttcacttttagttactatgggcatgacatgtcaagggattttcaatttgattctaattttttgaatgtcaataccaatcctaaattaggccctgtttataccgatcaaaattatccaggattttttatttttgatcatttaaggcgttacataatgaacgcttttgagcctaatttgaacttagttgtcaataccaataaagttaagcaaacttttaatgtgggcatgcgttttatgacaatggatatgtatttcagattggatcaaagcacatgcgaaaaaaccgatatttttaatggggtgtgccgcatgcctccttttgttctttctaaaaaacccagcaacaatcaaaacctgtttaacaactatacagcggtatggttgagcgataaaatagagctttttgattctaaattggtgataactccagggcttagatacacttttttgaactataacaacaaagagccagaaaagcatgatttttctgtgtggaatattacaaaaaagcgtcaaaacgaatggagtcccgcccttaacattggctataaacctatggaaaattggatatggtatgcgaactaccgccgcagttttatccccccacaacatacaatgctaggcattactaggactaattacaaccaaatttttaatgaaattgaagtggggcaacgctatagttataaaaatctattgagctttaacacgaattattttgtgatttttgccaagcgttactatgcgggaggctatagcccacagcctattaacgctaggagtcaaggggtagaattggaattgtattacgcgccgattaggggtttgcaattccatgtggcttacacctatattgatgcacgcatcacttctaacgctgatgatattgcttattattttacaggcattgtcaataaaccctttgacattaaagggaagcgtttgccttatgtgagtcctaaccaattcatatttgacatgatgtatacttacaagcacacgacttttggtattagcagctatttttatagccgtgcttatagttctatgctcaatcaggccaaaagccaaaccgtgtgcctgcccttaaacccagaatacacaggggggctagagtatggttgtaattcagtagggttattgcccttgtattttgtgttgaacgttcaagtaagctcggttttatggcaaagcggtaggcataaaatcacagggagtttgcaaatcaataatctttttaacatgaagtattattttaggggaattggcacaagccctacaggaagagagcccgcaccagggcgatccattacagcgtatttgaattatgagttttaa

SEQ ID NO: 22587 - DNA, 1176 bp, Helicobacter pylori
atgaatgaagtggttgtagtggcggcaaaacgaagcgctgtagggagttttttaggctctctaaagagcgtgggcgctagagaaatgggtgttagcgtgcttaaagacgctttgaatgcgagcggccttaagcctagcgatgtggattctgtcattttaggcaatgttttaggcgctggtttgggtcaaaatatcgccaggcagatccaactagacgccggcatccctaatgacaaaaacgcttttagcgtcaatatggtttgcggatcgtctatgaaagctatccagttagcgcatgacagcatcatgcttgggcgcgatgagatggtggtgtgcggtggcgtggagaacatgagcgcagcaccctatttgtcgtttgacatgcgagatgggaaaagaatggggaatgcgaacatgatagattccatgatacatgatggattgtgggatgcgttcaataattaccacatggggatcaccgctgataatgtcgctcaagcataccacataagccgagaagatcaagataatttcgcgctccagtcgcaactcaaagcaagagccgccattaatgcagggaaattccaagaagaaatcacgcctattgaaatagcgaataaaaaaggcgtggtggtttttaaagaagacgaataccctagagaaacgacgctagaatcccttgcaaagctcaaacccgctttcaaaaaagacggatcggtaacggcgggaaattcatcagggatcaatgatggcgcgagtattatcattttatgcagcactaaaaaagcgcaaacattggggttaaaagccatggcgactatcaaggggtttggtttgggtggttgcagtccggatataatgggtatatgccctagcatcgcgattaaaaacaaccttaaaaatgtcaaaatgaatctcaatgacatccatctttttgaactcaatgaagcctttgccgcgcaaagcctagccgtgttaaaagagcttgaattaaaccccaatatcgtgaatgtgaatggaggcgcgatagcgattggccaccctattggcgcgagcggtgctaggatattggtaactttattgcatgaaatgaaaaggagcgggcatggcgtgggttgtgcgtcattgtgtgtgggcggcgggcaaggtctttctgtggtagttgaacaaaaataa

SEQ ID NO: 22588 - DNA, 1365 bp, Helicobacter pylori
atgtttttattaaggcatttgacttcagcgtgcgtgtttttggcgtctaaatgtttgccggactcctttgtcttggtcgctcttttatcgtttgtcgtgtttgttcttgtttattgcttgacagggcaagacgctttttctgtcatttctagttgggggaatggcgcttggacgcttttaggtttttctatgcaaatggcccttattttggtgttgggtcaggctctggctaacgctaaattagtccaaaagcttttaaaatatctagcgtctttacctaaagggtattatacggctttatggttggttacttttttatcgttaatcgctaattggatcaactggggttttggcttggtgattagtgcgatttttgcaaaagagatcgccaaaaatgttaagggggtggattacaggctgctcattgctagcgcttattcgggttttgtcatctggcatgggggtttatcaggctctatccctttaagcgttgccacccaaaatgaaaatctatccaaaataagcgctggggtgattgaaaaagctatccctatcagtcagacgattttttcttcttataatttaatcattatagggatcattcttgtagggttaccctttttaatggcaatgatccaccctaaaaaagaagaaatcgttgagattgattcaaagcttttaaaagacgagtacaaagagattgaactcattagccaccaacaagacaaaacgatcgcgcattttttggaaaacagcgctttgctttcttatcttttggtttttttgggttttgggtatcttggtgtttatttttttaaagggggagggattagtttaaacattgtcaatacgattttcctttttttagggattttactgcataaaacccctttagcttatgtgaaagcgatcgatcgttccgctaggagcgtggctgggattttattgcaattccctttttacgctgggattatggggatgatggcaagccatagcgtggggggtcattctttagcgcaaatgctttctttagctttcacgcacatcgctaatgaaaaaactttcgtgctcatgacttttttgagcgcagggattgtcaatatttttattccgtctggcggagggcaatgggcgattcaagctcctatcatgcttccggctgggcaaagcttaggggtggatccgggagtggtttctatggctatcgcttggggagatgcttggacgaatatgatacagcctttttgggctttgcccgctttagccattgcgggtttgggcgctaaagatattatgggctattgcgttttgactttaatttttgtaggcttagtcgtgtgtggggtgttttattttttagtgtga

SEQ ID NO: 22589 - DNA, 387 bp, Helicobacter pylori
atgagtgatttcgaagtcccccccaaagctaaagggtttaaacgcctttttaaagcccttttttattctaaagacgggcttaaatgcgcatggattgaagagagcgcattcaggcaaattgtcatcttggctcttttttgtatcgttctagcgagctatttagccaaagattttttagaatgggggctattgattttgccttgttttttatcggtggtggttgaactcatcaatagctctattgaaaaggctgtggattttactggcaccgagttccacccattagccaaaaaagctaaagacatggccagtgcagcccaactgatagggcttattttttggactttgatttgggggcgttatcttttagcgctttatttgaagtaa

SEQ ID NO: 22590 - DNA, 2484 bp, Helicobacter pylori
atgcaagataattcagtcaatgaaacaaaaaatattgtagaagtggggattgattcttctattgaagagagctatttagcttattccatgagcgtgatcatagggcgcgctttaccggacgctagagatggcttaaagcccgtgcataggcgtattttgtatgcgatgcatgaattaggccttacttcaaaagtcgcttacaaaaaaagcgctaggatcgtgggtgatgtgattggtaaataccacccccatggcgataatgcggtttatgatgcgctagtgagaatggcgcaagatttttccatgcgtttggaattagtggatgggcagggcaactttggctctattgatggcgataacgccgcagcgatgcgttacactgaagccagaatgactaaggcgagtgaagaaattttaagggatattgataaagacaccattgattttgtgcctaattatgacgataccttaaaagagccagatattttaccaagccgtctgcctaaccttttagtcaatggggctaatgggatcgctgtggggatggcgacttctatcccccctcacaggatggatgaaatcatagacgctttagtgcatgtcttagaaaaccctaacgctggattagatgaaatcttagaatttgtcaaagggcctgattttcccactggtgggatcatttatggcaaggcgggtattattgaagcctataaaacggggcgaggacgcgtgaaagtgcgggccaaagtgcatgtggaaaaaacaaaaaataaagaaatcatcgttttagatgaaatgccttttcaaaccaataaagccaaattagtggaacaaatcagcgatttagcgcgagaaaagcaaattgaaggcattagtgaagtgcgcgatgagagcgatagagagggcattagagtggtgattgaattaaaaagagacgcgatgagtgaaattgtcttaaaccacctctacaaactcaccactatggaaaccacttttagcatcattttactcgctatttacaataaagagcctaagattttcacgcttttagagttgttgcaccttttcttaaaccacagaaaaaccattattataagacgcacgatttttgaattagaaaaggctaaggccagagcgcatattttagagggctatttgatcgcactagacaatattgatgaaatcgtgcgactcattaaaacaagccaaagcccagaagcggctaaaaacgccttaatggagcgtttcactttgagcgagattcaaagcaaggccattttagaaatgcgtttgcaacgcttaacaggccttgaaagggataagatcaaagaagaataccaaaacttgttggagcttattgatgatctcaatggcattttaaagagcgaagatcgcttgaatggagtcgtcaaaacagagcttttagaagtcaaagagcaattttcttctccaaggcgcactgaaattcaagaatcttatgaaaatattgacatagaagatttgatcgctaatgagcctatggtagtgagcatgagttataaaggctatgtgaaaagagtggatttaaaagcttatgaaaagcaaaatcgtggtggtaaaggcaagctttcaggcagcacttatgaagacgatttcattgaaaacttttttgtggctaacacgcatgatattttgctctttatcaccaataaggggcaattgtatcatttgaaagtctataaaatcccagaagcgagccggatcgctatgggtaaagccattgtaaatttaatctcgctcgctccggatgaaaagatcatggcgactctaagcaccaaagactttagcgatgaacgctctttggccttcttcacgaaaaatggcgtggtgaagcgcaccaatttgagcgaatttgaaagcaacaggagttgtggtatcagagcgattgttttagatgaaggcgatgaattagtgagcgcaaaagttgtggataaaaacgctaagcatttgctcatcgcatcgcatttgggcattttcattaaattccctttagaagaggtgcgcgagatcggaagaactactcgtggggttataggcatcaagctgaatgaaaacgattttgttgtcggtgcggtcgttattagcgatgatggcaacaagcttttgagcgtgagtgaaaacgggcttggcaagcaaactttagccgaagcgtatagagggcaatctcgtggaggtaagggggtcattggcatgaagctcactcaaaaaaccggcaatctagtgggcgttatcagcgtggatgatgaaaatttggatttgatgatccttactgcaagcgcaaaaatgatcagagtttctattaaagatattagagaaaccggaagaaacgctagtggggtaaagctcataaacaccgccgataaagtcatgtatgtcaattcttgccctaaagaagaagagccagaaaatttagaaacctcttcggcacaaaatttgtttgagtga

SEQ ID NO: 22591 - DNA, 2808 bp, Helicobacter pylori
atggataagatcattattcaaggggctagggaaaacaatctcaaaaatatttttttagaaatccctaaaaaccagtttgttgtttttaccggattgagcggttcgggtaaatccactttagcgtttgacactttatacgctgaaggccaaaggcgctatttagagagtttgtccagctatgctaggcaatttttagacaaagtgggtaagcctaatgtggataaaattgaaggcctaacccctgcgatcgctattgatcaaaaaaccacttctaaaaaccccagatccactgtggggacgatcactgaaatttatgattatttaaggttgttgtttgcaagggttggggagcaattttgccccacatgtttagagcctattagttctatgagcacgagcgatattatttctcaaatctgtcatttagaagaaaattctaaaatcattattctcgcccccattattaaagataaaaaaggttcgtttaatgataaattagagagcttgcgtttgaaggggtatgtgagggcttttgttgatggggtgatggtgcgtttagatgaagaaatccatttgcacaaaaccaaaaaacacaccattgaagcggtggtggatagggtggtagttaataatgaaaacgcttcacggatcgctagcgcaatagaaaaagcccttaaagaaagctatggggaattagaagtggaaatcttgcaagacaacgcgccaagcatcagaaagcattacagcgaacataaggcatgctttaaatgcaagatgagttttgaagaattagagcctttgagtttttccttcaattcgcctaaaggggcgtgcgaaagttgcttgggtttggggacaaaatttagcctagatattagtaagattttagatcctaacacgcctttaaatcaaggagcgattaaagtgatttttgggtataaccgcagttattacgctcaaatgtttgaaggtttttgcgaatataatggcattgacagtgcactttgttttaacgaattgaataaagagcagcaagacgctcttttgtatgggaatggcactgaaatcagctttcattttaaaaacagccctttaaaacgcccttggaaaggcatcattcaaatcgcttatgacatgtttaaagagcaaaaggatttgagcgattacatgagcgaaaaaacctgttcttcgtgcgaggggcatcgtttgaaagcctccagtttgagcgtccaagtcgctggcttgaaaatggcggattttttaactaagcccattgaagaagtttatcacttttttaatgatcccacgcattttagctatcttaacgagcaagaaaaaaagatcgctgaacccattttaaaagagattttagaaagggtgttttttttatacgatgtggggttagggtatttgactttagggagggatgcgcgaacgattagcggaggggagagccaaaggatacgaatcgctagtcaaatcgggagtggtttgacaggggttttgtatgttttagacgagcctagcattggcttgcatgaaaaagatacgctcaaactcattaacacccttaggaatttacaaaaaaaagggaacacgctcattgtcgtagagcatgacaaagagacgattaagcatgcggattttgttgtggatattgggccaaaggctggaaggcatgggggtgaagtggtttttagcgggagcgtgaaagaattattgcaaaataaccattctaccgccttgtatctcaacggcactaaaaagattgagcgccctaaatttgaactccctaaagaaaagcattttttagaaattaaaaatgtcaatatcaataacattaagaatttgagcgttcaaatccctttaaaacaattggtgtgcattactggggtgagcgggagcggtaaaagctcgttgattttacaaacccttttacccaccgctcaaacccttttaaaccatgctaaaaaaactcaaagcttgaatggggtggagattgtagggttggagcatttggataaagtgatttatttagatcaagcccccataggcaaaaccccacgaagcaaccctgccacttacacgggagtgatggatgaaatcaggattttatttgccgagcaaaaagaagctaaaattttaggctatagtgcgagccgttttagctttaatgttaaaggagggcggtgcgagaaatgccaaggcgatggggacattaaaatagaaatgcactttttgcctgatgtgttagtccaatgcgatagctgtaagggcgctaaatacaacccccaaactttagaaatcaaggtgaaaggcaaatccattgccgatgtgttgaacatgagcgtggaagaggcttatgaattttttgctaaattccctaaaatcgccgtgaagttaaaaacgcttatggatgtgggcttaggctatatcactttagggcaaaacgctacgactttaagtgggggggaggctcaaaggatcaaattagctaaagaattgagtaaaaaagacacaggcaaaaccctttatattttagatgagcctactaccggtttgcattttgaagacgtgaatcatcttttacaagtcttgcattctttagtggcgttaggcaattctatgctagtgattgagcataatttagacattatcaaaaacgctgactacattatagacatggggcctgatgggggggataagggcgggaaagtcattgcgagcggcacgcctttagaggtggcgcaaaattgcgaaaaaacccaaagctacacgggaaaatttttagctttggaattgaaatag

SEQ ID NO: 22592 - DNA, 927 bp, Helicobacter pylori
ttgcaagaaatagagagtttgcaccaaagcgttttgttgcaagaagttttgcaagcgttcatgcctttagaagaaggggttttgattgattgcactttagggttaggggggcattctaaagcccttctatcccaaaaaccacacctgaaactcattggcattgataaagataagttcgctcaagaaatcgctaaagaacgactgaaagcctttgaagggcgttataatctcttaagtggagggtttgccaaacgctttaaagaagccctagaaacgcataacaaggagattaaaggggttttagtggatttaggggtgagctctttgcagcttgatgatgataacagagggtttaatttccactcgcacactttggatatgcgcatggatttagaaagcgaattgaacgctcaaaaagttatcaactcttatcccatagtagcgttagaaaaaatttttagagactatggcgaaatcaaggaatacaaaaaaatcgcccataaaattgcagaaaggcgcgctaaaaaaccctttaaaaacgctaaggatttgagcgagtttttaagctctttttctaaaaataaaaaaatccacccagcgactttggtgtttcaagccgttcgcatagaagtcaatagcgaattagaagaattaaaagaatttttacaatgcgctagaaaccttaagggggcgattttatgcgtgatttcttttcattctttagaagacgcgttagtgaaaaacgctttcaaagattacgctaaaaattgcatttgcgatccttcaagcttcaaatgcgcttgctctaacaaccatgctttaggcgaaattttaaccaaaaagcccatcactccaagcccagaagaaattaaaaacaacaggcgttcacgaagcgctaaaatgagggtgtttcaattcaagccatga

SEQ ID NO: 22593 - DNA, 903 bp, Helicobacter pylori
atgagaaaaacgatttcagcgttgtttttatcagcgtgcatagggttatcgtctgtttatgcagataacgctttgattttgcaaaccgattttagtctaaaagatggggccgtctcggcgatgaaaggcgtcgctttcagcgttgattcccatcttaaaatctttgatttaacgcacgaaatccccccgtataacatctgggaaggcgcttaccgcttgtatcagaccgccagttattggccaaaaggttcggtatttgtgagcgtagttgatccgggcgtaggcactaagcgtaaatcggtggtactaaaaactaaaaacggccagtatttcgtctcgccggataacggcacgctgactttggtggcacaaactttggggattgatagcgtgcgtgaaattgatgaaaaagctaaccgcttgaaaggttctgaaaaatcctatactttccatggtcgtgatgtgtatgcttacaccggtgcacgcttggcttctggggcgatcacattcgagcaggtcgggccagagcttcccccaaaagtcgttgaaattccttaccaaaaagcgaaagccacaaaaggggaagtgaaaggtaatatcccgattttggatattcaatatggcaatgtttggagcaacatcagcgataaattactcaatcaagcaaaaatcaaactcaatgacacgctgtgtgtaacgatttttaaaggttctaagaaacaatacgaagggaaaatgccgtatgtcgcaagctttggcgatgtgccagaaggccagccgttagtttatttaaacagcttgttaaatgtttccgtggcgctgaatagggataatttcgcgcaaaaatatcaaatcaaatccggtgctgactggaatattgatataaagaagtgcgctaagtaa

SEQ ID NO: 22594 - DNA, 723 bp, Helicobacter pylori
atggatattttaaaagcagagcatttaaacaaacagattaaaaaaaccaaaatcgtttcagacgtttctttagaagtgaaaagcggcgaagtggtggggcttttagggcctaatggggcgggtaaaaccaccaccttttatatgatatgcgggcttttagagcctagtggggggagcgtttatttaaacgatgtgaatttagctaaataccccttacacaagcgttctaacttaggcataggctacttgccccaagaatccagcatttttaaagaattgagcgtggaagagaatctggccctagcaggggagagcacttttaaaaactctaaagagagcgaagaaaaaatggaaagcttgttagacgctttcaatatccaagctataagagagcgcaagggcatgagcttgagtgggggagaaagaaggcgcgtagaaatcgctagagctttaatgaaaaaccctaaattcgtgctattagatgagccttttgcgggcgtggatccgattgcggtgattgacattcaaaaaatcattgaaagcttgattggattaaacatcggcgtgttgattactgatcacaatgtgcgagagactctgagcgtgtgccatagggcgtatgtgatcaaaagcggcacgcttctagcaagcgggaacgctaatgaaatttatgaaaacgctttggtgcgtaagtattatttaggggaaaattttaaggtatag

SEQ ID NO: 22595 - DNA, 1737 bp, Helicobacter pylori
atgcaagttttagcgttaaaataccgccccaaacattttagcgagctagtcggtcaagagagcgtggctaaaacgctttctttagccctagacaaccagcgtttggctaacgcttatttattcagcgggttaagaggctcagggaaaaccagctcttctaggatttttgctagggctttaatgtgtgaagaagggccaaaggctgtgccttgcgatacttgcatccaatgccagagcgctttaaacaaccaccacatagatattatagaaatggatggggcgtctaatagggggattgatgatgtccgtaatctcatagagcaaacgcgctacaaaccaagctttgggcgctataaaatctttatcattgatgaagtgcatatgttcaccaccgaagcgtttaacgcgcttttaaagactttagaagagcctcctagccatgtgaaattccttttagcgacaacagacgccttgaaactgcccgctaccatactcagccgcacccagcatttcaggtttaaaaaaatccctgaaaattccgttatttctcatttaaaaaccattttagaaaaagaacaagtgagttatgaaacaagcgcgttagaaaaactggctcacagcgggcaagggagcctaagggatacgatcactcttttagaacaagccatcaattattgcgataacgctatcacagaaagcaaggtggctgaaatgttaggagcgattgacagaagcgttttagaagattttttccaaagcctaatcaaccaagatgaagcgcgattaaaagagcgttatgccattttagaaaattatgaaaccgagagcgttttagaagaaatgatgctttttttgaaagcgaaattattgagccctgatttttattctatccttttgatagagcgcttttttaaaatcattatgagcagtttgagccttttaaaagaaggggcaaatgccagttttgtgctgttgttattgaaaatgaaattcaaagaagctttgaaattcaaagccctagacgatgcgattttggaattagagcaaacccctttcaatcaaaaccctagcataagctataacgcccctaaacaagaatctaaaaatatagaaaaaagagaaaaaatagaacaaatagaaagaatagagggaacagaaaaaagagaaaaactagaaaaaaaagagaacgcagaaaccccgcaaactcccatgctttcagctaaagatcgcatttttcacaaccttttcaaacaagttcaaacattggtttatgagcgcaattatgagttaggggcggtgtttgaaaaaaatatccgtttcattgattttgacagccagactaaaaccttgacttgggagtctttagccactgataaggataaggagcttttaagagaacgatttaaaatcgtgaaaagtatcgttgatggggtttttggcaagggcgaaagtatcaaaatcgctttaaaaaatcattcagaaaataaaagcactttagaagtggttaaagagcttaaattcccttattcaaagcccaaaccaaccactgaaacgacggctgaaacgaaagaaaaagaaactaaagaaaaagagattcaagaaaacgacactaaagagattcaagaagtccaaccaaaacaagcccctacagcgttgcaagaattcatggctaaccactctgagctgattgaagagattaagagcgagtttgaaatcaaaagcgtggaattgttatga

SEQ ID NO: 22596 - DNA, 987 bp, Helicobacter pylori
atggactttaaaaataaaaaatggctttttctagcccctttagcaggctatacggatttgcctttcaggagcgtggtgaaaaaatttggcgtggatgttaccacgagcgaaatggtgagctcgcattcgttggtgtatgcgtttgataaaacttctaaaatgttggaaaaatcccctttagaagatcatttcatggcgcaaatttcaggctctaaagaaagcgtagtcaaagaagcggtggagaaaatcaacgctttagagcatgtgaatgggattgattttaattgcggttgtcccgctcctaaagtggctaatcatggtaatggtagtgggttattgaaggatttaaaccacttagtgaagcttttaaaaaccatcagagaaaacactagtaaaaaaatcacaagcgtgaaagtgcgtttaggctttgaaaagaaaatccctaaagaaatcgctcatgccctaaatgacgcaccggtggattatgtggtggtgcatgggaggacacgaagcgataaataccaaaaagacaaaatagattacgaaagcatcgctttaatgaaaaagattttaaaaaagccggtgatagccaatggcgaaattgacagcgtgaaaaaggcttttgaagttttacaaatcactcaagcggatgggctaatgatagggcgagcggccttaagagccccatggatattttggcaaatcagaaacaacaccacaaaattacccgcagtcgtgaaaaaagacctggttttagaacattttgataaaatggtggagttttatggggatatgggggtaatcatgtttaggaaaaatttgcatgcttacgctaagggcgaaatgcaagcgagcgcgtttcgtaactgcgtcaatacccttacagaaataaagagcatgcgagagagcatagaggaattttttaatcaagaaatgttgcaaagtgaagtgccgttatgggtagaattgaatcaaaaaagcgtttga

SEQ ID NO: 22597 - DNA, 1011 bp, Helicobacter pylori
gtgcaagattttaaaacccatttagagcctttaaaggagggcaaaaatttattgggtttttcgggtgggttggattccacttgcttgttttttcttttagttggagaaaatatcgtttttgacatcgctttagtggattacaacacgcaaaaacaacgccttgaaatcatccagcacgctcaaaaactcgcaaaaacacaccataaaaaatgctacatccatcacgctccaaaaatcgcgcacaattttgaaatgcaagcgagaaagatccgttatgatttttttgaaaccctaatcaaagagcattcttacaagcatttgattttagcgcaccatttgaatgacaggctggaatggtttttgatgcaattaagcaaaggagccggattgaacacgcttttaagctttcaagcctatgaaaaaagagaatcttatgcgattgttcgccccttgctctacacccctaaagacacccttaaaacgctcgctaaagatttgaaattttttgaagatgattctaattcttctttaaaattcaaacgcaattgtttcaggaaaaattacgctaactccttgatgcaagattattctaagggcattatccaaagttttaaatttttggatcaagaaaaagagcggctttatcctttgacgattgtttcacaaatgcatgggatcactttttttaagtattcgcaaaatgcgctttttatggtggataaaatcttaaagcaaaaggggtatgtgttgagcttttctcaaaaagaagaaatcaaacgctctttttttagcctagaaatcgctcaaaaattcatcattgaaagcgataaagagcatgtatttatcgctcttaaacccccaaaaactttaagcatgccaaaggattttaaagacagagccaggagattggatatccctaaacgcttacggcctgttttatacgcagagtttttaaaacaaccaacgcatgattttttaacccgtttcaaacagagtttaatggatctataa

SEQ ID NO: 22598 - DNA, 1320 bp, Helicobacter pylori
atgcaagttaaagaaaacaaacaactctgcttaatttcattaggttgctctaaaaatttggtggattcagaggtgatgttaggcaagctttataattacacgctcactaatgacgctaagagcgctgatgtgattttgatcaacacttgcgggtttattgaaagcgctaaacaagagagtatccaaaccattctcaacgccgccaaagacaaaaaagagggagcgattttgattgcgagcgggtgcttgagcgaacgctataaagatgaaatcaaagaattgatccctgaagtggatatttttaccggcgtgggggattatgacaagatcgatataatgattgctaaaaaacaaaaccagttcagcgagcaagtgtttttaagcgagcattacaacgcacgcatcatcacgggatcgagcgtgcatgcgtatgtgaaaatttctgagggttgcaatcaaaaatgttctttttgcgctatccctagctttaaggggaaattgcaaagcagggaattggactccattttaaaagaagtggaaaatctcgcgcttaaaggctatacggatatgacttttatcgctcaagactctagctcctttttatacgataaggggcaaaaagacggcttgatccagctcattagagcgattgataaacagcaagccttaaagagcgcgcgtattttatatctctacccctctagcaccacgctagagcttattggcgcgattgaaagttcgcccatttttcaaaattattttgacatgcccatccagcacatcagcgactccatgctcaaaaagatgcggcgcaactctagccaagcgcaccatttaaagcttttagatgccatgaagcaggttaaagaaagctttatcagaagcacgatcattgtagggcatccggaagaaaatgagagcgaatttgaagaattgagcgcgtttttagacgagttccagtttgatagattgaatatttttgctttcagcgctgaagaaaacacgcatgcctattctttagaaaaagtgcctaaaaaaaccatcaacgctcgcatcaaagccttgaataaaatcgctttaaagcaccaaaaccattcctttaaggctttgttgaataagcccattaaggcgttagtggaaaataaagagggcgagtatttttacaaagcaagggatctcagatgggcgcctgaagtggatggggaaatcttgatcaatgatagcgaactaaccacccccttaaaacccgggcattatacgattgcacctagcgaatttaaagataatatcctactcgctaaggttttaagccctttttaa

SEQ ID NO: 22599 - DNA, 1110 bp, Helicobacter pylori
atgttgcttttcactccaggccctgtagccattaatgaagagatgcgcacaagcttttctcagccaatgccccaccaccgcactaaagattttgaaaagattttccaaagcgtgcgagaaaatttgaaaaaaatgaccggtttagaagaggttttgcttctaagcagcagcgggacaggggctatggaagcgagcgtgatttccttgtgtcaaaaagagttgctttttgttaatgcgggcaagtttggcgaaaggtttggcaagatcgctaaagcccattctatcaaagcccatgaattagtctatgaatgggacacaccagctcaagtagatgaaatattaagcgttcttaaagccaaccctaacattgatgcgttttgcattcaagcatgcgagtctagtggggggttacgacaccctgtggaaaaaatcgctcaagcgatcaaagaaactaacccgaatgtttttgtaattgtagatgctatcaccgctttaggggttgagcctttagaaataacgcatgttgatgcgctcattggagggagtcaaaaagcgttcatgctgcctcctgcgatgagcctagtcgcattgagccagaatgcaattgagcgtatagaagaacgcaatgtggggttttatttcaatttaaagagcgaattgaaaaaccaaaggaataacaccacaagctacaccgctcctattttacacactttagggttgcaacgctattttgaattggtgcaaaatttagggggctttgaagcgctctatagagagactaaaaaagccgctttggccactcaaaaagccgttttagctttaggtttaaagattttccctaaaagcccaagcttgagcatgacaacgattgttaatgagcatgccaaagaattgagaaaccttttaaaagaaaaataccaggtgcaatttgcgggcggtcaagagccttataaagatgcgctcattcgtatcaaccacatggggatcattcctgtttataaaagcgcttacgctttaaacgccctagagttagccctaaacgacttggatttaagggaatttgatggcgtggcgaacgcaacttttttaaagcaatattatggaatttaa

SEQ ID NO: 22600 - DNA, 1044 bp, Helicobacter pylori
gtggagttttgcgttttatttggtggggcgagttttgagcatgaaatcagcattgtgagcgcgatcgcgcttaaaggagtgttaaaagataggattaaatattttatttttttagatgaaaaccatcatttttatttgattgaagaatccaacatgcattcaaaatacttcgctcaaatcaaagaaaaaaaattacctcccctaatcctcacacacaatggcttgcttaaaaactcatttttaggtgctaagattatagaattgcctttagtgatcaatctcgtgcatgggggcgatggcgaagatgggaaattagcgagcttgttagaattttatcgtatcgcttttataggccctaggattgaagcgagcgtgctgagttataacaaatatttaaccaagctttacgccaaagacttaggggtaaagactttagatcatgttcttttgaatgaaaaaaaccgcgctaacgccttggatttgatgaactttaatttccctttcataatcaagcctaataacgccggaagctctttaggggtgaatgttgtgaaagaagaaaaagaattggtttacgctttagacggtgcgtttgaatattctaaagaggtcttgatagagcctttcattcagggagtgaaagaatacaatttggccggttgcaagatcaaaaaggatttttgtttttcctatgtggaagagcctaacaaacaggaatttttagatttcaaacaaaaatatttggatttttcacgcaataaagcccctaaagcgaatctttctaacgccctagaagagcaattaaaagaaaattttaaaaaactctataacgatttgtttgatggcgcgatcattcgttgcgatttttttgtcataaaaaatgaagtgtatcttaatgagatcaaccccattcctggcagtttggccaattatttgtttgatgattttaaaacaacgctagaaaatttagcgcaatcattacccaaaacccctaagatccaaatcaaaaactcttatttgttgcaaatccaaaagaataagtaa

SEQ ID NO: 22601 - DNA, 726 bp, Helicobacter pylori
atggccaaacgcagtatcgcttatttggatagcgtttttgacatttcctacacttttatagaccaccatagccctttaaacgccttgtttttgcatggttgggggagttctaaagaaatcatgcaacaagcgtttcaaggctgttttttaaattacaatcatttgtatgtggatttgcccggcttcaatcaaagccctaacgatgaaaaagttttagaaactaaagattatgctaatatcatcaatctgtttttaaaaagcgtgggtaaaaaagcgcatgtcgtttttgggcatagctttggagggaaagtggcgatcttgtgtgaaaacgaacggatggttttattgagcagcgccgggatcttagagccaaaacccttaaaagtgcgttgtaaaatccttttagctaaaatctttaaaaaattaggcttgaatttagggtttttgaggagtaaggacgctatggggcttaatcaagcgatgtatgaaacctttaaaaaagtcattagcgaagactttagcgatcatttcaaacgatgcgagaaagaagttttattattttggggtaaagatgataaagcaacccccttaagctccgctcaaaaaatgcaaaccttattgaaaagaagcgtgttattcgttttagaaggggatcatttcttttttttaaaccaggcaaaagagattgaaaaactagtggagaattatcatcatgcaaagtcttag

SEQ ID NO: 22602 - DNA, 1482 bp, Helicobacter pylori
atgcaaagtcttagttggctgaatttagcgtttcgttggctctttataacagggcttggctattatataatgactttattgcaatggtatcattacagcgtgtttaggatcttaaccaagcaccacaaaatgcgttggcatgggatttattttttattgcctttaggggtgtttattctgtcgtatgctttcacaatgccgtttgtttttgatttcttttgcggcgttattcaaatgcccatgctcattgtttgggccaaacgcaacgacaagcctttagttttcacgccaagggtgaagcgcttttttatcttcttattattatttttaatcttgcatgaaatcttaaatatagaattagtccctttggatgggatttcgctcgcgctaggctatttgtgtttgtttatattcgttttaagcgcttctttaatctctgaaaaagccttatccaagcagtatttgcaaaccgctaaagataaaatcacctctttaaagaatttaaaagtcatcgccattaccggaagctttgggaaaaccagcaccaaaaatttcttgcttcaaatcttacaaaccacattcaacgcgcatgcaagccccaaaagcgtcaatacccttttagggcttgcgaatgatattaatcagaatttagacgataggagtgaaatctatatcgctgaagccggggcaaggaataagggcgatattaaagaaatcacctgtctcattgaaccgcaccttgttgtggttgcagaagtgggcgaacagcatttagaatactttaaaactttagaaaatatttgcgagactaaagcggaattattggattccaaacgcttagaaaaagccttttgttactcggtggaaaagatcaagccctatgcccctaaagatagccctttaatagactattctagcctggttaaaaacatccaatccactttaaaaggcacttcttttgaaatgcttataggtagcgtttgggaaagatttgaaacaaaggttctaggggagtttagcgcttataatatcgcttcagccattttaatcgctaagcatttaggcttagagaccgaaaggatcaaacggcttgttttagaactcaaccctattgctcatcgtttgcaacttttggaagtgaatcaaaaaatcatcatagacgatagctttaatgggaatttaaagggcatgttagagggcattcgtttagcgagtttgcacaaagggcgtaaagtcattgtaacaccgggcttagtggaaagcaatacagaaagtaatgaggctttagcgcaaaaaatagacggggtttttgatgtcgctatcatcacaggggagttgaattccaaaacgattgcttcacaattgaaaaccccccaaaaaatcttactcaaggataaggcgcaattggaaaatatcttacaagccaccacgattcaaggcgatttgattttattcgctaatgacgcccctaattacatttag

SEQ ID NO: 22603 - DNA, 957 bp, Helicobacter pylori
atgaaagcgcgtgggtttaaggcaaagatgcgtgggtttaagattttttcagggagcgctcaccctgcatttggcaaagaagtgtcaaagcatttaggctttcccttatccaaagcggtgattgggaaattcagcgatggtgaaatcaatatccaaatcagcgaatcggtgcgcggtaaggatatttttatcatccagcccacttgcgtgccggtcaatgacaatttaatggaattgttagtcatggtagatgctttaaggcgcagttcggccaattctatcacagcggtgttgccgtattttggctatgccagacaggacagaaaagcggctccaagagtgcctatcacggctaaaatggtcgctaatttgatgcaagaagtggggattgaaaggatcattacgatggatttgcatgccgggcaaatccaaggcttttttgatgtgccggtggataatttatacggatctatcgtttttagagactatatccgctctaaagcgttaaaaaatcctgtgatcgctagccctgatgtgggtggggttacaagagctaggtattttgccaatcaaatgggcttagatttaatcatcgtggataagcgccgtgaaaaagctaatgaaagcgaagtgatgaatattatcggctcagccaaggagcgcgatgtgattttagtggatgacatgattgataccgcaggcacgatctgtaaagccgctttggctttaaaagaacaaggggcgacttctgtcatggcgttaggcacgcatgcggttttaagcgggaatgcgatcaagcgcattaaagaaagcgcgttagatgaagtggtggtaactaactctatccctttagttcaaaaatgcgataaaatcaccactttaagcgtagcgcccttatttgcggaagtgatcagaaggatttatcataacgaaagcgtccaatcgcttttcacttaa

SEQ ID NO: 22604 - DNA, 1389 bp, Helicobacter pylori
atgcaaattgcaacagcaatatggaaaacaagaatttggcaactccaaacccattttgataaaaaagaagcgcatttgaagcatttagaagcacaacacaaagaatttgtaagagatgaaaaacgctatttagaaaaggaaaaaaaagagcttgaaaaagaacgccaaattttagaacaagaaaaagaaaattttaaaaaacagcgcgctgtttgtaaagaatctcaagccaaagcgctagacgcgatgctcaattacatggcttatactaaagatgaaattaaaagcatgattttagagcaattagaagaagaattagaagcccaaaaaagcgccttaatcaggcgttatgaaaaagaagccaaagaagagggcaagaaaaaatcgtatgccattttagcggaagcgacagcccgttttgcgggtaattatgcggcagagaatttaacaactcgtattgctttgccttgctcagattatatcggtcgtgtgataggcaaagacgggaaaaatattgaagcgtttaaaaaggtcagcggggtggatatagaatttagcgaagatagcagcgaattgtgtttgtccagtttcaatctttatcggcgtgaagtagcgagcgagacgcttaaaattttaatagaagacggccgtatccagcctaacaggattgaagaggtttatcatagagtcgcgcgcaacctggaaaaagaattgctttctgaaggggagagcgtggtgttagaattagagcttggagctatggaagatgagcttaaaattttaataggcaaaatgcgttatcgctccagttttgggcaaaacgccttacagcattctaaagaagtcgctcttttagccggcttgattgcagagcagcttgggggggataaaaaactcgctagaagagccggtattttgcatgatattggtaaagcgctcacccaagagcttgggagagatcatgtgaatttaggggttgaggtgtgcaagcgccataaagaagatccggttgtgatcaatgcgatttatgcccaccatgggcatgaagagattttgagcgtggagtgcgcgagcgtgtgcgcggctgatgcgctttcagcagggcgtcctggggctaggagaaagagcgatgaagaatacgctaaacgcatgcaagctttagaagagatcgcgctagaatttgatggggtggaaaaagcgtatgcgatggagagtgggcgagaattaagagtgattgtcaaatccaaccaagtcagggacaatcaagtgcctattattgccagaaagatcgctaaaaagatagaagagagcgctcagtatgtgggcgaagtgggcgtgcaagtggtgcgagaaagccgtttcaaaacgaccgctacgctcaagcaataa

SEQ ID NO: 22605 - DNA, 603 bp, Helicobacter pylori
ttggcttgcaagcttttgttttggaaactcaaagattatcaaaatattttattgtatagcccattagggcatgagcttgacattaggcctttgatttttaggttaagacaaaaaaataagtgcgtgtggttgcctaaaagcatcaaaaaaggcgctcatttttctaaagagagctttactatcgcgccctttaggttgcccttaaggcgtttggggtggtttgatgagccgagtttgtcgcgctattataagcaagaattagattgtattgtcgtgccgattttaggaatggatacaagttttaggcgcgtgggttttgggctaggcatgtatgataggagtttgccccaattactcaaaaggcgactgaaacgccccttaatcgtgtttgtgagtagggagttagcgatagctaatggtgttctcacaaacgcctatgacattgaagcggatctttacatgaatgctcgtatcgttgtgaagaataataaaaggaaacattatgagcagcgggttaatttacatttcattagaagtcttggtagcgtgtttgattaccgctctagtcatgtattatgtgatgaaaaagatctattacgctag

SEQ ID NO: 22606 - DNA, 882 bp, Helicobacter pylori
atgtttaattttttcaaaaaaattgtcaataaaattaagggtgaagaggctaaagaaaaaaagcgccaaagcgttcctaaagaggaattagaagaaattttgattggctttgacatccaatacgatttgatagagagcttgttaaagcatttaggcgatttaattacgcccaagcaattagaagtcgctttgttgcgttttgtgcgaggggatagctattatgataaaacacgcctaaaaaccatcaccacaaaacccttagtgcatttaatcgtgggggttaatggggcgggtaaaaccacaacgatcgctaaattagccaagctttctttaaaacagcataaaaaagcgcttcttggggcaggcgatacttttagagcggccgcagtcaaacagctccaattatggggcgaaaagcttaacattcaagtcattagcgccaaagaagggagcgatccaagctctttagcttataacaccatagaaagcgcgattgctaaaaatatagatgaagtttttatagacaccgccgggaggctacacaaccagaccaaccttaaaaacgagctttctaaaatcgcacgcacctgctctaaagttttaaaagacgcccccttttataaattccttattttagacggcacgcaagggagttctggactaacgcaagccaaaattttccatgagactttggcgttagacggcgtgattatgactaagcttgatggcacttctaaaggcggagcgattttaagcgtgctgtatgagttgaaattacccattctttatttaggaatgggcgaaaaagaagacgatttgatcgcttttgatgaagaacgctttatagaagacttggttgatgcggtgtttgtgggacaataa

SEQ ID NO: 22607 - DNA, 966 bp, Helicobacter pylori
gtgttagtagatagttttaatagggttattgactatattagggtttctgtaaccaaacagtgcaatttcaggtgtcagtattgcatgcctgctacgccattaaatttttttgataatgaagaattattgcctttggataatgttttagaatttctcaaaatcgccattgatgagggcgttaaaaaaattagaatcacgggtggggagccgctattacgcaaaggcttagatgaatttatcgctaaattgcacgcttacaataaagaagtggagttagttttaagcactaatggttttttactcaaaaaaatggctaaggatttaaaaaatgccgggttagcgcaagtgaatgtttcattggattctttaaaaagcgatagggttttaaaaatctctcaaaaagacgctcttaaaaacacgctagaagggattgaagagtctttgaaagtgggtttaaaactcaaattaaacacggttgtgataaaaagcgttaatgatgatgaaatcttagagcttttagaatacgcaaaaaataggcatatacaaatccgctacattgaatttatggaaaacacgcatgctaaaagtttggttaaaggcttgaaagagcgagaaattttagatttgatcgctcaaaaatatcaaatcattgaggcagaaaaacccaaacaagggtcttctaaaatctacacgctagaaaatggctatcaatttggcattatcgctccgcatagcgatgatttttgccaatcttgcaatcgtatccgtttggcttctgatggtaagatttgcccatgtttatactatcaagacgccatagacgctaaagaggcgatcatcaataaggatacaaaaaatataaaaaggcttttaaagcaatctgtcatcaataaaccagaaaaaaacatgtggaatgataaaaacagcgaaactcccacaagggcgttttactacacaggggggtag

SEQ ID NO: 22608 - DNA, 1077 bp, Helicobacter pylori
atggctgaagaagaaaaaaccgaactccctagcgcgaaaaaaatccaaaaagccagagaagaaggcaatgtgcctaagagcatggaagtggtgggggttttggggttattggccgggctaattagtatttttgttttttttatatggtgggtggatggctttagcgaaatgtatcgccatgtgttgaaagatttttccctagatttcagtaaagaaagcgttcaagagctgtttaaccaactggctaaagacacttttttattgcttttaccgattttaatcattttagtggtggtggcgtttttatctaatgtcttgcaatttggctggctctttgcccctaaagtcattgagcctaaattttctaaaatcaaccctatcaatggcgtcaaaaaccttttttctttaaaaaagctccttgatgggagtttgatcaccttaaaagtttttttagctttttttctggggtttttcatcttttctttgtttttaggggaattaaaccatgcggctcttttgaatttacaaggccagttgttgtggtttaaaaataaggcgttatggctcatttcttcgcttttatttttattttttgtcttggcttttatagatttagcgatcaaacgccgccaatacaccaactctttaaaaatgactaaacaagaagttaaggacgaatacaaacagcaagaagggaacccagaaatcaaagccaaaatccgccaaatgatgctaaaaaacgccacgaataaaatgatgcaagaaatccctaaagccaatgtcgtggttactaaccccacccattacgccgtcgctctcaaatttgatgaagaacaccctgtgcctgtggtagtggctaaaggcacggattatttagccattaggattaagggcatcgctagagagcatgacatagaaattatagaaaataaaacgctcgccagagagctttatagagatgtgaaattaaacgctgccataccagaagaattgtttgaagccgtggcgatagtcttcgctcaagtggctaaattagagcaagaacgccaaaaacaaaagatcattaaacctctttaa

SEQ ID NO: 22609 - DNA, 1323 bp, Helicobacter pylori
gtgcttgtgaggttaggggttgttgcatgtcttttttggcttcattacgcttacgctacaacccttaagatcaccaatgttgtgccttttggctctagcagcgttaaaatggtgttcaatcaagaggttaaaaaattcaaagaagtttcgctcaaaaatttcaagagttatttggaattagaagccattttaaccattcctaaaaagcattaccaattctccaagcaatcgttcatcacgatcgcgcaattcagccctaagttagtgcgagtggttatcggctatgctcctaagatgacttatgaagttaaaatccttaaagacaagctttatgtttctatcgtggagaaaaagcccttaattaggcatcaaatggcgttaaaaccacccaaacaccatgcactcaaacacacaacgccaaaacccgcccataagcccattaaaaaagaggctaaaaaggttaaagaaaaaacgccaactaaacatgcgcattcaaaacacacgcattccccattgaacgaaaggagcactaaaaaagaaattcctaaaaaagaaattcctaaaaaagaagcggaaaatgagagcaagaaccaagtctttatagcagaaaaaaatgatactttcatcaaaaccaaacgcaaaaaacacaaaaagatcgttttagacgctgggcatggggggaaagattgcggggcgatgagcgcgaatttggtgtgtgaaaaagacattgttttagaagtggtgaagtttttacacaaagagcttaaaaaaagagattatagcgttttattgacaagggataaggatatttatattgatttagtggctcgcacggaattagccaataaaaaaagcgcggatttattcatctcagtgcatgccaattccatccccaaacattccacttctaacgctcatggtatagagacttattttttatccaccgcaaggagcgaaagggctaggaaagtggctgagcaagaaaataaagacgatgtgaatttaatggattatttttctaaaagtttgtttttaaattcattgaacacgcagcgattgatcgtctctaacaaattagcgattgatgtgcaatacggcatgctccaaagcgtccgcaaaaattaccctgatgtggtggatggaggcgtgagagaggggcctttttgggtgttggccggggctttaatgccttcaatcttaatagaaattggttataattcccatgcgatagaatctaaacgcatccaaagcaaaccgtatcaaaagatcttggctaagggcattgctgatggcattgatagtttcttcagcaagaatgattag

SEQ ID NO: 22610 - DNA, 1092 bp, Helicobacter pylori
atggtatcaacactcaaaccgctaaaaatcggtaagcacaccataaaattccctatctttcaagggggaatgggtgtggggattagctgggatgaactagctggaaatgttgccaaagaaggggctttaggagtgatttcagccgtagggactggttattataaaaacatgcgttttgtagaaaggattgtggctaaaaaaccctttgaagccttgaatttttactccaaaaaagcgttgaatgagatttttgcaaacgctaggaagatttgcgggaacaaccctttaggagcgaatattttatacgctatcaatgactatggccgtgttttaagggactcttgtgaagcgggagcgaatatcattattacaggggctggtttgcccaccaacatgcctgaattcgctaaggattttagcgatgtggcgctcatccctattatttcttcagcgaaggctttaaaaatcctttgtaaaagatggagcgatcgctataaaagaatcccggacgcgttcattgtggaagggcctttgagtggggggcatcagggctttaaatacgaagattgtttcaaagaagaattccgattagaaaacttagtgcctaaagtcgtggaagcttctaaagaatgggggaatatccctatcatcgccgctggggggatttgggataggaaggatatagacaccatgttaagtcttggagcgagtggggtgcagatggcgactcgttttttaggcacgaaagaatgcgacgctaaagtgtatgccgatcttttgcccacgctcaaaaaagaagatattttactcattaaatcgcctgtaggttatccggctagggctattaatacgggagtgatcaagcgcattgaagagggtaacgcgcccaaaatcgcatgcgtgagcaattgtgtagcgccttgcaacaggggtgaagaggctaaaaaggtgggctattgtatcgctgatggtttggggcgcagttatttagggaacagagaagaggggctttattttaccggggctaatggctatagagtggataagattatcagcgtgcatgaattgattaaagagcttacagagggttaa

SEQ ID NO: 22611 - DNA, 1209 bp, Helicobacter pylori
atggaacaaaaaatcgctatcgccttaaaagagatcgctagaggcactaatgaaatcattggattagaatacattgaaaagttggtgaggaaatattatgaaaccaatgaacgctttatcgttaaagccgggtttgatcctaccgctccagatttgcatttagggcatacggtattgatccaaaaactggctttattgcagcaatatggggctagggttaagtttttgattggggattttaccgctatgataggcgatcctacagggaaaaatgaaaccagaaagcccttaaaccgggagcaagtcttagaaaacgctaaaacttatgaagagcaaatctataaaattttagatgaaaaacacaccgaagtgtgctttaattccacttggttggatgctttaggcgcaaaaggcatgatagaattgtgcgcgaagttttcagtcgctagaatgctagaaagggacgatttcactaaacgctataaagaaaatcgccccattagcatcgtggaatttttataccctttgttgcagggctatgattcagtggcgatggatgcggacattgagcttgggggcaatgatcaaaagtttaatttgctggtggggcgttttttgcaacgagcttatggcttgaataaagagcagtctgtcatcaccatgcctttattagaggggcttgatggggtgcaaaaaatgagtaaaagcttggggaattatgtggggatcactgaagagcctaatgcgatgtttgggaagatcatgagcgtgagcgatgatctcatgtggcgctattacacccttttgagcactaagactttagaagaaattgaagacttaaaacatggtattttaaaccaaaccttgcaccctaaagccgttaaagaggatctcgctagtgaaatcgtggctcgttattatgacaatgatcaagccatcaaggctaaagagcaattttctaaagtgtttagcgcaaaccttttgcctgaaattttatcagagagcgattttgatgagggggtggggattttagatgttttaaaacagattggcttttgcccatccacttcacaagccaggcgtgatattcaagggggaggggtaaagattaatcaagaagtgataaaaaatgagagttatcgttttgttaaaggaaattatgttatacagcttggtaagaaaagatttatgaaattaaatattaactaa

SEQ ID NO: 22612 - DNA, 2328 bp, Helicobacter pylori
atgaacgaaattgataaatccgttgatatcggattcttacggattcttgatgttattaaaaaagttacgaccccaaagggtggcattgaaatcttaaggactttaattgattttacgcccaaaattgaaaacgccctgaatttagcggccaaaagccataaggggcaatacagaaaaagcggcgagccttatattgtccatcctatttgcgtggcaagcttggtagcgttttgtgggggcgatgaggcgatggtgtgtgctgcgcttttgcatgatgtggtggaagacacgccttgtaagattgaaacgattgagcaagaatttgggcaagatgtggctaatttagtggatgcgctcactaaaatcactgaaatcaggaaagaagaattaggcgtgagctctcaagatcccagaatggtggtttcagcgctcactttcagaaagattttaattagcgcgatacaagatccaagagccttagtggtaaagattagcgacaggttgcacaacatgctcaccttagacgccttgcctcatgacaagcaagtgcgtatttctaaagagactctagcggtgtatgcccctatagcgagccgattgggcatgtcttcaatcaaaaatgaattagaagacaagagcttttattatatttatccagaagagtataaaaatatcaaggaatatttgcacaaaaacaagcagtctttactcttaaagctcaacgcttttgcgagcaagttagaaaaaaaactttttgatagtgggtttagccattcggattttaaactcgttacaagggtgaaacgcccttattctatctatcttaagatgcaacgaaagggcgcggttaatattgatgaaattttggacttgttagccattaggattttattgaaaaacccgattgattgctataaagttttagggattatccatttgaatttcaaacccattgtctctcgttttaaagattacatcgctttgcccaaagaaaatggctataagacgatacacacgaccatttttgatgaatcttctgtttatgaagtgcagatccgcacctttgatatgcatatgggggcggagtatggtaattcagcccactggaagtataaagccgggggcgtggatcatgaagatcatcatgagggcatgagatggttgcaaaattttaaataccatgacagcgatttgaaaaacgaccctaaggaattttacgaactcgctaagaacgatttgtatcgtgaagatattgtcgttttttcgcctcatggggacacttacactttaccggtgggtgcgatcgctttagattttgcttacatggtgcatagcgatttgggcgataaagccacggacgcttatatcaatagtaaaaaagccttactcaatcaggaattaagaagtggggatgtggttaaaatcattaaaggcgataaaataatacctcgtttcatttggatggatcagcttaaaacttctaaggctaaaaaccatttgcgcatccaaagaagaaaccgcttgaaagaggttgacactaagagcatgatcaatatcttagcgactttttttgggcgctctgtttttgaagacatggatttaaaggattataaaaactttgaagaaagattaacagattgcggggtggagaccaccttaacagaagcgatgaaaagttttgaaaatttagccaaactcactgaagaaattgaaaataaggtgttttctttaaaagaagatgcgattttagaataccaagagatgagtttatggactcgaggtttaaggtatttgggctttaaaaccaatgtcttgaattttttagcccccaatcggcagtggcagtgtaaggaattagaacattttagcgtttgttcaagcaacgctttagaaatcaaacaggtgttgttgaatgattgttgttaccctaaatatggcgatgaaatcattgcgattgtaacggatttaaaagatccaaaagcgattgcgcaccataaattttgcaaaaaagcgatggcggaagtagatgctaaagtgcctatggtttatatagaatggcacaagcgggatcgaacgatttataaaatgatgttttatttgggcgaaaaaaagtcggttttagcgggtttattaacttttttaaacaggaatgaatgcaacattgtgggcgtgtcttatttgggctataaagacaagtattctagccattgtgaagtgagttttgaaatagccacagataaggcggattggatcagagccttaatcaatcgcaaatatcaggataggattgtagaattatccagtctggatgacgcttatgaatcataa

SEQ ID NO: 22613 - DNA, 723 bp, Helicobacter pylori
atgcaagcaaagataaaaaacaaacgggttttggtgaaattttctggggaagcgttagctggggacaaccagtttgggattgacattcatgtgttagatcacatcgctaaagagatcaaaagtttagtggaaaacgatattgaagtgggtattgtgattggtggaggcaatattattaggggggttagcgcggctcaaggggggattattaggcgcaccagtggggattatatgggcatgttagccaccgtgattaatgcggtagcgatgcaagaagctttagagcatatcggcttagacacaagggtgcagagcgcgattgaaatcaaagagatttgtgaaagttacatttacagaaaagcgatcaggcatttagaaaagggtagggtggtgatttttggcgcaggcacgggaaacccgtttttcactacggatacggctgccactttaagagcgattgaaattggatcggatttaatcattaaagcgactaaagtggatggcatttacgacaaagatcctaacaagtttaaagacgctaaaaaattagacactttaagctataacgatgccttgataggggatattgaagtgatggacgataccgctatttctttagctaaagacaataagctccccattgtggtgtgtaacatgttcaaaaaagggaatttattgcaagtgatcaagcaccaacaaggcgtattttctatggtaaaataa

SEQ ID NO: 22614 - DNA, 2562 bp, Helicobacter pylori
atgatgaaagattttttagaagattacaaaaaaagcgtttcagaaagaggaagtgagggtatcccgccactccctttaaacgctaaacaagttcaagccgtcgttgagattttaacaaaagatcccacaaacgccgctttcgctaaagaattactcattcacagagtgagccctggggttgatgagggggcgaaagtgaaagcggaatttttagctaaattgtctcaaaaaaaactagaatgcgtgcacattagtgctttagaagcgaccacccttttaggcacgatgcttggggggtataatgtagagcctttgattatgggcttagagagtcaagacaaaaacatcgctaaagagagtgcgaaagctttaaaaaccactcttttagtctatggatcgtttgataaaattgcggcaatgagcaaaactaacgctctggctaaagaagtgttagagtcttgggcaaacgccgaatggtttttgaataaagagcctttgaatgaatgcattgaagcgtgcgtgtttaagattgatggcgaaaccaataccgatgatttaagcccagcgagcgacgctttcacacgaagcgatattcctttacacgccaaagccatgctaaaaaaccggattgaaaattacgaacaacgcatcaaagccattaaaactaaaggcgttcctgtagcgtatgtgggcgatgtggttggcacaggaagctccagaaaaagcgcgacgaactctatcatgtggcattttggtaaggacattccttttgtgcctaataaaaggagtgggggcattgtgattgggggggtgatcgctccgattttctttgcgacttgtgaagatagcggggcgttacccattgtggctgatgttaaggatctaaaagagggcgatttgattaaaatctatccttataaaggcgaaatcacgctgaacgataaagtggttagcacttttaagttagagcctgaaactttgttagatgaagttagggcttctgggcgtatccctttaatcatcggtaggggtttgacgaataaagcgcgtaaattcttggggctaggcgaatctgaagcgtttaaaaagccatccgctcctaaaagcgacgccaaaggctacactttagcccaaaaaattgtagggcatgcttgtggggtaaaagggatcttacctgggacttattgtgagccaaaggttaccaccgtgggcagtcaagacaccacaggggcgatgactagagatgaggttaaagagttagcgagtttgaagtttgatgcgccttttgtgttgcagagtttttgccataccgccgcttacccaaagcctagcgatgtgagtttgcatgcaaccttgcctggctttatcactcaaagaggcggtgtggcgttgcatccgggcgatggcgtgatccatacatggctgaatcgcatgggattgcctgatactttaggcacagggggggatagccacacccgtttccctttgggcattagtttcccggcagggagtgggctagtcgcttttgcagcggttacaggcacgatgcccttgaacatgccagaatctgtgttggtgcgttttaaaggggaaatgaatcctgggatcaccttaagggatttagtgaatgcaatcccttattatgcgattaaaaaagggttactcacggtggagaaaaagggtaaaatcaatgtctttaacgggcgtattttagaaattgaaggcttgcctgatattaaaatggagcaggcttttgaactaagcgatgcgagtgcggaaagaagtgcagcggcttgcgtggtgcgtttgaataaagagccgatgattgaatacttgaaatccaatatcaagctgattgatgagatgattgcaagcggttatgaagataaagagactttgaaaaaacgccgagatgcgatgcaagcttgggtggataatccggtattgttagagccagatagtaacgctcaatacgccgctgtcattgaaattgatgtggcagaaatcacggagcctattttggcatgccctaatgaccctgatgatgtcgctactttgagcgaagttttagcggatacgaccggcaaaagaccccacgctattgatgaagtgtttattggctcttgcatgacgaatattgggcattttagagcctttggcgaaatcgttaaaaacgctcctcccagtcaagcacgcctttgggtagtgccacccagtaaaatggacgaacaagagcttattaatgagggctattatgcgatttttggggctgccggggcaaggactgaagtcccaggctgtagcttgtgcatgggcaatcaagcgagggttagggataatgcggtcgtcttttccacttccacacgcaattttgataatcgcatgggtagaggggctaaagtgtatttaggcagtgcggagcttggggcggcgtgcgctttactagggcgaatccccactaaagaagaatacatgaatttagtgagtgaaaagctagagagccaaaaagacaagatctatcgctacatgaactttaacttaatggagaatttcaggctctag

SEQ ID NO: 22615 - DNA, 2598 bp, Helicobacter pylori
atgataaaagcaatcattggaaaaatcattggcaccagaaacgatcgctggatcaaacaatacaaaaaacaagtcctaactatcaacgccttagagcctacttatgaaaaaatgagcgacgatgagctgcaaaacgcttttgaagagttaaaaaaacgagtgcgatccacagaaaaagatttgcaagaaaaaacccttttagaagtcctgcctgaaagttttgcaatcactagagaagcgagcaaaaggatcttaaagatgtgccattttgacgtgcaactcattgggggcatggtcttaaacgatggcaaaatcgctgaaatgaaaactggagagggtaaaactttagtcgctactttagcggtggctttgaacgctttaaagggcgagagcgtgtatgtggtaaccgttaatgattatctagcccatagggattctaaagaaatggagccgttgtatcatttcttaggttatagcgtaggcacgatcactgcaagcgtgcgagatgatgatgagcgcttggaaatttattctaaagacattgtttatggcactaataatgaatttggttttgattatctaagggataacatgaaatattctttagagcataaggtgcaaaaatcgcatgcgttcgctattgttgatgaggtggattccattttaattgatgaagcgagaacccctttaatcatttcagggcctgtggataggcgcatggaaaattacaacaaggctgatgaagtcgctaaaagcatgcaagtggaaatagatttcaccatagatgaaaaaaaccgcgcgattttaatcactgaagaggggattaaaaaagctgaaaatctctttggcgtggataatttatacaagattgaaaacgccgccttatcgcaccatttagaccaagctttgaaagcgaattatctcttttttattgataaagattatattgtagccaataatgaagtggtgattgtagatgaatttaccggccgtttgtctgaggggaggcgctttagtgagggcttacaccaagctttagaggctaaagagggcgtgagcattaaagaagagagccaaaccttagccgatatcactttccaaaattatttcaggatgttttctaaactcgctggcatgacaggcacggctcaaaccgaagccacagaatttttagaaatctacaatttagaagtggtgtccatccctactaatttagcgatcaagcgaaaagatttgaacgatttgatctataagagtgaaaaagaaaaatttgacgctgtgatccttaagattaaagaattacacgataagggtcagcctgttttagtcggcacggctagcattgaaaagagtgaaaccctgcacgctttactcaaaaaagaacgcatccctcacaccgttttaaacgccaagcagcacaccaaagaagctgaaatcatcaaggacgccgggcttaaaggagcggttacgattgcgactaacatggcaggcagaggcgttgatattaaactcaccgatgaaattaaggagcttggggggctgtatatcattggcactgaaaggcatgagagccgcaggattgacaaccaattaagggggcgaagcgggcgccagggcgatccgggaacaagccaattttatttgagtttagaagacaatctgttacgcatttttgggagcgataggattaagggggtgatggaaaaattagggcttaaagacggcgaacacattgaatcaaagcttgtaacaagagcggtggaaaacgcgcaaaaaaaagtggaaaacttgcattttgaaagccgtaagcatttgttagaatacgatgatgtggctaatgagcaacgaaaaagcgtgtataaatttagagatgaattattagatgtcaattacgatattagcgctaaaatcgctgaaaacagagaatacgcgctcaatcaaatcttttctaaactcaaagcctttgaccatcaaaacctgtctgaagaggaacttttagggcttaaaaacatcttaaaagaagattttaacgctcatgtttcattagaagatttaaaaaaagcctctcctattgaaaattttgtagctgaaaaactcaaaagcgattatgaaaacaaaatgaaagttttggatagcgaacaaagaagccggattgaacgcatcgtgtatttgcagattttagacaacgcatggcgagagcacctttacacgatggataatctcaaaaccggcattaatttaagaggctataaccaaaaagaccctctcgtagaatacaaaaaagagagttacaaccttttcttagaattcattgaagacattaaaacggaagcgatcaaaaccttttctaagatccagtttgaaaatgagcaagattctagcgatgcggagcgttatttggataattttagcgaagaaagagagcatgagagcgtaacttaccgccatgaagaagccttagacgaagatctgaatgtggccatgaaagctttcgctaaaacccctaaaagaaacgagccttgcccttgtcaaagcggcaagaaatacaaagattgttgcgctaaaagcgggcctaaaaagggcttatttgccaaatag

SEQ ID NO: 22616 - DNA, 1233 bp, Helicobacter pylori
ttgccaaatagatccttaatctttttccttatcaagcgttatttgcgttttgataaaagccagccatttattagtatcaccgctttgttagccttttttggcgtggcggttggcgtgatggttttgattgtggctatggcgatcatgaacggcatgagtaaggaatttgaaaaaaagctttttgtgatgaattaccccttaacgctctataccacaagcccttatgggatcagcgaagaagtggtgcaagctttagaaaaaaagttccctaatttgctttttagcccctatttgcaaacccaaagcctgattaaaagcgcgcattctatgaatggtggcgtggtgtttggggttgatttttctaaagaaaaacgcatcaatgaagttttaaacgacgctttaaaaaacattaatgaaaacgatctttttaaaaacccttttaatttgatcgtggggaaaagcttgagatacagcttgaatttagatctcaatcaaaaagccgatttgtttttcaccgaattagagccaacaggcctaaccctctcccctatcatgaagcgttttaccataaaaggcgattttgattcagggctaaaatcttatgacatgagctacatgtatgctggccttcaagccataagcgcgatcaggaggttgcccttagggctttatgatggggtgcatgtctattctaaaacgcccatgaaagatattgaaattttacgcaacgctttaaaaaccatcaaccaccatggcataggcattgaagggtggtggcaacaaaacgggaattttttctcggctatggaattagaaaaaagagcgttattcattgtgctcatgctcattattttaatggcgtctttgaatattattagttcgcttttaatggtggtgatgaacaggcgtaaagaaatcgccctactctttagcatggggagcagccaaaaagaaatccaaaaaacctttttttatttgggcaatatcattggtttaggcggtgtggcgcttggggtggttttagcgtttttaagcatgtatcttttaagcgtgttccctatcatctcgctcccagcggatgtctatggcattaacaccttgcctttgaatctgtctttaatggattttacgctcactctaataggctctgtgatcatcgtagggctttcttcttattacccgtctaaaaaagcttctactattgacgctttaagcgtgttaaggaatgaataa

SEQ ID NO: 22617 - DNA, 531 bp, Helicobacter pylori
atgcaaacgattcatataggcgttttgagcgcgagcgatagagcgtcaaaagggatttatgaagatttaagcggtaaggcgatacaagaagtgttgagcgaatacttgctcaatcctttagaattttattacgaaattgtcgctgatgaaagggatttaattgaaaaatcactgattaaaatgtgcgatgaataccaatgcgatctagtcgttactacaggaggcacaggccctgctttaagagatataaccccagaagccacagaaaaagtgtgccaaaaaatgcttcctggttttggagagcttatgcgaatgactagtttaaaatatgtgcctacagcgatcctgtcgcgccagagcgctggtattaggaataagagtttgattattaatctccctggtaagccaaaaagtattagagaatgcttagaggcggtttttccagcgattccttattgcgtggatttgattttagggaattatatgcaagtgaatgaaaaaaacattcaagcgtttcgccccaaacaatag

SEQ ID NO: 22618 - DNA, 1035 bp, Helicobacter pylori
atgatcttaaaacgagttactgaagctttagaagcgtataaaaatggcgaaatgctcattgttatggacgatgaagacagagaaaatgagggggatttggttttagctgggattttttctacccctgagaaaatcaatttcatggccacgcatgctagggggttgatttgcgtgtctttgaccaaagatttagcgaaaaaatttgaattaccccctatggttagcgtgaatgattctaaccatgagaccgctttcacggtttccattgacgctaaagaagccagaaccgggatttctgcttttgaaaggcatttaacgattgaattattgtgtaaagacaccaccaaaccgagcgattttgtgcgcccggggcatattttccctttgatcgccaaagacgggggcgtgttagcgcgcacgggccatactgaagcgagcgtggatttgtgcaaattagctggattaaagcccgtgagcgtgatttgtgaaatcatgaaagaagatggctctatggcgagaaggggggataaatttttgagcgatttcgccctcaaacataaccttaaaactctctatgtctctgatttgattagctatcgtttggaaaatgaaagtttgctgaaaatgttttgtcaagaagaaagggaatttttaaaacaccaaacgcaatgctacacttttttagatcaccagcaaaaaaaccattacgcttttaagtttaaaggcgcaaaaacccatgatttagcccctttagtgcgtttccaccctatcaaagaggattttgattttttaacgactgatgcgtttgaagtgttttttaaagcgttagaatatttaaagcacgaagggggctatttgatctttatgaacacccattctaaagaaaacaatgtcgttaaagattttgggatcggggcgttggtgttaaaaaatttggggataaaggatttcaggctcttaagctcttgtgaagacaggcagtataaggctttgagcgggtttgggcttaagcttgtagaaacgattagcctttaa

SEQ ID NO: 22619 - DNA, 2364 bp, Helicobacter pylori
atgaatggttatttgagagtaaaaacctcttattttttagcgttgaacgctttgacttttttgtcttttaactctttggtgggcgcgaaagaacagcatcacactttgcaaaaagtgacaaccactgagcaaaaattcaatccaagcgcgccgctttcatggcaaagcgaagagatgcgtaattccacaagctctcgcacggtgatttccaacaaggaactcaaaaaaacggggaatttgaatattgaaaacgccttgcaaaacgtgccagggattcaaatcagagacgctacaggcacaggcgtgctgcctaaaatttcggtgcgcggttttggtgggggcggtaacgggcatagcaataccaacatgattttagtcaatggtatccccatttatggcgcgccgtattccaatattgaactggcgattttccctgtaactttccagtcagtggataggattgatgtgattaaagggggcacgagcgtgcaatacggccctaatacttttggaggcgtggtgaatatcatcactaaagaaatccctaaagagtgggaaaatcaagcggctgaaaggatcactttttgggggcgatcctctaatgggaattttgtagatcccaaagaaaaaggcaagcctttagcccaaactttaggaaaccaaatgctgtttaacacttacgggcgaacggctggaatgttgggtaagcatgtaggaattagcgctcaaggcaattggattaacgggcaaggtttcaggcaaaacagccccacaaaggtgcaaaactacttgcttgatgcggtttataagattaatgcgaccaatacttttaaagcttattaccaatattatcaatacaactcttaccatccaggcactttgagtgcacaagattatgcttataaccgcttcattaatgagcgccctgacaatcaagatggagggcgagccaagcgctttgggatcgtgtatcaaaattattttggcgatccggataggaaagtggggggagattttaaattcacttatttcacgcatgacatgagtagggattttgggttttccaaccaataccaaagcgtgtatatgagcagtcaaaacaagattttaccttttaaaggcaagggaaaaattagcgcgactaaccctaattgcggtttgtattcttatagcgacacgaacagcccttgttggcaattttttgacaatatccgccgatccgtggtgaatgcctttgagccaaaactcaatcttatcgtcaataccggtaaagtcaaacaaacttttaatatgggaatgcgctttttaactgaagatttataccgccgatccaccaccaggaaaaaccctagcatgcctaataatgggagtggttttgatgcaggaacttcactcaataatttcaacaattataccgctgtgtatgccagcgatgagatcaatttcaataacggcatgctaacgatcacgccgggcttgagatacacttttttaaattacgaaaaaaaagacgctcctccttttaaagcaggccaaacaggaaaaaccattaaagatcgttataaccaatggaatccagcagtgaatgtcggctataaacccattaaagaattgttgttttatttcaattaccaaagaagctacattccgcctcaattcagcaatatcggtagttttgtaggcacaagcacggattattttcaaatctttaatgtcatggaaggcggctcaagatattattttaacaaccaagtgagttttaacgcgaattattttgtgatttttgcgaataactattttaccgggcgctatggggataataaagagccggtcaatgcgagatcgcaaggcgtggagctagagttgtattacacgccgattagagggcttaatttccatgcggcttacactttcatagatgccaatatcacaagccacacgatggttactaaccccgctaatcctaaagggcctaaaaaagatatttttggcaaaaagctcccttttgtaagcccgcaccaattcattttagacgcgagctacacttacgctaaaaccacgattgggttgagttctttcttttatagccgaacttatagcgatgtgttaaacaccgtgccttttattcaatacgcgcccacgatcaaaaatggtgctatcactaccaaaacagcgggcatgacgccatggtattgggtgtggaatttgcaaatttctaccactttttgggaacgcaaaaagcaaagcgttaatgcgagcttgcaaatcaataacatttttaacatgaaatattggtttagcgggataggcactagcctaacgggaaagaagccgcgcctcctaggagcatcacagcgtatgtga

SEQ ID NO: 22620 - DNA, 360 bp, Helicobacter pylori
atgattggcatagatattgtctctattgctaggatagaaaagtgcgtgaaacgctttaaaatgaagtttttagagcgttttttatcgccaagcgagattgttttatgcaaggataaatccagcagtatcgccgggtttttcgcgcttaaagaggcttgttctaaagcccttcaagtgggcattggtaaggaattgagctttttggatataaaaatctctaaaagccctaaaaacgcccccttaatcaccctttccaaagaaaaaatggattatttcaatatccaaagcttgagcgcgagcatcagccatgacgctggttttgcgatagcggtcgtggtggtttcttcgtcaaatgaataa

SEQ ID NO: 22621 - DNA, 768 bp, Helicobacter pylori
ttgttaagccggctagaaaaagagcgttatttgcgccatatcatgctagaagatgtgggcgaagagggtcaattgaagcttttaaaatctagcgttttagtcattggggctgggggtcttggatcggcggttttgatgtatttgtgtgccgctgggataggaaaaatcggtattgtagattttgatgtagtagatatgagtaatttgcaacgccaaatcatccattcacaggattttttaaaccaatctaaagcctctagcgcgaaagcgcgcttaaaacaactcaatgcgggtattgaaatagaggcttttgaagaacgctttaaggctcataacgctctttctctcatagagccttatgattttatcatagacgccacggacaattttaacgctaaatttttgatcaatgacgcttgcgtgttagcccaaaaaccctattcgcatgccggggttttagaatacagggggcaaagcatgagcgttttaccccatagcgcatgcttagcgtgcgtttttgataagccccctaaaaagggattaaatcccatttcagggctttttggggtcttacccggagttttagggtgtatccaagcgagcgaatgccttaaatattttttagggtttgaaactttacttataaatactttacttatagccgatattaaaacgatggattttaaaaaaattcaagcacccaaaaaccctgaatgtagggtttgtggcacgcataaaatcacgcatttacaggattatgaaatttag

SEQ ID NO: 22622 - DNA, 681 bp, Helicobacter pylori
atggaacacagagtatttactattgctaatttttttagctccaatcatgattttatcaccgggttttttgtcgttttgacagcggttttgatgtttttaatctcgcttggcgcgtcgcgcaaaatgcagatggtacctatgggtttgcagaatgtgtatgagagcatcattagcgcgattttgagcgtggctaaggatattataggcgaagaattagcccgcaaatacttccccctagctggcacgatcgctttgtatgtctttttttctaacatgataggcatcattcctggctttgaatcccctacggctagctggagctttacgctggttttagcgctgattgtgtttttttattaccattttgaaggcattagagtgcagggcttttttaagtatttcgctcattttgcaggtcctgtgaaatggctcgcccctttcatgttccctattgagatcatctcgcatttttctaggatcgtgtctttatcgtttcgtttgtttgggaatatcaagggcgatgacatgttcttgctcatcatgcttttattagtgccttgggcggttcctgtagcgccttttatggtgttgtttttcatggggattttacaagcttttgtttttatgatcctcacttatgtgtatttggcaggggctgttttaaccgatgaagggcattaa

SEQ ID NO: 22623 - DNA, 1362 bp, Helicobacter pylori
atgatcactttaaaacaagccctttctttatcccaagatgaattagaaacccttaaaaacgaaattgacgctaaggttagagcttcagatttgaacgcttatattaaagcccctagccttaatggcgctagcgctaaaggggtgccgattctcattaaagacaatatcagcgttaaggggtgggaaatcacttgctccagtaagattttagaaggctatgtcgctccttatcatgcgagcgtgatggaaaacttgcaccaaaacagcatggcagggtttgggctttctaacatggacgagtttgcgatgggaagcaccacggagtctagttgctatgggatcactaaaaacccacgagataaaaacagagtgcctggagggagtagcggagggagtgcggcagccgtggcgggcggcttagcggtagcggctttagggagcgatacgggcgggtctatcaggcagccggcgagctattgcgggtgcgtggggttaaaacccacttatgggagggtgagccgttatggtttgatcgcgtattgctctagttttgatcaaatcgggcctatcacgcaaaatgtagaagacgcttctattttatttgacgctattagcgggtatgatagcaaggactccacgagcgctaatctcaaacccacgcaaacctttaaaaaccttaacagagacaaacgctttaaaatcgctgtcttaatggatcacattaaagacgcgagcaatgaagtgcaactcgcttatgaaaacacccttaaagccttgaaagaaatggggcatgagattgtggaaaaaaagatgttggattcgcattatcaaatctctatttattatattatcagcatggctgaagcgagttcgaatctggccagatttgatggggtgcgttatgggaggagggctcaaaatattaaagatttgaaagaattgtatctcaaaagccgcagtgaaggttttggcgatgaggtgaaacggcgcatcatgttagggaattttgtcttaagcagtgggtattatgacgcttattatttgaaagcccagcaaatgcgtttgataattaaagagcaatacaacaagatttttgaagaagtggatttgattttcacccctgtagctcccacgagtgctcatttattcaattaccatgcaagccctttagaaatgtatttgagcgatatttacacgattggggcgaatttgagcggtttgccagccctttccttgcctgtcgctaaagatcctttaggcttgcccatagggatgcaattcattgctaaggcttttgatgagcaaagccttttagatgtttcttacgctttagagcaagaattagatttaaaattagattaa

SEQ ID NO: 22624 - DNA, 1377 bp, Helicobacter pylori
atgaatacaagccataaaactttaaaaaccattgcgattttaggccagcctaatgtggggaaaagctcgttatttaaccgcttagctagagaaaggatcgctatcacttcagattttgcaggcactacacgagacattaacaaacgaaaaatcgcattgaatggccatgaagtggaattattagatacagggggcatggctaaagacgctcttttgtctaaagaaatcaaagcccttaatttaaaagccgctcaaatgagcgatttgattttatacgttgtggatggcaagtctatccctagcgatgaagatcttaagctttttagagaagtttttaagatcaaccctaactgctttttggtgatcaataagattgataacgacaaagaaaaagagcgagcttatgcgttttcttcttttggcatgccaaagagttttaatatttccgtttcgcacaatagaggcattagcgcattaattgatgcggtattgagtgcgctggatttaaaccaaatcatagagcaagatttggatgcggatattttagaaagcctagaaacccctaataacgctttagaagaagagatcattcaagtgggcatcattgggagggtgaatgtgggcaaaagctcgctcttaaacgcgctcacgaaaaaagaaaggagccttgtttctagcgtggctggcacgaccattgaccccatagatgaaaccattctcataggcgatcaaaaaatttgctttgtggataccgctggcatcaggcataggggtaagattttaggcattgaaaaatacgcattagaacgcacgcaaaaagccttagagaaatcccacattgcgcttttagttttagacgtgagcgctccttttgtggaattggacgaaaagatcagctctttagcggataaacattctttaggcatcattcttgttttaaacaaatgggacatccgctacgccccttatgaagagatcatagcaactttaaaaaggaaattccgctttttagaatacgcccccgtgatcacaaccagctgcttaaaagcgcgccatatagatgaaatcaagcataaaatcatagaagtctatgagtgtttttccaaacgcattcccacgagcttgctcaatagcgtgatcaatcaagccacccaaaaacaccccttgccaagcgatggcgggaaattagtgaaagtgtattacgccacgcaatttgccaccaaaccccctcaaatctctcttataatgaatcgccctaaagccttgcatttcagttacaaacgctatttgatcaacaccttaaggaaagaatttaattttttaggcacgcctttaatccttaacgctaaagataaaaaaagcgcccaacaaaattaa

SEQ ID NO: 22625 - DNA, 285 bp, Helicobacter pylori
atgaacaaagcggaatttattgatttggttaaagaagcgggtaaatacaacagcaaaagggaagccgaagaagcgatcagtgcctttactttggcagtagaaacagctttaagcaagggtgaaagcgtggagttgatcggttttggcaaatttgaaaccgcagagcaaaaaggcaaagaaggtaaagtgccaggaagcgataaaacttataaaactgaagacaaacgggtgcctaaattcaaacccggtaaaacccttaaacaaaaagttgaagaaggtaagtga

SEQ ID NO: 22626 - DNA, 1764 bp, Helicobacter pylori
atgaaaaacttttccccactttgttgttttaaaaagctcaaaaaacgccatttaatcgctttgagcctgcccttgctttcttatgctaatggctttaaaatccaagagcaaagcctgaatggcacggctttaggctcggcgtatgtcgctggggctaggggggctgatgcttccttttataacccggcgaatatgggctttactaacgattgggatgaaaacagaagcgaatttgaaatgaccaccaccgtgattaatatcccggcctttaagtttcaagtccctacgactaatcaaggcttgtattcggttacgagcttacaaattgataaaagccaacaaaatattttaggcatcatcaacactatagggcttagcaatatccttaaagcgcttggcaatacggccgctaccaatggcttatcacaagcaatcaatcgggttcaagggcttatgaatctaaccaatcaaaaagtcgtaaccctcgcttcaaaacctgacacccaaatcgtgaatggctggacgggaacgactaattttgttttacccaaattcttttataaaacgcgcacgcataacggcttcacttttggggggagttttaccgctcctagcgggttgggcatgaaatggaatggtaaagggggggaatttttgcatgacgtgtttatcatgatggtagagcttgcccctagcatgagctatactgttaataagcacttttccgtgggcgtgggcttaagggggctttatgcgaccgggagctttaataacaccgtttatgtgcctttagagggcgcttcggttttgagcgcggagcaaattttaaatttacccaacaatgtttttgccgatcaagtgccaagtaacatgatgactttattaggcaatattggctaccaaccagcgcttaattgccaaaaagccggtggggatatgagcgatcagagctgtcaagagttttataacggcttgaaaaaaatcatgggctatagcggcttaatcaaagcgagcgcgaatctttatggcacgactcaagtcgtgcaaaaatctaacgggcaaggcgtatcggggggctatagagtgggttcgagtttgcgtgtgtttgatcatggcatgttttcggtggtgtataattcttcagttacattcaatatgaaaggcgctctagtggctatcaccgagcttggcccttctttagggagcgttttgactaaaggcagcttgaatatcaatgtttcactcccccaaaccctaagcctagcctacgcccaccaattttttaaagaccatttaagaatagagggggtgtttgagcgtaccttttggagtcaagggaataaatttttagtaacccctgattttgcgaacgctacttacaagggcttgagcggaacggtggcttcactagactctgagacgcttaaaaaaatggtaggcttagcgaattttaaaagcgtgatgaacatgggggctggctggagagacaccaacacctttagattaggggtaacttacatgggtaaaagcttgcgtttgatgggtgctattgattatgaccaagccccaagcccccaagacgcgataggtatcccagattccaatggctataccgtggcttttgggactaaatacaattttaggggctttgatttaggcgtagcggggagtttcacttttaaaagcaaccgctccagtttgtatcaatccccaaacattgggcaattgagaatctttagcgcctctttaggctatcgctggtaa

SEQ ID NO: 22627 - DNA, 1002 bp, Helicobacter pylori
atgccaaatcatcaaaacatgctagacaaccaaacgattttaatcaccggtggcactgggagttttggcaaatgctttgttcgtaaagttttagacaccaccaacgctaaaaaaatcatcgtttatagccgagatgaattgaaacaaagcgaaatggccatggaatttaatgatcctagaatgcgtttttttatcggcgatgtcagggatttagagcgcttgaattacgctttagagggcgtggatatttgtatccatgcggccgcgctcaagcatgtccctatcgctgaatacaaccccctagaatgcattaaaactaacattatgggagcgagcaatgtgattaacgcatgcttaaaaaacgctatcagtcaggttatcgctctaagcaccgataaagccgctaaccccattaacctctacggtgcaaccaaattgtgcagcgacaagctctttgtgagtgcaaacaactttaaaggctcttctcaaacgcaatttagcgtggtgcgttatggtaatgtggtggggagtcgtgggagcgtggtgccgttttttaaaaaattagtccaaaacaaagcgagtgaaatccccattaccgatattcgcatgacacgattttggatcaccttagatgagggggtttcttttgtgcttaaaagcttgaaaagaatgcatgggggggaaatttttgtgcctaaaatccctagcatgaaaatgactgatctcgccaaagccctagcccctaatacccctactaaaatcatagggattcgtccgggcgaaaaactccatgaagtgatgatccctaaagatgaaagccatttagccctagaattcgaagactttttcatcattcagcccaccataagcttccaaacgcctaaagattacacgctcaccaaactccatgaaaaaggccaaaaagtcgcccctgattttgaatacagcagccataataacaaccaatggctagagcctgatgatttgttgaaattattatga

SEQ ID NO: 22628 - DNA, 660 bp, Helicobacter pylori
ttgtttgatgcggattgtttgaaactcatgtttgtggccggatcgcaagacttctaccacataaagggcggcaaaaacgataggataaacgcgcttttagacactttagaattagctttacaatctaaaatcacagcgtttcaattccgccaaaaaggcgatttagccttacaagatcctactcaaatcaaacaattagccatgaagtgtcaaaaattatgccaaaaatacggcgcgccttttattgtcaatgatgaggtgcaactcgcgctagaattaaaggctgatggcgtgcatgtggggcaagaagacatggctatagaagaggtgataactttatgcaaaaagcgccaatttatcggtttgagcgtcaatactttagagcaagccctaaaagcacgccatttagacgccgtagcctatttaggggtaggccctatttttcccacaccatctaaaaaagacaaacaagttgtaggcgtggagcttttaaaaaaaataaaagatagcgggataaaaaaacctctcatagcgattgggggcatcacgatgcataacgctccaaaattgcgcgaatatgggggtatcgcagtcattagcgcgattgcccaagccaaagataaagccttagcggttggaaaacttttaaacaatgcgtga

SEQ ID NO: 22629 - DNA, 822 bp, Helicobacter pylori
atggatttttgtaaaataaaagaaattttaaggaggcttgtggtgttgaaagaattacgccaaaaacgccctttagtgcataatatcaccaattatgtggcggcgcaatttgtggctaatggtttgttagctttaggggcatcgcctttaatgagcgatgcgattgatgaaatgcgagatttagcgaaaatttctgacgcgctcgctatcaatattggcacccttaatgatcgcgctattttatgcgctaaagaggctatcaagcattacaaggctttgaacaaacccattgtgttagatcctgtggggtgttcagcgagcgctttgcgtcatgacaccagtttagagcttttgaaaagtggtgggattagcgcgcttaggggtaatgctgcagaattaggctctttagtggggatttcttgcgaaagtaaggggctagactctaatgatgccgccacgcctgtagaaataatcaaattagcggctcaaaaatattctgtgatagcggtaatgacgggtaaaacagattacgtgagcgatgggaaaaaggttttgagtattactggggggagcgagtatttagcgctcattactggggctgggtgtttgcatgccgcagcatgcgcgagctttttaagtttgaaaaaagaccccttagattctatggcgcaactttgcgcgctctataaacaagccgcttttaacgcgcaaaaaaaggtgttggaaaataacggctctaatggttcgttcttgttttattttttagatgctctaagcttgcccatagagttagaaaacagccttattaaggaagagtggtga

SEQ ID NO: 22630 - DNA, 2601 bp, Helicobacter pylori
ttgcaagtgatccaccaatacagcaataaaggggggaagtatcaaaaccgctatgatgtgagtatccttgtgaatggcttgcctttagtgcatgtggaattgaaaaaaagaggcgtggcgatcagggaggcgttcaaccagatcaagcgctataaaagggatagttttagcgctgaagacgggctttttgattttgtgcagatttttgtcatcagtaacggcacgagctctaaatactattcaaacaccacaagaatagcccagctggaaaaaaaccataaagccgatacttttgaattcacgaattattgggcggatagcaagaatcacaatattgaggatttaatggattttgctaaggcgttttttgcaaagcgcagccttttgaacgttttaacgtgctattgcgttttcacaagcgaagaggttttattggtgatgcggccttatcaaatcgtggcggccgaaaggattttggaaaagatcaaaaccgcgcaaaatagtaaaacgaaaaatcaaagcaaaggctatatctggcacacgacagggagcggtaaaaccctaacgagctttaaaagcgcaacgttggctaaagaattagagagcgtttcaaaagtcttgttcgtggtggacaggaaggatttggactatcaaaccatgaaagaatacgataaattccaaaaagattgcgctaattccaacacaagcactaagattttaaaagaacagcttgaagattctaacgctaaaatcattatcaccacgatccaaaaattagacaaattcgttaaatcccataaagggcatgcgatttttaatgaagaagttgtgatgatttttgatgaatgccacaggagtcagttaggctctatgcatcaagccatcactaaagcgtttaaaaaataccacctttttggctttactggcacgcccatttttgcagctaattgcgataaaaacaaccctttaggcacgacagagcaaaagtttgggaaatgcctccaccaatacaccattattgatgcgatcagggataaaaacgttttgccctttagagtggaataccacaacaccattaaagctaaagaggacattaaggataataaggttagagcggttgatgaaaaaaacgcccttttggatactaggaggatcaaagaaatcactaaatgcattttagagcgtttcaatcaagccactaaaaataaaaaattcaattccattctggcatgctctagcatagaagcgctgaaaaaatactaccaagcctttaaagaagaaaaacacgatcttaaaatcgctgccatttttagctatagcgctaatgaggaaattgacacgctagaagatgaaaacaatgaaagcgcttgccggctagacaaaagctcaagggattttttagagggcgcgattgcggattataatgggatgtttggcgtttcttttgacacttcggatcaaaaattccaaagttattacaaggatctttctcaaaaaatgaaagagcgtaaaatcgatcttttaatggtggtgaacatgtttttgaccgggtttgacgctacaaggctcaacaccctttgggtggataaaaatctcaaataccatgggctaattcaagctttttcacgcgcaaaccgcattttagatagcgttaaaacgcatgggaatatcgtgtgttttagggatttagaacaggatttgaatgacgctctcatgctttttggcaacaaggacgctcaatctattgcgctgttaagaaaatatgaagattatttgaaaggctacacggataacaacaaagaatacgagggctatgagggtttgattaaaaggcttttaaccgaattcccattaaaagagccaatcgtttcagaaagccagaaaaaggattttattaagctttttggcaagattttgaaattagaaaatattttaaacagctttgaaaatttcaaaaaagacgattacatcaatcccagggattttcaagactatcaaagcaaataccttgatttttacgatgcaatgagatcagaaaaagggaaggataaagaagagattaatgatgatttgatttttgaaattgaactcatcaaacaagtggaagtcaatattgactatattttgaatttgattgaagagttcgctaaagagcatggggtggaaatccaaggcgttaaaaccaaaatagagccaatcatcaactccagcatagagttaaggaataaaaaagatttgatcatggatttcattgacaaatacaacaaagaccaagaagtccatgcgcattttcaagattatatccaccaaaaaagagaagaggaattccaaaatatcatagaagaaaaccgcttgaatgaagaaaaagcctattcgttcatgcagcatgcctttaaagggggcgaaatcagttttagtgggacggaattccctaaaatcattgaagaaaaaccctccatgtttggtaaaaattcgcgctatcaagaggtgaaagaaaaagtcgctgcaagcctttctcgttttttccaccgcttttgtgatctcactagcgctatatttaagaaaaatgaggttaaaaaagatgaggttaatgaaaaatag

SEQ ID NO: 22631 - DNA, 1584 bp, Helicobacter pylori
atggaaaacaacccaaacaataaccaagcgtcattagaacgcaacgaattgcacaacaccatttggaaagtggctaacgaattgagaggctcagtggatggctgggattttaagcaatacgttttaggcattcttttttaccgctacatttcagaaaacatgactcattacatcaataaagaagagcgaaagcgcgatccgagttttgattacgctaaattaagcgatgaaaaggccgagcgtggaagaaaacaccttattgaacaaaaaggctttttcatcccgccaagcgctttattttgtaatgcgctaaaaaacgcgtgccataacgaagatctcaatgtaaccttacaaaatatttttaacgaaatagaaaaatctagccttggcactccatcagaagaaaatgtcaaaggcttgtttgcggatttagatgtcaatagcaataaattagggagctctcatcaaaatagggtggaaaaattgactaaaatccttgaagccatagggggcatgcaattaggcgattatttaaaaagcgggattgatgtttttggcgacgcttatgaatatttaatggccatgtatgcgagcaacgccggcaaaagcggaggggaatttttcaccccccaagaagtgagcgaactgctcgctaaaatcaccctacacggccaagagagcgtcaataaagtttatgacccatgctgtgggagtgggagcttactcttacaattttctaaagtgttaggcgataaaaatgtctcaaaagggtattttgggcaagaaatcaatttgaccacttacaacctttgccgtatcaacatgtttttgcatgacatcaattattctaaattccatattgcgcacggggacacgcttttagacccaaaacatgaagacgatgagccttttgatgcgatcgtttccaaccctccttattccactaaatgggtgggcgatagcaaccccattttaatcaacgatgagcgctttagcccggctggtgtgctagcgcccaaaaacgccgccgatctcgcattcactatgcacatgctttcttatttatccaatagcggcacggctgcgatcgtggaatttcccggggtgctttataggggaaacgctgaagcaaaaatcagagaatatttagtcaaagagaatgtcattgactgcgtgatcgctttaccagacaacctcttttttggaacgagtatcgctacttgcattttagtgcttaagaaaaacaaacaagacgacaccacgctttttattgatgcgagtaaggaatttgtcaaagagggcaagaaaaacaagctcaaagagcgcaaccgagaaaagattttgcaaacctatattgaaagaaaagagattaagcatttttgcgccctagctaatattgagaaaatcaaagaaaacgattacaatctctccgtgaatcgctatgtggagcaagaagacaccaaagaagccattgacattaaagcgcttaatagtgagattgctcaaatcgtagaaaagcaaagcgctttaaggaaccgtcttgaatccatcatcaaagagttagaaggggggcaaaatgcataa

SEQ ID NO: 22632 - DNA, 684 bp, Helicobacter pylori
atggtatttgacagaacaatcagcgtaagagaaaaaaaagcggctaaaacgcttgggattattgggatcgtcttttttattttgtttggcatcgtgataagcggggtggcttttcaaaaagagtgggtgcaacaattggatttattttttatagacttgatccgcaaccctgcccccattcaaaaaagcgcgtggctttctttcgtgttttttagcacttggtttgcacaaagcaagctcaccactcctatagccttactcattggcttgtggtttgggtttcaaaaacgcatcgctttgggggtgtggtttttctttagcatcttattaggtgaattcaccttaaaatcccttaagcttttagtggcgcgcccacggcctgtaaccaatggcgaattggttttcgcgcatggctttagtttccctagcgggcatgctttggcttcagcgcttttttacggctctttggcgttgttgttatgctattctaacgccaacaatcgcattaaaacgattattgctgtggttttgcttttttggatttttttaatggcgtatgatagggtttatttaggggtgcattaccctagcgatgttttaggagggtttttattagggattgcttggtcgtgctgctctttagcgctttatttagggtttttgaaacgcccttataatcaataa

SEQ ID NO: 22633 - DNA, 1602 bp, Helicobacter pylori
atgctacaaaccatcaacttaacgcaacgctatgcgactaaaaaattgtttgaaaacgtgaatatcaagctggataaaaacaaacgctacgggcttattggggctaatggcgcaggaaagtccacttttttaaagattttaagcaagagcattgattgtagcagtggggaagtcatcattacaagcggcatgaaaatgggggttttagggcaggatcaatacgcttttgaagatttgagccttaaagatgcggttttgataggcaacaagcgtttgtatgacgctatcaaagaaaaagagcgcttatacaccgaaggcgatttgagcgatgataaagtgaatgccagattaggggagttagaaaccatttgcgtggaagaagatcccatgtatgaatgcgaagtggcgattgaaaaaatcctagaagatttaggcattcctagctctaaacacaacgatttgatgaaaaccctgccaagcagcgataaatttaaaatccttctcgctcaagtcttgttccctaaaccggatattttgcttttagatgagccgaccaacaacctggatttaaacgccattgaatggctagaaaacaacctcaaacgccatgaaggcacgatggtcgtcattagccatgacaggcattttttaaatgcggtatgcacgcatattttggatttggatttccacagcgtgcgcgaatttagcgggaattatgacgattggtatatcgcttccactctgatcgctaaacagcaagaggccgaacgcaataaaaaactcaaagaaaaagaagagctagaaaaattcatcgcgcgctttagcgctaacgcttctaaagccaagcaagccaccagccgccaaaaacaactggataaattagacattcaaagtttagcggtatctagcaggagggatcctagcattatttttaaacccaaacgcaccattggtaatgaagccttagagtgcgaaaacatctctaaaagttatgacgaccaaatcgttttaaatcaagtgagcttgaaagtgatgcctaaagacaagatcgccctcatagggccaaacggcgtgggtaaatccacgctttgtaaaattctagtagaagaattaaagccggataagggcgtggtgaaatggggggcgacggtttcaaaaggctatttccctcaaaacgtgagcgaagaaattagcggggaagagaccttgtatcaatggctctttaacttcaataaaaagattgaaagcgctgaggttaggaacgctttagggaggatgctgtttaatggcgaagagcaagaaaaatgcgtgaacgctttaagtgggggcgaaaaacaccgaatggttttatccaagctcatgctagagggggggaattttttagtcttagatgagccaaccaaccatttggatttagaagcgattatcgctttaggcgaagcgctctttaaatttgatggggcgctgatttgcgtaagccatgacagagagctcattgatgcgtatgctaataggatcattgaattagtcccaagccctaaaggcgcttcaatcattgattttaaaggcagttatgaagagtatttggcgagcaaaaaatga

SEQ ID NO: 22634 - DNA, 984 bp, Helicobacter pylori
atgtcattgaaagtgtttgattacgaagatgtccaactcattcctaataaatgcatcgtgaatagccgttcagagtgcgatacgaccgttatcctaggcaaacatgcgtttaaaatgcccatagtcccggccaacatgcaaacgatcatcaacgaatcgatcgcagaatttctagcagaaaatggctatttctatatcatgcaccgctttgatggagcagcaagaatcccgtttgtcaaaaaaatgaaaaaacgccaatggatcagttcaatcagcgtgggagtgaaaaaggaagaatgtctttttgtagaagagttggccaagcaaggattagcgccagactatatcacgatcgatattgcgcatggccattcaaattctgtcattgagatgatccaacgcatcaaaacgcatttgcccgaaacttttgtgattgccgggaatgttggcacgccagaagcggtccgtgaattagagaacgccggtgctgacgctacaaaagttggcatcgggcctgggaaagtgtgtatcactaaaatcaaaacaggttttggcacgggtggttggcaactggcggctcttaggtggtgcgctaaagcagcaagaaaacccattattgcagatggcggcattcgcacgcatggcgatatcgtaaaatccatacgctttggtgcgacaatggtaatgattggctcgctttttgcagggcatgaagaatcatctggagagacaaaaatagaaaatggtatcgcatataaagaatatttcggttcagcttcagagttccaaaaaggtgaaaagaaaaatattgaaggcaagaaaatttggatccaacataaaggctcattaaaagacacgctggttgaaatgcatcaagatttgcaatcttcaatctcctatgcaggtgggagagaccttgaagcgattcgaaaagttgattatgtcattgtgaaaaattcaattttcaatggagacgcaatctaa

SEQ ID NO: 22635 - DNA, 579 bp, Helicobacter pylori
atgattgataatttaattaaaaaagaatttttagcccataaggaagcgttagaaaaaagtttagagggtttgcaagaagcgttaaaacaaagcgttcatcttttgatagaaactttagaaaatcaagggaaaatccttatttgcggtaacggagggagtgcgagcgatgcacagcattttgccgctgaattgactgggcgctataaactagaaaggaaaggtttgagtgcgataagccttaataccgatatctcagccctcaccgccattgcgaacgattatggttatgaagaagtgtttgccagacaagtggaagcgttgggggtaaaaaacgatgttttgatagggatttctacaagcggtaattccaaaaatgtcctaaaagcttatgaaaaagccaaagatttagagatgaaaacgcttagtttagcggggcgtgatggggggaaaatgaagcctttaagcgatatggctttgattgtccctagcgatgacaccccacgaatccaagaaatgcacattcttatgatccacatcttatgcgattgcattgaaaggcatttcgctcataaaaattag

SEQ ID NO: 22636 - DNA, 1386 bp, Helicobacter pylori
atgaaaaaaatcttagtcataggcgatctgatcgctgattattatttgtgggggaagagcgaacggctttcgcctgaagcccctgtgcctgttttagaagtccagagggagagtaagaatttaggcggagcggctaatgtggctaataacctcatttctttaaaagctaaagtttttttatgtggggtcgtgggcgatgatttagagggcgagcatttcattagcgctttaaaagcaagagggattgacgcttcaggtattttgatagataaaacccgttgcaccacgcttaaaacgcgcatcatcgcgcaaaaccagcaaatcgcgcgcgtggataaggaaatcaaagaccccttaaacgctgatttaagaaaaaaacttttagattttttcacagaaaaaatccaagaaatagatggcgttatcctttcagattacaataagggcgtgttggattttgaactcactcaagcaatgatcgctctagccaaccaacaccacaagctcattttatgcgaccctaaagggaaagattatagcaaatattcccatgcgagtttgatcacgcctaatcgcaccgaattagagcatgcgctccatttgaaattagacagccatgcgaatttatcaaaagcgctccaaatcttaaaagaaacttatcatatcgctatgcctttagtaactttgagtgaacaaggcatcgcttttttagaaaaaggcgagttagtcaattgccccactatcgctaaagaagtttatgatgtaactggggcaggcgatacggtgatcgcgtctttaacgctctctttattagaatcaatgagcctaaaagatgcttgcgagtttgccaatgcggcggcggctgtggtggtgggtaaaatggggagcgcgttagcgagtttagaagaaatcgctttgattttgaaccaaacgcaccctaaaatcctttctttagaaaagctgttagaaactttagatcagcaaaaaatcattttcaccaatggctgttttgacctcctccataaagggcatgcgagctatttgcaaaaggctaaagctttaggggatattctcattgtggggttaaatagcgacgcttccatcaaaaggcttaagggggataaacgccccatagtgagcgaaaaagacagagcgtttcttttagcgagtttgtcttgcgtggattatgtcgtggtgtttgaagaagacacgccaatcaaattaattcaagccctaaagcctgatattttagtcaagggagcggattatcttaataaagaagtcatagggagcgagtttgctaaagaaacccatttgatggagtttgaagaaggttattccacaagtgctatcatagaaaaaattaaaaggacatgcaatgattga

SEQ ID NO: 22637 - DNA, 741 bp, Helicobacter pylori
atgcaaatgatgcacaatttgagttttttgggcatgtttttagccgctttgagcatgtctttagggcattgtgtgggcatgtgtggggggattgtgagcgcgttcagtcaaataagattttctaaagttacaagcttttcttaccagctcacttgccatgccctttataatgtagggaggatcagcacttacatgcttttaggggctatagcggcaagtttggggcatagtcttagcgtgagcatgggttttaggggtgttttattcattagcatggggattattttgatctgtttagcgttgctaggggcaagaatggaaaaattaagctttcaaatcccttttatttcttttttgatgaaaaaaaccttgcaatctcaaaacattctagggctgtatttcttaggcgtgttgaacgggtttttaccttgcatgatggtgtattcgtttttagcgagcgtgattctcagtcatagcgcgtttatgggagcgatgctaggcctttcttttgggcttggcaccagcatgccgttgtttttaatggggatttttttaagcaaaatttccgtttcttacaggaaatttttcaatcttttgtctaaaattttaatgggggtttttgggctttatatcctttatatggggatcatgctcattaaccacaaaatgcctcatgccatgcatcatcaaaacaacaccactcagcatgatcataaaggagtgcattcgcatgaacactaa

SEQ ID NO: 22638 - DNA, 1629 bp, Helicobacter pylori
atgaataaaccatttttaatcttactcatagccctaattgtctttagcggctgtaacatgagaaaatatttcaaacccgctaaacaccaaattaaaggcgaagcgtatttccctaaccatttgcaagaaagtatcgtttcgtctaatcgttatggagccattttgaaaaatggagcggttataggcgataaaggtttaacgcagctaagaatcggtaagaacttcaattacgaaagcagttttttaaatgagagtcaagggttttttattcttgcgcaagattgtttgaacaagattgataaaaaaacaaacaaaagcaaggtggctaagactgaagaaacggaattgaaattaaagggcgttgaagcggaagtccaagataaagtctgtcatcaagtggaattgattagcaataaccctaacgccagccaacaatctatcgttattcctttggagacttttgccttgagcgcaagcgttaaagggaatcttttagcggtggtgttagcggacaattcagcgaacttatacgacatcacttctcaaaaattgctttttagtgagaaaggttccccaagcaccacgatcaattctttaatggcgatgcctatttttatggatacggtcgtggtgttccccatgctagatgggcgcttgttggtcgtggattatgtgcacggaaaccctacgcctattagaaacattgttatcagcagcgataagttttttaacaatatcacctaccttatcgtagatggcaataacatgatcgcttctacagggaaaaggatactctcagtagtgagcggtcaagagttcaactatgatggggatattgtggatttgctttatgataaggggactttatatgtgctcacgctagacgggcagattttgcaaatggataagagtttgagggaattaaacagcgtgaaactgccttcgtcgctcaacacgattgtattaaaccataataaattgtattctttagaaaaacgagggtatgtgatagaggtggatttaaatgattttgattcgtataatgtctataaaacgccaactataggcagttttaagtttttttcatctaatcgtttggataaaggggtgttttatgataaaaatcgggtgtattacgatcgctactatttagattataacgattttaaaccaaaactttatcccgttgtggaaaaatcggcatctaaaaaatctcaaaaaggcgaaaaagggaacgctcctatttatttgcaagaaaggcataaagctaaagaaaataaacagcctttagaagaaaacaaagttaaaccaagaaatagcgggtttgaagaagaagaggttaaaaccagaaggcctgagcctattagggatcaaaataacgccacccaacaaggcgaaacaaaaaacaatgaaagtaaaaacgctcctgtcttaaaagaaaacgccgctaaaaaagaagtgccaaaaccaaattctaaagaagaaaaacgccgcttgaaagaagaaaagaaaaaagccaaagccgaacaaagagcgagagaatttgaacaaagagcgagagagcatcaagaaagagatgaaaaagagcttgaagaaagaagaaaagctttagaaatgaataagaagtag

SEQ ID NO: 22639 - DNA, 1083 bp, Helicobacter pylori
atgcccacgattttagtgagcgctttagaagcgagctctaatgcgcatttagaggaattacgccaaaatttgcctgaagattatcgttttattggcgtgtttgaaggcaaagaggtgctctatagccctagggaattttctatcatgggttttagagatgtgataggccgtttagggtttttactcaaagcccataaagaaatggtccaattagccaaacaagcggatatggtgcttttaatggattcttcttctttcaatatccccctagccaaaaaaatcaaaaaacaagatccgcataaaaaaatcatgtattatattttaccgcaagtttgggcatggaaaaaatggcgcgctaaaagccttgaaaaatactgcgattttttgggagcgattttgccttttgaagtgggctattaccaaaaaaaagcccaatatgtaggacaccctttattagatgagattaaacactataaaaaagatattaagggcgaaactctggtgtttatgccaggaagtaggaaaagcgaaatcgctaaaatgttccctttgtttgtcaaagcggctcaaatgttagaacaaaacgaagggtttaaaaggcgtgtgctggtcgtgccgagtttctttaaggggttggatttgaaagccctttatggagaagacattcaattatttgaaatttcttatgatgcacataagagtttgtttgaagcggagtttgcgttcatttgcagcggcacagcgactttagaggccgctttgattggcacgccttttgtgttagcgtatagggctaaaacgatggattttttgatcgctagaatgttggtcaatttgcattatataggtttagcaaacatcttttataacgccctaaataatgaaactccagggcttggggagagccaattgcacccggaattgatccagcattttttgagcgtagagggtttgttaaaagcgtataaagaaatggacagagaacgctattttaaagaaagtttgagattaagggaatatttaaaacatgggagcgcgagaaaaatcgctaatgaaatggcttttttgctgaatttaacttaa

SEQ ID NO: 22640 - DNA, 1518 bp, Helicobacter pylori
atggttaataaagatgtgaaacaaaccactgcttttggcgctcccgtttgggatgacaacaatgtgattacggccggccctagaggtcctgttttattacaaagcacttggtttttggaaaagttagcggcgtttgacagagaaagaatccctgaaagggtggtgcatgctaaaggaagcggagcttatggcactttcactgtgactaaagacatcactaaatacactaaagcgaaaattttctctaaagtgggcaaaaaaaccgaatgcttcttcagattttctactgtggctggtgaaagaggcagtgcggatgcggtgagagaccctagaggttttgcgatgaagtattacactgaagaaggtaactgggatttagtggggaacaacacgcctgttttctttatccgtgatgcgatcaaattccctgatttcatccacactcaaaaacgagatcctcaaaccaatttgcctaaccatgacatggtatgggatttttggagtaatgttcctgaaagcttataccaagtaacatgggttatgagcgataggggtattcctaaatctttccgccacatggatggttttggcagccacactttcagtcttatcaacgcgaaaggcgaacgcttttgggtgaaattccactttcacaccatgcaaggcgttaagcatttgactaacgaagaagccgcagaagttaggaagtatgatccggattccaatcaaagggatttattcaatgcgatcgctagaggggatttcccaaaatggaaattaagcattcaagtgatgccagaagaagatgctaagaagtatcgattccatccgtttgatgtaactaaaatttggtatctccaagattatccattgatggaagtgggcattgtggagttgaataaaaatcctgaaaactatttcgcagaagtggaacaagcggcattcagtccggctaatgtcgttcctggaattggctatagccctgataggatgttacaagggcgcttgttctcttatggagacacacaccgctaccgcttaggcgttaattatcctcaaataccggttaataaaccaagatgcccattccactcttctagcagagatggttacatgcaaaacggatactacggctctttacaaaactatacgcctagctcattgcctggctataaagaagataagagcgcgagagatcctaagttcaacttagctcatattgagaaagagtttgaagtgtggaattgggattacagagctgatgatagcgattactacacccaaccaggtgattactaccgctcattgccagctgatgaaaaagaaaggttgcatgacactattggagagtctttagctcatgttacccataaggaaattgtggataaacaattggagcatttcaagaaagctgaccccaaatacgctgagggagttaaaaaagctcttgaaaaacaccaaaaaatgatgaaagacatgcatggaaaagacatgcaccacacaaaaaagaaaaagtaa

SEQ ID NO: 22641 - DNA, 1386 bp, Helicobacter pylori
atgatggctaatattctaggggctggggtgtatagcgatattttctttgtggctttcaaattgcctaatttattcaggcgtatttttgcggagggctctttttcacaaagctttttaccgagcttcatacgaagttctattaaagggagctttgcgagtttggtagggcttattttttgtatcgttttattcatgtggtgcttattggtggcgttaaatcccttatggctagctaaactcctagcttacggctttgatgaagaaacgctcaaattatgcgcccctattgtagcgatcaatttttggtatcttttattggtgtttatcaccacctttttaggcgcgcttttacaatacaaacacagcttttttgccagcgcttatagcgcaagcttactcaatgtatgcatgattttagcccttttgatttctaaagaaaaaacgcatttagaagcgttgtattatttgagctatggcgtgcttttagggggcgtggctcaaattttattgcatttttatcctttagtaaaattgggcttattgaatttattatggaaaggatttttgagctttaagaccaaaaacgccgccaaaaagaaataccgctctaaaagaattaaaagggatttgaaagggttttttaagcaattcctccccagcgtcttaggcaattctagcgctcagatcgcttcttttttagacaccacaatcgcctcttttctagcgagcgggagcgtgtcttatttgtattacgctaatagagtcttccagctccctttagctttatttgccatagccatatccacagcccttttccctagcattgcgatcgcgcttaaaaacaaccagcaggatctaatcttacagcgcttgcaaaaggcgtggttttttttggtgggggttttgcttctttgcagcattggggggataatgttaagcaaagaaatcaccgagcttttatttgaaagggggcaatttagccctaaagacactttaatcacttcgcaagtcttttcgctctatcttttaggcttgctcccttttgggctaactaaactcttttctttgtggctttatgcgaaattagagcaaaaaaaagcggctaaaatctctttaatttcgctttttttaggtttagcggcttctttgagtttaatgcctttgttaggggttttgggtttagcgttagcgaatagtttgagcgggttatttttatttgttttaacgataaaagcgtttggctttcaattattcttgggtataatcaagaatttaaaatcatggcttgtaatccttttcctcgcttgcgtggaaatcttattactcttagcgttcaaatcgtgggttacacatttatatttattttattattttcaaggtttttaa

SEQ ID NO: 22642 - DNA, 1398 bp, Helicobacter pylori
atgtttatttatgataccaaattaaaacaaaaagtcccttttgagcctttagtccaaaataaggcgaatatttatgtgtgcgggcctacggtgtatgatgacgctcatttagggcatgccaggagcgcgattgcttttgatttgttaaggcgcacgcttgaattgagcggctatgaagtgatgctagtaaggaatttcacagatattgacgataagatcatcaacaaagccctaaaagaaaacaaaagcattcaagaattaagcagcatttatattgaatcttacacgagggatttgaacgctttgaacgtgaaaaaacccagcctagagcctaaagcgagcgagtatttagacgctatggtgggcatgattgaaacgcttttagaaaaaaatatcgcttatcaggtctctaatggggatatttatttagacacgagcaaggataaagattacggctctttgagcgtgcataatagcagcattgaatttggccgtattggtttggtgcaagaaaaacggcttgagcaggattttgtgttatggaaaagctataagggggataatgatgtgggctttgatagccctttaggcaaagggcgccctggctggcatatagaatgctctagcatggtttttgaaactttagcgctcactaacaccccctatcaaattgatatccatgcaggcggagcggatttgttattcccccaccatgaaaatgaagcgtgccaaacccgttgcgcctttggcgtggagcttgccaaatattggatgcataacggctttgtgaatatcaataacgaaaaaatgtctaaaagtttggggaatagcttttttgttaaagacgctctcaaaaactatgatggcgaaattttgcgcaattacttactaggggtgcattatcgctctgttttgaatttcaatgaagaagacttgttagtgagtaaaaaacgcttggataaaatctatcgtttaaaacagcgcgttttagggactcttggaggaataaatccaaactttaaaaaagaaattttagagtgcatgcaagatgatttaaacgtttctaaagcgttgagcgttttagaaagcatgctttcttccactaatgaaaaattggatcaaaaccctaaaaacaaggctttaaagggcgaaattttagcgaatttgaaattcatagaagaactgcttggcatcgggtttaaagaccctagcgcctatttccaattaggcgtgagtgaaagcgaaaaacaagaaattgaaaacaagatagaagaaagaaaacgcgccaaagagcgaaaagattttttaaaagccgatagcatcagagaagagcttttgaaacaaaaaatcgctttgatggacaccccacaaggcacgatctgggagaagtttttttaa

SEQ ID NO: 22643 - DNA, 768 bp, Helicobacter pylori
atggttttagaagttaaaaacctgtcctttaaatattctcaaaaactcattttggataaattgagttttagcgtgccaaaaaacagcattaccagcattttagcgcctaatggctccggtaaaaccacgcttttaaaatgccttttagggcttttaaagcctttagaagaaaccgaaattaaagcgtgtaacaaagatattttacccttaaagccttatgaaaaagccaaactaatcgcttatatcccccaagtggaatattatgcgttcaatttcagcgtgctagattttgtcttaatggggaaagcgacgcatttgaatttgttcgctatgcctaaagctaagcacattaaagaagcgactagcgttttagagcgcttggatttagagtccttaaaagatcaaggcattaatgatttgtccggcggtcaaaggcaaatggtgcttttagccagaagtttgttgcaaagaacgcccttattgttactggatgagcctacgagcgctttagatttaaaaaaccaagcccttttttttgatgcgattaaagatgagatgaaaaaacgagaattgagcgttttagtcaatatccatgatccgaatttggttgccaggcactccacgcatgtggtcatgctcaaagataaaaaactttttttgcaagcttccacgccaatcgctatgacttcacacaatttaagcgcgctctatgacacgcctttagaagcgatctggcatgataacaagcttgtggtgtatgcgttgtag

SEQ ID NO: 22644 - DNA, 981 bp, Helicobacter pylori
atgcttaaaacctatcatatcgccttagcttgcgtgattttagcggtggtggtgctgttgtttggaggggagtccttgagcttggaagaatggcaagaagtgtgccttaatgtgaaaaaccactttttgcacaatgaagaactgagctctttaagtattattattttagaaatacgactaccacgagtgattttagcgctcctggtgggagcgagtttgtctgggagtggggtggtgatgcaaacgatttttagaaaccccttagtggatccctttttactagggatttctagcggggcgatgctaggcgtggcgatggcgatagcggtagtggagtctaacattgcgattttggcgttttttggggcgattttagctagccttgctgttttggcgatgaatagggttttgggtaattccgtcctttcgttggtgctttcaggggtggtgttgagcgcgtttttaagcgccttagccggagcgataaaattctttgtgatcccccaaaaagcgcaagcgattgtcgtgtggcttttagggagcttgtcgttgagcagttataaggattgcttgatcgctttcatagggctatctttaggctttatcccgctttttttgttaaggtggcgcatcaatttattgagcttgagcgatgcgcaaagtttgagcttggggattaacccggtgctgttgcgatcgctttgtttggtgtgcgtgagcgttgcgagcgctttagcggtgagcgtgtccggcacgattggctggattgggttagtcattccgcatgtggctaggttgttttttggggcgaatttgcaaaaactgcttttaagttctttgttaatgggagcgtttttcttgcttctagcggatgtggtggctaaaaccattaccccctatgatttaccggtaggcattgcgacaagcgttttaggagcgcctttcttcttgtggcttttgtttagaactaggggggtgtga

SEQ ID NO: 22645 - DNA, 525 bp, Helicobacter pylori
atgcctcaaatacaatcatcgcattccaatcattttgatttcactatagacacggcggatcgcactaaattattgatgagctatttagtcgtgcctacaacggctaatttcaacaatgtcatgcatgggggggaattattgaatttattggataaagtggcttatgtgtgttcgactcgttattgcgctaaaggaacggtcactttaagcgtggatggggttacttttaaataccccattcctgtagggaatttgctcacttttttagccagcatcaattatgtgggcaacacctcgtgcgaagtggggattaaggttttgagcgaagacattaaaactcgtgaaatcacgcacacgaactcatgttatttcaccatggtggctgtagaaaatggcaaacccacccccatgcctaaatacgagcctaaaacagaggttgaaatccgccgttatgaaggggctttaaagcgcaaggaaatgcgcacacgagggtatttaaaaagcgggaaacacgagggtgtttaa

SEQ ID NO: 22646 - DNA, 1113 bp, Helicobacter pylori
atgagcgttgatcacctcatttcgccctttagagacaagcgaacccttttagcgctctctaatgcaatcaaaaaactcgctttcaaacttgaaaaaaaattagtcatcatggaagtgtgcggagggcatacgcattctatcatgaaatacgggcttttagatttgatgcctaacaatttagagtttgtgcatgggccgggctgcccggtatgcgtgatgccaagagcgcgccttgatgaagcttatgaactcgctactatcaaagatagcattgttttgagtttaggggatatgatgagagtccccgggagctatgggagtttgatacaagccagagaaaaggggttggatgcacgctttttgtattcgcccatgcaagctttagagatcgctaaagaaaaccctactaaaaaagtcatttatattgcgatcggttttgaaaccacaacgcccatgagcgctagcgttttatggagcgccaaaaaagaaaaaattaataacctttttttccacattaaccacattctagtgcctcccagcgtgagcgcgattttaaaagatccagcatgccagattaacgcccttttagcccctagccatgtgagcgtgatcagcggcgctcaaatctatgctcctttagtggatcgctttaaaatccccattatcgtgagcggttttgagccggtggatatattagaaagcgtgctgatgcttatcaaacaagccctaaacaaagaagccaagctagaaatccaatacaaaagagcggtgagttttgaggggaatgtgaaagcgcaagagttagtcaatgcttgcatggaagttagggaaaattttgaatggagaggtttggggaatatcaaacgatccgctctcaaactcaaagaagcgttcgcttcttatgacgctgaagaagtctttaaagaatatttaagccacaaaacctctaaagaaaacaaagcatgcaagtgcggggagattttaaaaggcatcgctaagcccctagactgctcgttattcgctacaacttgcaccccacaaaacccgatcggcagttgcatggtcagctctgagggggcgtgcgcggcgtattatcgttacaagcgcgtttga

SEQ ID NO: 22647 - DNA, 906 bp, Helicobacter pylori
atggctattgatttagcagaagttacaggagctaaagccgcgcaagaaaggaaaaaagagcagcccaccatcgctaacgggttggataaaaacgctttcatgaaactctttttagagcaattgaagaatcaagaccccaccgctcctatggaaacggataaaatcatcacccaaaccgcgcagctcacgcaagtggaaatgcaagaagaaaacaaaaaaaccatgcaagaagtcgccagtgcgatgaaatccaataaagaaactaacgaatctttaaaagactttcaaggcgctttaaaagacaccatggaaaaccttaataaaggcatggacgatagcttgaaagccaataacgctttaagggaagtaacggcgcttaattcggtgagcatgataggcaaaatcgctgaaaccgatgtgagcggagcgaattttgacggcaacaacaagctttctttttcgctcttttttgatgaaaaaattgacgcttctaaaggagtgccagcgattcaaatcctgaatgaaaacaatgaattagtcaaaacgattcctttaaaagattataacgggcaaaaggggtatatcaattttgaatgggacggcacaaacgaaaagggcgaaaaagtccctaaaggcaattataaaatcaaggctgaatacaatttagactcccacagcaagcagtatttgcaaacgcgcattggtaggggcgaagtggaaagcgtgatttttgataaaggcaagcccatgctgagaatgggcgaaatggttttacccatagacagcgcgatagagttttatcaaccggatcaaaaaccgcttgaacagaaactctctgatcaaaaaccgattgatcaaaagccccttgatcaaaagccccaaaccccccctaaagagacagcatga

SEQ ID NO: 22648 - DNA, 1590 bp, Helicobacter pylori
atgaaacaaaatttaaagccattcaaaatgattaaggaaaatttaatgacacaatctcaaaaagtaagattcttagcccctttaagcctagcgttaagcttgagcttcaatccagtgggcgctgaagaagatgggggctttatgacctttgggtatgaattaggtcaggtggtccaacaagtgaaaaacccgggtaaaatcaaagccgaagaattagccggcttgttaaactctaatacgacaaacaacaccaataccaatattgcaggcacaggaggcaatgtcgccgggactttgggcaacctctttatgaaccaactaggcaatttgattgatttgtatcccattttgaacactaaaaatatccatcaatgtggtactactaataatggtagtagtagtgcgaccactgcagccgctactactaacaatggcctttgtttccaaggtaacctggatctttataacgaaatggttggctctatcaaaactttgagtcaaaacatcagcaagaacatctttcaaggcaacaacaacaccacgagccaaaacctctccaaccagctcagtgagcttaacaccgctagcgtttatttgacttacatgaactccttcttaaacgctaacaaccaagcgggtgggatttttcaaaacaacactaatcaagcttatggaaatggtgttaccgctcaacaaatcgcttatatcctaaagcaagcttcaatcactatggggccaagcggtgatagcggggctgccgcagcgtttttggacgccgctttagcgcaacatgttttcaactccgctaacgccgggaacgatttgagcgctaaggaattcactagcttggtgcaaaacatcgtcaataattctcaaaacgctttaacgctagccaacaacgctaacatcagcaattcaaccggctatcaagtgagctatggcgggcatattgatcaagcgcgctctacccaactgttaaacaacaccacaaacactttggctaaagttaccgctctaaacaacgagcttaaagctaacccatggcttgggaatttcgctgccggtaacagctctcaagtgaatgcgtttaacgggtttatcactaaaatcggttataagcaattctttggggaaaacaagaatgtgggcttacgctactacggcttcttcagctataatggcgcgggcgtgggtaatggccccacttacaatcaagtcaatctgctcacttatggggtggggactgatgtgctttacaatgtgtttagccgctcttttggtagccgaagtcttaatgcgggcttctttggggggatccaactcgcaggggatacttacatcagcacgctaagaaacagccctcaacttgcgaatagacccacagcgacgaaattccaattcttgtttgatgtggggttacgcatgaactttggtatcttgaaaaaagacttgaaaagccataaccagcattctatagaaatcggtgtgcaaatccctacgatttacaacacttattataaagctggcggcgctgaagtgaaatacttccgcccttatagcgtgtattgggtctatggctacgccttctaa

SEQ ID NO: 22649 - DNA, 3258 bp, Helicobacter pylori
atgcctaaacgcaccgatatttccaacattctactgataggatcaggccctattgtgatcggacaagcttgcgaatttgactactcagggactcaaagttgtaaaaccttaaaatctttaggttatagagtgatcttaatcaattctaacccggccaccgtgatgactgaccctgaattttctcatcaaacttatatccaacccatcaccccagaaaatatcgccactatcattgaaaaagaaaagattgacgctattttacccacaatgggcgggcaaaccgctttgaatgcggtcatgcaaatgcaccaaaagggcatgttagaaggcgtggagcttttgggggctaagattgaagcgattaaaaaaggcgaagacaggcaggctttcaaagaagcgatgttaaaaatcgggatggatttgcctaaagggcgttatgcttacacggagttagaagccctagaagccattaatgaaattggctttccagccattatcagagcgagtttcactctggctgggggggggagtggggtcgcttacaatattgaagagtttcaagaattggctaaaaacgccctggacgcttcgcccattaatgaaattttgattgaagagtccttattggggtggaaggaatacgaaatggaagtcatacgagacagcaaggacaattgcatcattgtgtgctgcattgaaaatattgaccccatgggcgttcataccggcgatagcatcaccatcgctccaagcctaaccttaaccgataaagaataccaacgcatgcgcgatgcgagctttgcgattttgagagaaattggcgtggatacgggcgggagtaatgtgcaatttgcgatccaccccgagactttaagaatggtcgtgattgaaatgaacccacgggtgagccgcagctccgcattagcttcaaaagcgaccgggtttcccattgcaaaagtcgctaccatgcttgcggtgggttttagcttagatgaaatccaaaacgatattaccaacaccccggcgagttttgagcctagtttggattatatcgtggtgaaaatccctcgctttgcgtttgaaaagtttgccggtgtttctagcactttagggacttctatgaaaagcattggcgaagtgatggcgataggggggaatttcttagaagccttacaaaaagcgctatgctctttggaaaacaattggctagggtttgaatcgttaagcaaagatttagaagcgatcaaaaaggaaatccgccggcccaatcccaaacgcttgctttatatcgctgatgcgttcaggctcggcgtttgtgttgatgaagtgtttgaattgtgccagattgacaggtggtttttatctcaaatccaaaagctagtagaagtggaagaaagcatcaattctagcgttttaacagacgctaaaaaattaagagggcttaaaaatttaggctttagcgatgctaggattgccgctaaaatcaaagaaaatgaaaatttagaggtcagcccttttgaagtggaattagctagatctaatttacaaatcgtgcccaattttgaagaagtggacacttgcgcggcggagtttttatcgctcacgccttatttgtattccacctatgcccccaatcctttgccccctattgaaaacaaacaagaaaagaaagaaaagaaaatcctaatcataggctctgggcctaatcgcatcggtcaaggcattgaatttgattattgttgcgtgcatgcgagccttgctttaaaagatttaaacattaaaagcgtcatgttcaattgcaatccagaaactgttagcacggattatgataccagcgacacgctctattttgaacccattcattttgagtgcgtgaaaagcatcatccaaagggagcgagtggatggcattatcgtgcattttgggggacaaacccctttaaaactcgctaaagatttggctaaaatgcaagcccccattattggcacgccttttaaagtgattgatattgcagaagacagggaaaaattttccctctttttaaaagagcttgacatcaagcagcccaaaaacggcatggctaagagcgttgatgaagcttatagcatcgctaatgtgattggtttccctatcattgtgcgccctagttatgtgctaggcggccaacacatgcaaattttagaaaacattgaggaattgcgccattatttggaaagcgttacgcatgctttagagattagtcctaaaaacccgcttctcattgataagtttttagaaaaagcggtggaattagatgtggatgctatttgcgataaaaaagaggtttatattgccggcattttacagcacattgaagaagccggaatccattcaggcgattcggcgtgctttatcccttccactctaagccctgaaattttagatgaaattgagcgggtgagcgcaaaaatcgctctgcatttgggcgtagtagggctgttgaatatccaatttgctgtgcatcaaaattcgctgtatttgattgaagtcaatcccagagccagccgaaccgtgccttttttaagcaaggctttaggcgttcctttagccaaagtggcgactagggttatggtgctagaagacttgaaagaagccttgaagttttatgataaaaaaaatatcgttggatattctaaaggcgtttataagcctaaaatgccccattttgtggctttaaaagaagcggttttcccttttaataaactttatggatcggatttgattttagggcctgagatgaaaagcaccggcgaagtgatggggattgctagatctttagggcttgcatttttcaaggctcaaacggcttgctttaaccccattaaaaacaaggggcttatttttgtttctattaaagataaggataaagaagaagcatgcgttttaatgaagcgattggttcagttgggctttgaattgtgcgccacagaaggcacgcataaagctttggaaaaagccggggtaaagtctttaaaggtgcttaaaatctctgaaggccgccccaatatcatggatttgatgatgaatggggaaatcagcatggctatcaacaccagcgatcacaaatctcaagatgacgctaaactcatccgcgcttctgtgcttaaaaaccatgtgagttatttcacgactttaagcacgatagaagtcttacttttagcgttagaagaaagctctaaagaagacgagttgttagccttacaagattatttgaagtaa

SEQ ID NO: 22650 - DNA, 7590 bp, Helicobacter pylori
atggcgtttaaaaaggccaggttgatttccaagtttatttcaaagggatctttcaaattgaataagatctcaaagaaaattttcacattgaatcaaatcttaaaatgtgaaaagcccttaaaacgccataaaaaagctttaaaacctattaaaaagctctctaatcgcaacaaatcttttttaaaagcttcggttttattgataggagcgttaggggggttatcccacctaagggctaacgaatgccgttattggtcatggtcgtcttggagttaccaagataatattgaaagcggtcctaattcgcccacgcacaactcttattgcctttttagtagcactcaaggctctgggacttattatttaaacactcttaccacttatagcgctggtggggctagtttcacgcaaaaattcaataacggcacgcttaatgtgggagagaatatccgctttggaggcacaggtattaatgggggtgatgtcggctatatcacaggaacttatgacgctcaaacgattaattttaattctagccatttaacaaccggaaactcatacgctgatggtggtggggccacgctcaattttaatgcggccaataatatcactatcaatcaagcgagttttgacaatagccatgcagggacgcaaaaatcttacatgaattttaaaggctctaatatcaaggtcagtggctctagttttacagatgatactgatgggggctttagtttcagcggtaatagtaataacagcaccatctcctttaatcaaacgagcttcaatcaagggacttatcactttagtaatagcgccactttaagcttcaatcatagcgctttcaatcaagggacttataactttaatagcactcaatctgcttttaataacagcgctttcaatcaagggacttatcatttcaatggcaacgccagctttgataacgacaccttcaatcaaggcacttatagctttaataccagcaaggtgagtttctcaggcatcaacactttaaattcaagttcgccttttgctagccttaaaggcagtgtgtcttttggttctgatgcgatttttaacctcaatcaaacccttaataatcaaacctatgatattctcactacaaacggggcgatccagtatggggtttatcaaagctatttgtgggatctaatcaactataagggcgataaagccattagccatgttgaagtgggcaataacacttatgatgtaacctttgatattaacgggcaagatgaaaccttacaagaaacctttaacaaacaatccattattacccaatttttaggagatgatttacaacaacaagcccaaaaaacctaccaacaagacttgagcaactcccaaagcgctttaaataacgctgctagtgataataagatcgcaaatagcgatacagactacaccaagaataaaaacgccactatcaaaaaagacgctcaaggtttagaaaacaccaaccaacaaatcgctcaagatgaacaagcgttacaaggagatttagacaagctcaaacaattagccaactccccaacaggctttagtgaacaagctttcaatcaagctcaaaaacaagaacaacaagatgaacaaaccttacaaaacgaagaaaagacttttaatagcgagcaagagggattgaaacaagcgatacaacaagcacaagcccaacaacaaaaacaacaacaaaaacaagaacaacaacaagcccaacaaacctatcaagaggatctcactcattcccaaagcgctttgaatgatgtggctagcgacaacacgatcgcaagcaatgatacaaactacaccaacaatcaaaacaccgctatcaaagaagacgctcaaggtttagaaaacaccaaccaacaaatcgctcaagatgaacaagcgttacaaggagatttagacaagctcaaacaattagccaactccccaacaggctttagtgaacaagctttcaatcaagctcaaaaacaagaacaacaagatgaacaaaccttacaaaacgaagaaaagacttttaatagcgagcaagagagattgaagcaagcgatagctaacgctaagcctacaagccccacaccaagccatgcacccactcctacaaaacacaccgcgccaaacactcctcctaataaagttccacccacaccccctactcaaaatccacctgcagaaagcgtgtggagtggggtttattggcttcaaaacaaaacctactcaaacaaaggcatttattatattgatcccaatctttcaggacagagcggtcaaagcggcaacacgctcagcacttatacagctaatttgtttggaagaagttttagcgttaatatccaaaatggcactttgatcatagggaataatacagagagcgtgaatagtaatgggttgatttggatagggcatggaggttttggctatattacgggaacttttagtgcggctaacatttacttgaccaataattttaaaaccggtgaaggcgtttcaaattcagatggtgggggagcgaacattacctttaaagcaagcgataatatcactatggatggcttgaattataatgacgctgaaaccgttactaaaatgattcaaacaggggctagccagcattcctatgccacttttgacgctctaaataatatcagcgtgactaattccagttttagcgatatgacttggggaaaattcagttttagcgctaagaatatttcgttttctaacgcttcgttcagcggctttacaaaccctggaggatcaagcgttattagcgctaacgctactaattctttaagctttatcaattctcgtttgaatgggggagcggtttataatttgcaggctaatagccttattttcaataacacgcaagcggtttttaatgtcttgtattctagggggacaagcaattttaacgccaccacacagcttttaggcaacacgaattttacgctcagttctcaaagtttgttgaattttaatggcgatacaaccttgcaaaacaacgccaatatcacgcttggcaataaaagtcaagccgcttttaaaaattctttaacgcttgataataattctaatttgagtttagacaatcaaagcgttttgaatgcgaataacacaagcgcttttaacaatcaagcgagtctcaatatttataacgggagtcaagcgacctttaatagcctcttttttaatggcgggacactcagtcttaacgctagtagcaagctcaacgcttctaacgctagtttttcaaacaacaccactatcaatttagacgatagcgttttatcggctagtaacacaagctctttaaacgctaatatcaattttcaaggcgcaagccaggctgattttggaggcaacacgattattgatacagcgagctttaattttgacagcgcaagttcattgaattttaacaaccttacggctaatggagcgttaaattttaatggttatacgccctctttgactaaggctttaatgagcgttagcgggcagtttgttttagggaataatggggatattaatttatctgacatcaatatttttgataacatcacaaaatctgtaacctacaacatcctaaacgctcaaaaagggattactggcatcagtggggctaatggctatgaaaaaatccttttttatggcatgaaaatccaaaacgctacctatagcgacaacaataacatccaaacttggtcgtttataaaccctctcaattcttctcaaatcattcaagagagcattaaaaatggggatttaaccatagaagttttaaataaccccaactcggcttccaacactattttcaatatcgctcctgagctttataattaccaagcttctaagcaaaatcctaccggctatagctatgattatagcgacaatcaagcaggcacttattacttgacaagcaacattaaaggtcttttcacccctaaaggctctcaaactcctcaagccccaggcacttatagcccgtttaaccagcctttgagtagtttgaatatctacaataagggtttttctagcgagaatttaaaaacgcttttagggatcctttctcaaaattccgctaccttaaaagaaatgattgaatccaaccaactagacaatatcactaacattaatgaagtgttgcaactcttagacaagattaaaatcacccaagtgcaaaagcaagcactcctagaaacgatcaaccatttgactgacaacatcaatcaaacctttaataatgggaatctaattataggcgctactcaagataatgttacaaactctactagctctatatggtttgggggcaatggctatagcagtccttgcacgctagatagcgccacttgttcttcttttagaaacacttacttagggcaattattaggctcaacttccccctatttaggctacattaacgctgattttaaagctaaaagcatttatattaccggaacaattggaagtggtaacgcctttgaaagcggagggagcgcggatgtaacctttcaaagcgctaataacttagtgttgaataaagccaacatagaagctcaagctacagacaatatctttaatcttttgggccaaaaagggattgagaaaatctttaatcaagggaatttagcgaatgttctcagtcaagtggctatggaaaaaatcaagcaagccggcggtttaggaaactttatagaaaacgctctaagccctttgagtaaggaattgcccgctagcttgcaaaatgaaaccttaggccaacttataggtcaaaataacttagatgatttattgaataatagcggggtcatgaatgcaatccaaaatattatcagtaaaaaactaagcatttttggtaattttgttaccccatccatcatagaaaactaccttgctaagcagtctttaaaaagcatgctagacgataaagggcttttgaattttatcggtgggtatatgaacgcttctgaattaagttctattttaagcgtggttttaaaagatattactaatccccctacaagcttgcaaaaagacatcggtgtggtagcgaacgacttgttgaacgagtttttaggacaagatgttatcaaaaagctagaaagtcaaggcttagtgagtaatatcattaataatatcatttctcaaggcgggttaagcggcgtttataatcaaggtttagggagcgtgttgccgccctctttacaaaacgcgctcaaagaaaacgatttaggcactcttttatcgcctagaggcttgcatgatttttggcaaaaagggtattttaactttttaagcaatggctatgtttttgtcaataacagctcttttagcaacgctacaggaggcagtttgaattttgtcgccaacaagtctattatttttaatggcgataatacgattgactttagcaagtatcagggcgcattgatttttgcttctaatgatgtttctaatatcaatatcaccaccctaaacgctactaatggcttaagccttaatgcgggtttgaataacgtgagcgttcaaaaaggggaaatttgtgtcaatttagccaattgccccacaaccaaaaacagctcttctacaaactctagcgtaacccccactaatgaatctttaagcgtgcgcgctaacaacttcactttcttaggcgcaatcgcttctaatggggctattgatttgtctcaagtgaaaaataatagcgttatagacacgctcaatcttaatgaaaatgcggccttgcaagccaataatttaacgatcactaacgcttttaacaacgcctctaactctacagctaacattaatggtaatttcaccttaaaccaacaagcgaccttaagcactaacgctagtggcttgaatgtcatggggaattttaatagctatggcgatttggtgtttaacctcagccattcagttagccatgccattatcaacgctcaaggcagtgcgacaatcatggctaataacaataaccccttaatccaattcaacacttcttcaaaagaagttggcacttacacgcttattgatagcgctaaagccatttattacgggtataacaaccaaatcacaggaggcagtagcctagataattaccttaagctttacactcttattgatattaatggcaagcacatggtgatgactgacaacggcttaacctataacgggcaagccgtgagtgttaaagatggcggtttagttgtgggctttaaagactctcaaaatcaatatatttacacttccattctttataataaagtgaaaatcgctgtttctaatgatcctatcaataacctacaagcccccactttaaaacaatacatcgctcaaattcagggcactcaaggcgtggatagcattgatcaagctggaggcagccaagcgattaattggctcaataaaatctttgaaactaagggaagtcctttattcgctccctattatttagaaagccattccacaaaagatttaaccacgatcgctggagatattgctaacactttagaagtcatcgctaaccctaattttaaaaatgacgccaccaatattttacagatcaacacctacacgcagcaaatgagccgtttagccaagctctctgacacttcaacttttgctagcgctgattttcacgagcgattagaagcccttaaaaacaagcgattcgctgatgcgatccctaacgctatggatgtgattttaaaatactctcaaagaaacagagtcaaaaataatgtatgggcgacaggagttggaggggctagtttcattaatggaggcactgggactttatatggtatcaatgtagggtatgaccgatttattaagggcgtgattgtggggggttatgccgcttatgggtatagcgggtttcatgcaaacatcactcaatcaggctctagcaatgtcaatatgggtgtttatagccgagcgtttatcaaaagaagcgaattaacgatgagcttgaatgagacttggggatacaataagactttcatcaactcttatgaccccctactctcaatcatcaatcagtcttacaaatacgacacctggacgactgacgctaaaatcaattatggctatgatttcatgtttaaagataaaagcgttatttttaaacctcaaataggcttagcctattattacattggtttgtctggtttaaggggcattatggatgatcctatttacaatcagttcagagccaatgctgatcctaataaaaaatccgttctaacgattaattttgctctagaaagtcggcactacttcaataaaaactcttattattttgtgattgcggatgtgggcagagatttatttattaattctatgggggataaaatggtgcgttttattggtaataacaccctaagctatagagatggcggcagatacaacacttttgctagcattatcacaggcggggagataaggttattcaaaaccttttatgtgaatgcgggcattggggctaggtttgggcttgattataaagatattaatatcaccggaaatattggtatgcgctatgctttttaa

SEQ ID NO: 22651 - DNA, 582 bp, Helicobacter pylori
atgaatacttataaaaacagcttgaatcactttttaaatttagtggattgtttagaaaaaatccccaatgtgggtaaaaagtccgcctttaaaatggcgtatcatttgggtttagaaaacccctatctggcgctaaaaatcacgcacgctttagagaacgccctagaaaaccttaaaacatgttcatcttgtaacgcgctcagcgagagtgaggtttgtgagatttgctctgatgaaagccgacaaaattctcagctttgcatggttttacacccaagagatgtgtttattttagaagatttaaaggattttttagggcgctattatgtgttaaactccatagaagaagtggattttaacgccctagaaaaacgcctgattgaagaaaacattaaagaaatcatttttgctttccctcccactttagctaatgattctctaatgctttatattgaagacaaattacagcatttccacctcactttcactaaaatcgctcaaggcgtgcctactggagtgaattttgaaaacattgactcagtttcgctctcaagggcgtttaattcaaggatcaaagcatga

SEQ ID NO: 22652 - DNA, 912 bp, Helicobacter pylori
atgagtagccctaatttatccttttattataatgagtgcgagcgttttgaaagctttttaaaaaaccatcatttacaccttgaaagcttccacccttatttggaaaaagccttttttgaaatggtgcttaatggaggcaaaaggttccgccctaagctttttttagccgtgctttgcgcgttagtgggtcaaaaagattattctaaccaacaaacagaatattttaaaatcgctttaagcattgaatgcttgcacacttattcgctcatccatgacgatttgccatgcatggataacgccgctttaaggagaaaccaccccactttacacgctaaatacgatgaaaccacagccgttttaatcggcgatgcgctcaacacttactcttttgaattgctctcaaacgctttattagaaagccatatcattgtggaattaatcaaaatcttaagcgctaatggggggattaaaggcatgatcttagggcaggctttggattgctattttgaaaacacgcccttaaatttagaacaactcactttcttacacgagcataaaaccgctaaattgattagcgcaagtctgattatggggcttgttgcgagcggtattaaagatgaagagctttttaaatggcttcaggcttttgggttaaaaatgggtctttgctttcaagtgctagatgatattatagatgttacgcaagatgaagaagaaagcggtaaaaccactcatttagacagcgctaaaaacagctttgtgaatttattggggctagagagggcgaataattacgctcaaactttaaaaacagaggttttaaatgatttagatgcattgaaacccgcttatcctttattgcaagaaaatttaaacgcattattgaacactctatttaaaggcaagacatga

SEQ ID NO: 22653 - DNA, 1134 bp, Helicobacter pylori
atgttaaaaagggcgagttttgtagaagtggataccgcttctttaaggcataattttagcgcagtcaaaagcattgtccctaaagacgcttgtgtcatggcggttgtcaaggcgaacgcttatggggcaggagcgattaaagcgagcgaaattttcttacaagaaggggctaattatttaggggtagcgaccttagatgaagctttagagttgcgttctcatttttctaaaacccccattttgatcttaggctatagccctaatgctaacgcttccatgctggttgataacgatttgagcgctatgatttttagccttgaacaagcggaagttttttctcaaatggctttaaaatctcaaaaacgcttaaaagtgcacatcaaaattgataccggcatgcaccgcttgggtttagagcctaattttaaaagcatagaaaccattaaaaaaatccgcgctttaaaaggtttggaaatagaggggatatttacgcatttaagcaacgctgatgctaagattaaaacccatgctaaaaaccaaatgaaagcctttaacgcttttttagagcagcttttggatcaaaaaatagagttccaataccgccatgcttataattctgccggtatcctttctttgtgtaacgggaatgaaaatcgtttgttaaacctttatcgcccaggcatcatgctctatggtttttacccctctaatggaatgaaagaatcatgcccaaccatcttaaaaaatgttatcagtttgaaagcgcaaatcgttcaaatcagaagcgttaaaaaaggcgaatttattggctatggcgagcatttttataccaatgaagagactttagtgggtgttttagctctagggtatgcagacgggttaatgcgcgctttaggcaatcgcattcaagtagcgatcaataaccaattagcccccctgattggcaaggtgtgcatggatcaatgttttgtcaaactcaataatattcaagccaaagagggcgatgaggtcattttgtttggggataaaagcgctaaggctaatgacgcgagcgaaatcgrtgcgcttttaaacaccattgcttatgaaaccataagcaccctatccaaacgcttggagcgcgtrtatatttaa

SEQ ID NO: 22654 - DNA, 453 bp, Helicobacter pylori
atgcgttgcgtggtgtattctatcgctaaaagttcgcctttagagttagtgaaaatctatcaaaagcaatgcaggcaatttgattgcgagctggaattggtggatttattccctaaaaataccgccaacgctcaaaaagtttctaaaaaactggctcaaaaaagctactctctagcttttgagccgtatttaaaccctaaggcaaaaaatatcgccttacaccctaaagctcaaaggggcgatagctttgcgtttagtaaaatgttagaaaatcatcttaatattaatttttttatcgctggagcgtatgggtttgaagaaaattttttaaaggattgtcaagcttggagtttgagcgagatgacttttagccatgaagtggctaaaattgtcttatgcgagcaaatctatagggctttaagcattatttttaagcatccataccataaatag

SEQ ID NO: 22655 - DNA, 870 bp, Helicobacter pylori
atgggatttgcagatttctttaaaaattttaagatcaataaattgcggacagcgccaagtaaggaagaacagccaagccattgggtgaaatgccctaaatgttatgcgttaatgtatcataaagaagtgtttagtaaatacagcgtgtgtttgaaatgccattaccatttccgcatgaaagcggctgaaaggattgaatttttatgcgatgtggggagttttgaagagtttgacaagcatttacggcctaatgatcctttaaatttcgtggataaagagagctataaacaacgcattaaaaaatacgaaaaaaggactaaccgcccaagctcagtgatcagcggtgaggctaaaatcaaccgcatgcctttgcagatcgtggtgtttgattttagctttatgggggggagtttaggctctgtggagggcgaaaagatcgtaagagcaatcaatcgcgcggtcgctaaaagagaagcgttattgattgtttcagcgagtgggggggctaggatgcaagaatccacttattcgctcatgcaaatggctaaaacgagcgcggctttgaaccgattgagtgaggccaaactccctttcatttcgctcttaagcgatcccacttatgggggcgttagcgcatcttttgcttttttaggggatctcattatcgcagagccaggggcgatgataggctttgcggggcctagggtgattaagcaaactataggggcggatttgcctgagggctttcaaacagcggaatttttattagagcatggcttgattgatatgattgtgcacaggaaggatttgaagaagactttgagcgatctcatcgctatgatgacgcataagacttcaaagattttttaa

SEQ ID NO: 22656 - DNA, 912 bp, Helicobacter pylori
atgcaagatttttcaagtttattattaaaactacaagagtattggaagaatcaaggctgtttggtgatccagccttatgatattcctgcaggagctgggacattccatccggccacgcttttaaggagtttggataaaaagccgtggaatgtggcgtatgtcgcgccctctagaaggcctactgatgggcgctatggggaaaaccctaaccgcttggggagttattaccaattccaagtagtcatcaagcccagcccttctaatatccaggaactctatttaaaaagcttagaagtgttagggataaaccttaatgagcatgatatacgatttgtagaagacaattgggagagtccgactttaggggcatgggggcttggctgggaagtgtggcttgatggcatggaagttacgcaattcacttatttccagcaagtggggggcattgcttgtagccctattcctgtagagatcacttacggcttagaaagattagcgatgtatgtgcaaaaagtggaaaatatcctagagattgaatgggctaaaaaaaatcatgacagcgtgaattacgcacaagtgcatttggaaagcgaatacgaattcagcaagtatcattttgaaacagcgagcgtgaaacggctattagaaatgtttaaaaacgctcaagccgaagccttgcattgcttggaaaacaagctccccttgccggcttatgattttgtgatgttatgctcgcattttttcaatattttagacgccagaaaagcgatttcggtggctgaaaggcaaaattatattttacaaatcagggatttagccaaagggtgtgcgcttctttataaagaacaagaagaagagagggaagagcgtttaaaaaacgctttaacaaaggctgaaaatggcgttagttaa

SEQ ID NO: 22657 - DNA, 939 bp, Helicobacter pylori
atggaaattgcagtatttggtggcggggcgtgggggagggctttagcctttgcttttggagaaaagaatgaagtcaaaatcatttcaaggcgggatttaaacgagccgttaaaaaagctcaatgacgctttgatttctaaaggttctgcccccatagagcaagtggatttacaaagaggcttaaaagcaacgctctatgtcatcgctattagcgtgcagcatttaagggaatggtttcaaaacgcttctttacccaaaaacgctaaggttttaatcgcttctaaagggatagaggtgttaaataaggcgtttgtgagcgagatcgcaaaggattttatcgatcctaattctttgtgttttttagcgggcccaagttttgcggctgaaatcattcaaggcctgccttgcgcgctcgtcatccattccaataatcaggctttagcgctagaatttgccaataaaaccccctcttttatcagagcctacgcccaacaagacatcatagggggtgaaatcgccggggcgtataaaaacgtgatagccattgctgggggggtttgtgatggcttgaaattaggcaatagcgctaaagcgagtttattgtctagaggtttggtggaaatgcaacgctttggggcgttctttgggggcaagacagagacttttttagggctttctggggctggggatttgtttttaaccgctaattctattttatctaggaattatcgtgtgggtttagggctagcccaaaacaagcctttagaggtggttttagaagaattgggcgaagtggctgaaggggtgaaaacgaccaacgccattgtggaaatcgctagaaaatacggcatttatacgcccattgcgagcgaattagccttgcttttaaagggtaagagtgtgctagagagcatgaacgatttgatcagacgcgcttaa

SEQ ID NO: 22658 - DNA, 462 bp, Helicobacter pylori
atgattgaagaaaactacaaagaagagcgttacaccgaaagggtgaatcaaggcggtgtatggggaagctttaaaagaaaatttttgagttgggctgatgatgatgcgggctatgatgaagaaaaagattatgaaaatctcttaaataatgaaaagctccaaaaaaaattgcgggagtggaggagaacaaaaaatcaacaaaataacaacaaaactttcaatacgaatgatacgaattcatttgaaactattcagtcagttattgctgagcaattgaatgtggatgcggtgcaagttacgccagaggcggaatttgtgaaggatttgggtgcggactctgatgtcgtggaattaatcatggcactagaagaaaagtttggcattgagattcctgatgagcaagcggaaaaaatcgtcaatgtgggcgatgtaatgagatatattgagaaacaactaatttaa

SEQ ID NO: 22659 - DNA, 1080 bp, Helicobacter pylori
ttgaagcgggcgttattgtggcttatgttaatgggcgttttttcaatgggtgtttctttaaaagccaaagagtattcagaaattattttagaagaaaaaaacttgcaacccatggggttaaaggtggttaaattagataaagaaatctttagtaaagggcttccttttaacgcttatattgattttgatagtaaaagctctgtggtgcagagcttgagttttgatgcgtctgtggtcgctgtttataaaagagagggcgagcaggtgaaggctggagatgcgatctgtgaagtgagctctattgatttgagcaatttgtattttgaattgcaaaacaaccaaaataaattaaaaatcgctaaagatatcactaaaaaagatttagagctttataaggctggggtgatccctaaaagggagtatcaaacgagctttttagccagccaggaaatgggcttaaaggtggaacaattagagagcgcgtttaaaagctttggcgtggatcctaaaaaccctaaagggcagtatggttttaggattgtggctagtgatagcggtcttttagcgttagcgcctaaaaatgtgggtgagaagattttggctttcactagctatgtgcgtatttcaaaaagcgatgatttaatcgctcaaatcaaattgcctgtaggcgtttctaaatccattaaaagagattcgccggtctataatgaagagggggaaaaaatcgggaagatccaaagcgtttcggtggtgttagacaaaggctctaacacgattttagccaccgctttattagatgagggcaattaccatgtgggggaaatggtagaaatgtatattcaaggctcacaacctaaagactcggttttaatcccttcaaacgctttgattagaaacgggaaggattacctggtgtttgtgaggacgcctaaaggttttaggcctgtggtggttcaagttttagaagagcgcagcaagatttttatcgtgaacgctcaaaatttacaccctaatgacagcgtggcagtggggtcattgatagggttaaaaggcatgatcaacaatttaggggaggaatga

SEQ ID NO: 22660 - DNA, 2106 bp, Helicobacter pylori
ttgcattcagatgaattgttagtagagattttagttgaagaattgcccgcgcaagcgttattgaatgaatataaagaaatgcctaaaaaactccacgctctttttaataagcgcgctttagaagtgggaaatatagagattttttacacccctaggcgtttgtgtttgctcattaaagactttccccttttaacccaagaaaccaaagaggaattttttgggcctcccgttaaaatcgcatgcaatcatcaagataaaacgcaagggttgaacgcgttaggtttagggttttatcaaaaattagggttaaaagatcaccagtatttccaaacagcgtttaaaaataataaagaagtgctttatcacgctaaaatccatgaaaaagagcctacaaaagacttaatcatgcccattgtgttagagtttttagagggtttgaatttcggaaagtctatgcgttggggcaatgtggaaaaaagctttatcagacccattcataatatttgcgtgttgtttaatggggaagattttagcggtattgaagtcaaagagtatggctttaaaaccaagcaagccacaaaagtgcaccgacaagagggttttgattttatccaggtggatagccctaaagcgtattttgaagttttagaaaaaaaccatgtcattttagaccctaaaaagcgcgaagctaaaatcttacaagaaattaaagagctagaaacaaagcaccacatcattgtagaaacagatagggatttattagatgaggtggtagcgatcacggaataccccagcgcgcttttaggggagtttgacaaggcgtttttaaaattacccagtgaaatcatcatcacttccatgaaagaaaaccaacgctattttgcaaccttttgtcaaaaaagccaagaagaaagcccaacattacacaacggctttattgtggtgagtaacgctatcaataaagacaagcaaaaaatcattttaggcaaccaaaaggttttaaaagcccgtttgagcgatgcggttttcttttatgaaaacgatctcaaaaagcctttagataacgcccctttagagagtgtggtttttgtgcaaggtttagggactttaaaagataaaatggagcgcgaatcaatcatcgcccaatacttgacgcaaaaatatatttcatctttaaacatgcctttagaaaaagcccttgagttggttaaaagagccgttcaaatcgctaaggcggatttactcagtgaagtggtgtatgaatttagcgagcttcaagggatcatgggctattactacgctttaaaacaaaatgaaaacgagttagtcgccttgagtgtgaaagagcagtatttgcccgcaagcgaaaacgctcccttgccctctagcgtttttagttcaatcgtggctttgagcttgaaattagacagcctgttttctctttttagcgtgggtaaaatccctagcggatctaaagatccttttgctttaaggcgcttgagttttgggctattgaaaatcatcgcgcattacgggttagaatttgatttgaaagcggatttgaaaaacctttttcaaaaagtgggcgtttatcaaagctttgatttagagattttagaaaagtttttactggagcgctttcataatttaatagattgtaacccctctattataaggagcgtgttaaacaccaacgagcgagacattgttaaaatcattcaaaaagtcaaagccttaaaacgctttttagacgatcccaagaacgctcaaaaaaaagagttgctttttagcgctttcaaacgcctagccaatatcaataaagacagaaaccctaacgagtcaagcgagttttcaacaaatctttttaaagagccaaaagagcatgccctttttgaagcgtttaatgcgatcaaaatgaacgcttttgagagtttggatagcaaaatagaggcttattttggtttgcatgcacctttagaagagtattttaaaagcgtgctagtcatggataaagatatagaaatccaaaaaaatcgtaaaaatttcttgtggggcgtgtatcaaagtttcttagaaattggggatattaaagaaattgcgatttag

SEQ ID NO: 22661 - DNA, 1311 bp, Helicobacter pylori
atgaattttcaagaaaatttagccgctttggatttggagtatctttggcacccttgttcgcaaatgcaagagcatcaaaatttccccattatccccattaaaaaggctcaagggatttacctctatgattttaatgataacgcttacatggatttgatcagctcatggtgggtgaatctttttgggcataataacgcctacatcagccagcaactcaaaaatcaaattgatgatttagagcatgtccttttggcttcttttagccataagcccattatcacgctctctcaaaggctttgccagctcactcatatggataaatgcttttatgcggataacggctcatcttgtgttgaaatcgctttgaaaatgagctatcacgcccattttttaaagaatcaaacgcgccgcaaaaagctttttttatcgctctctaattcctatcatggcgagactttgggagcgttaagcgtgggcgatgtgaaactttataaagacacttacacccctttattgctcaaaaatctcaccacacctgtgcctaaaaacgaccatgaaatagaaaatagtttgaacgctttaaagcgtttgttagacaagcatagtgaagaaatttgcgctttcattgcagagcctcttttgcaatgcgcagggaatatgcatatttatagcgcaagatatttaaaacaagccgttttattgtgcaagcaaaaaaacatccacattatttttgatgaaatcgctaccgggtttgggcgcacagggagcatgtttgcttatgaacaatgcgaaattaagccggattttttatgcttgtctaaggggattagtggggggtatttgcctttaagcgcactattaacccataatgaaatctataaccaattttacgccccctatgaagaaaataaagcgtttttgcattcgcacagctacacaggaaacgctttggcatgcgcatgcgcgaacgctacgctggatatttttgaaaaagaaaatgttattgaaaagaacaaggctttaagcgggtttatttttaatacgctccaaaacgcattaaaacccttgatggagcaacaagtggtgtctgatttaaggcatttgggcatggtctttgcctttgaagtctttattcaaaccaaagagcgtttgagtttggcggtttttaaaaaaactctaaaaaaaggcctgttattacgccctttaaacaacaccatttacctcatgcccccttacattatcacgcatgaagaagtcaaaaaggcggttgcggggctagtggaaattcttgatgagttaagaaaaggctga

SEQ ID NO: 22662 - DNA, 1479 bp, Helicobacter pylori
atggaacataaagaaatcgttataggggttgatctaggctctagaaagatttgcgcgatagtggctgaatttaaagaagggattttgcgcatcattggcacggcccatcaagactccaaagaaatcaattcaaaagccattaaaagagggcgtatcaatagccttgctcacgcttccaacgccattaaagaagtgattaatagcgctaaaaaaatggcaggtttgaacgctgatgaagacagaaataaccccatgccccattttggggaataccaccctaaaactaaggcgattgtttctttttctggggcttatactgaaagcattagagatgttaccggtgtagcgagcaccaaagataatgtggtaaccattgatgaaatcaatcgcgctatcaatagtgcatgcgctaaagcaggcttagataacgacaaacatattttgcatgctctcccctatcgcttcactttagacaaacaagaagtgaatgaccctttagggatgagcgggactcgcttggaagtctttatccacattgtctatacagaaaaaaacaacattgaaaatttagaaaaaatcatgatccaatctggggtagagattgaaaacatcgtgatcaattcttatgcagcctcgattgccaccttatctaatgatgaaagggaattgggcgtggcttgcgtggatatgggcggagagacatgcaaccttacgatttatagcggcaattccatacgctataacaaatatttgcccgtaggctctcaccatttaaccacggatttatcgcacatgctcaacaccccattcccttacgctgaagaagttaagatcaaatacggggatctttcttttgaaggcggcgaagaaacgccctctcaaaatgtccaaatccctaccaccggctcggatggccatgaaagccatattgtgccgcttagtgaaatccaaactatcatgagagaaagggctttagaaacttttaaaatcatccacaggagcattcaagatagcggcttagaagagcatttgggcggaggcgttgtgttaaccggtgggatggctttaatgaaagggatcaaagaattagccagaacccatttcactaattacccggtgcgtttggcagcccctgtggaaaaatacaatatcatgggcatgtttgaagatttgaaagaccctcgcttttcagtcgtagttggcttgattttatacaaagcaggggggcataccaattatgaaagagactctaaaggggttatccgctaccatgaaagcgatgattacacaagaacagcccatcaatcaagccctaccccccatatccattcatcgcccacagaaaggaatttgagcgatttaaaagcccctagtgctcctttaaacaccgctaaaaacgatgactttttacctataaaacccaccgaacaaaaaggtttttttaaaagtttccttgataagatttctaaattcttttaa

SEQ ID NO: 22663 - DNA, 1158 bp, Helicobacter pylori
atggttcatcaatcagagatggaaaattataatattggtcaagcaagcattgaagaagtaagcgatccagcttataaaggggctaagattgtcgtcatcggtgttggaggtggggggtctaacatgatcaaacacttggttgaatatggcgtgcatcaagatgttacccctattgcgacgaacactgatggccaacatctcaaaaacaatcccgctccggttaaaatccttttaggcaaagaatccactggaggtttgggcgctggggggattcctgatattggtagaaaagccgctgaagaaagcgctaatgaaattaaagaggcgattaaagacgctaaattagtcattatctctacaggacttggaggagggactgggactggagccacccctactatcgttaaaatcgcaaaagaagtgggagcgctcacgattgctatcgttaccaagcctttcaaatacgaagggaatcaaaaaagaaagagggctgaagagggattgaaagaattggagcagtctagcgattctattttggttatccctaatgacaaaatccttctcaccatgaaaaaaaacgctagcaccacggagtgttatagggaagttgatgatgtcttggttagggctgtgagtggcatttctactatcatcactaaacccggtaatatcaatgttgattttgccgatttaaagagcgctcttggttttaaaggctttgcgttaatgggtattggtgaagccactggcgaagaatccgctaaattagcggtgcaaaatgcgatccaatcgcctcttcttgatgacgcttctattgaaggggctaagagcattattgtcttttttgagcaccaccctgattatcctatgatggcttattctcaagcgtgcgattttattcaagatcaagcccatcaagatgttgacgttaagtttggccaacacacgagcgataatatccctattgatcatgtgcgcgttactatcattgcaaccggtgctgaaagaaacagcggtggagcgagtttggaatctatcgctacgccctctcagcctgtggtgaaacaaacgagaaaagtgggtaatggcgagtatttaaagatccctactgaagaagagctatccatacccacaaccatgagaatccagcaagactga

SEQ ID NO: 22664 - DNA, 366 bp, Helicobacter pylori
atgaagaaaataaaacccatcaagcaaatgatagctacgtgcaaaaaaacccttttcaaaagctatggatactatttggctagaaccttcagcatgtcagctattgggcatgagagcgattttttattgagcgatttggtggcggatttaagggcttctacgccttcaaacgcgatggagattttactccctaatagcgatgaatggttgcaaaaacttgatgggtttaatgtgaaattgcaccgctcttttaaaattttgctccatcaaaaaaaggcgcatttagagcatttagcggattttttagagaagaggaactacccagttaaccattccgaacctggaagtcaagctcttcatcgctga

SEQ ID NO: 22665 - DNA, 1284 bp, Helicobacter pylori
ttgcttaacgctatcaagtttagaatttatcctaacgcccaacaaaaagaattgatttctaaacattttggctgttctagagtcgtgtataactactttttagattaccggcaaaagcaatacgcaaaaggcattaaagaaacttacttcaccatgcaaaaagtcttaacccaaatcaagcggcaagaaaaataccattacctcaatgaatgcaattctcaaagcttgcaaatggcgttaagacagctggtgagcgcttatgataatttctttagcaaaagagcgagataccctaaattcaaatccaagaaaaacgctaaacaatcttttgcaatccctcaaaacatagaaaccaaaacagaaactcaaaccatcgctctccctaaattcaaagagggcattaaggctaaattacacagagatttgcctaaagatagcgttatcaaacaggcttttatttcttgcatagcggatcaatatttttgttctctatcctatgaaaccaaagagcctatccctaaacccaccattatcaaaaaagcggtaggtttagacatgggcttaagaacgctcattgttacaagcgataaaataggatacccacacattcgtttttatcaaaaactagaaaagaaactcactaaagcgcaaaggaggttaagtaaaaaagtaaaagattccaacaacaggaaaaaacaagctaaaaaggtatccagattgcatttagcttgttcaaacactagagatgactacttgcataaaatcagtaatgagataaccaatcaatacgatctgataggagtagaaaccttgaatgttaaagctcttatgagaacctatcattctaaaagccttgctaatgcgagttgggggaaatttcttactatgctagagtataaagcccaaagaaaaggcaaaaccctcttatccatagacagatttttccctagctctcaattgtgttcttattgtggggtcaatacaggcaaaaaacatgaaagcatcactaaattcacttgtcctcattgtaaaaccacacaccacagagattataatgcgagcgtcaatatcagaaactacgctttaggcatgctagatgataggcataaagtaaagacagataaagctagggtagggattatccgaagcgattacactcatcacactaatgagtgtgtcaaagcttgtggagcttcctctaacggggttagttctaaatatggaaacatattggatctagctagttatggagctatgaagcaagaaaaagcccaatcgctttag

SEQ ID NO: 22666 - DNA, 1068 bp, Helicobacter pylori
atgccacataacaaactcactaaatctcagagagaactcttttgtaatctcaaagcctttttatacactaaggctaaaaacttcacgcccattcaagatgtgaaggatatggctttaatcctagacacacaagataaaatcttaaaatgtcataatatagagcaattaaaacaactctgtcatattctttataatcaaggcattaaacacactataatgatgcaaggcttgtttttattctttaactattttaaagataatctcaaattaagaagttttagaatgcttagcgaagagcaagtgattaactttctctttgaactcgctcaaaatagaaaacccagctctatggctaagtatgtgatgtatttaagacaattctttgattatttggatagaaaaaggcgttatagctttgattttacgcttaaaaacctagcctttgctaagaccaaagaaagcttacccagacatttaaacgataaagacttaaagagttttttaaaaacactcttagactataagccagctacaagctttgaaaaacgcaataagtgtattctacttattgtaatacttggtggacttagaaaatgcgaagtgttaaacatagaattaaaacacattcaagtagaagagcaaaactactctattttaattcaaggtaaaggtagaaaagagagaaaagcttatattaaaaagagtttgttagaaccaagcttgaatgcttggcttagtgatgaatatagactaaaatattttaatggggcatatctttttaaaaaagacaaacaaaaagcacaaaattctttaacgctttatagctttatccccttaatctttaaactagctcaaatcaaacactataagcaatatggcacaggcttacatctatttaggcatagttttgcaacactcatttatcaagaaacccaagacttagttttaacttcaagggcgttagggcatagctccttactctctactaagatttatattcatactacacaagagcataacaagaaagtggctcttgtgtttgatagtttgatagaggacaagaagtaa

SEQ ID NO: 22667 - DNA, 1284 bp, Helicobacter pylori; identical to SEQ ID NO: 22527

SEQ ID NO: 22668 - DNA, 561 bp, Helicobacter pylori
gtgtattgtttttattctttgactatttctgcaagccatttgaaagttaagcgattgagactactcaatgaagaaatgcttgtgaattttttatttgagttagctaaacaaagaaaaattaattcaatggcaaaatatgtgatgtatattaggcaattttttgattacttggataggactaaacattatgaattttattttagtcttaaaaatatagcctttgctaaacacaaggataatttgcctaagcatctaaattcaaaagatttaaaatcttttatatatactcttataaactatagaactagaagcagttatgaaaagagaaataagtgtattttgctcttgattattttgggtggtttgagaaaatctgaggtttttaatttagaattgagaaatattgttttagagaaagagcattatatcttgcttataaaaggcaaaaacaataaagagcgaaaagcgttcattaaaatcgctcaaacagatattgacacactcgcaccgcttatccgtatccttttggaaagtattgctaaaaatcttttatcccactag

SEQ ID NO: 22669 - DNA, 1335 bp, Helicobacter pylori
atgaaacatttttctgttaaaagacttttagggcttagttctgtcttgttagtcactttaggagcgagcatgcacgcacaatcttacttacccaaacatgagagcgttaccttaaaaaacgggttgcaagtcgtgagcgtccccctagaaaataaaaccggggttatagaagtggatgtgctttataaagtcggctctagaaacgaaaccatgggaaagagcgggatcgctcacatgttagagcatttgaattttaaaagcaccaaaaaccttaaagccggcgaatttgataaaatcgttaagcgttttgggggcgtgagtaacgcttctacgagttttgatattacgcgctacttcattaaaaccagtcaggctaacttggataagtctttagaattgttcgctgaaaccatgggttcattgaatttaaaagaagatgagtttttgcctgagcgtcaagtggtcgctgaagaaaggcgatggcgcactgataattcccctatcggcatgctttatttccgcttttttaacaccgcttatgtctatcacccctaccattggacgcccattggttttatggatgatattcaaaattggactttaaaagacattaaaaaattccattcgctctattatcagcctaaaaacgctatcgttttggtggtaggcgatgtcaattcccaaaaggtttttgaattgagtaaaaagcattttgaatccttaaaaaaccttgatgaaaaagctatccccaccccttacatgaaagagcctaagcaagatggagccagaacggcagtcgtgcataaagatggggtccatttagaatgggtggcccttgggtataaagtgcctgctttcaagcataaagatcaagtcgccttagacgcactaagtaggcttttaggcgaaggcaaaagctcgtggttgcaaagcgaattagtggataaaaaacgcttggcttctcaagctttctcgcacaacatgcaattacaagatgaaagcgtgtttttattcattgcggggggtaatcctaatgtcaaagccgaagccttacaaaaagaaatcgtagcgcttttagaaaagctgaaaaaaggcgaaatcactcaagcggaattagacaagctcaaaatcaatcaaaaagctgactttatttctaatttagaaagttctagcgatgttgcggggctttttgcggactatttagtgcaaaacgatattcaaggcttgacggattaccagcgacaatttttggatttaaaagtgagcgatttggtgcgtgtggccaatgaatattttaaagacacccaatcaaccaccgtgtttttgaaaccttaa

SEQ ID NO: 22670 - DNA, 603 bp, Helicobacter pylori
gtgtgtggcgcttggttttttggcgcgcgcgtttttgaatttttcacaagtctttttgaaagcatgaaagttttaaaactcctgcctaattttttaacaattttacgcattgtcttatccttatttttattatttttattgttaaacacgcgcacttattttagttttttaaccccctttcaaaccaatatgatctcttcattggtttttttgtttgccgcgctcacggatttattggacggctacatcgctagaagctataaagccaaatcgcgctttggggaaatctttgatcctttagcggataaaatccttattttgagcgcgtttttagggttagtttatttggatcgtgtgaatgcgtggatcccgtttgtgattttagggcgtgaattttttatttcagggcttagagtcttagccgctaatgagaaaaaggatattcctgtcaatgcgttaggcaagtataaaaccgtttctcaagtcgtggcgattggtgctttattggctgatgtaacttactcttatgcgcttgtggctatagcggtttttttaaccctttattcggggatagattacaccattaaatattataaatcttaa

SEQ ID NO: 22671 - DNA, 1560 bp, Helicobacter pylori
atgcttttgatcgttttttttaaattttattttcaatattcaattaaaaaaaaatcattttattttatttttgttataattcaagctatttttattttcaatctaaggaggtgtcgcatggacaatcaaaagataacgcatcaaaatatcacgcaaaaacaaggcgagcttaaaagagacatgaaaatgcgccatctcttaatgattgcatttggaggagcgatcggcacagggctttttgtaggcactgggggtaatattgcgagcgctggccctttagggaccttgatcgcttattgttttggagggcttgtggtctattgtatcatgctctctttaggcgaattggctagcgtttatcccactacaggaagttttggggattatgcggctaaattcataggccctggcacgggctatatggttttttggatgtattggcttggctgggtgatcacggtggcgttagaatacatcgctataggcatgctcatgcaacgctggtttgcggatattcccatccattattgggttattttatgcattgcgttagtttttttattgaactttttttcggttaaaatttttgccgagggcgagtttttctttagcctgattaaagttttagcggtgatcgcttttataggcattggcgcgattgggattatttatcaaatctattcgcatgggtttggttctatttttgataatttccattttggcgataaggggtttttccctaatgggagcgcagcggtttttagcgcgatgctcgctgttatttttgctttcactggcacagaggtgattggggtggctgtgggagagactaaaaacgctagcgaagtgatgcccaaagcgattaaagcgaccttgtggcggattgtctttttctttttaggctctgtgtttgtcatttctgtttttttacccatgaatgattcttctatcacgcaaagcccttttgtgagcgttttagaacgcattaatttgccctttattggcatgggtatcccttatgtggctgatataatgaacgctgttatcattacggcgatgttttctaccgctaattcagggctttatggagcgagccgcatgatttatgggctgtccaaacaaaagatgttttttaaggttttttcccaactcaaccgacaaggcacgcccacttatgcgatgtttttttccctttctttttctctcatagggcttttagtccaaatttatgccaaagaaaatgtcgtggaagctttgattaatgtgatcagtttcacggtgattattgtgtgggttagcgtgtctgtttcgcaatattctttccgcaagcaatacttaaaagccgggcattctttagaggatttgccttataaagccccctttctaccctttttgcaactcatagggatcactgggtgtgccatcggcgtgattggttcggctatggataaggatcaacgcattgggatgattttaacgattgttttcgctgttatttgttacattggatactattttacacaaaaagctaatgaaaataacaaaaaagatttgatataa

SEQ ID NO: 22672 - DNA, 1332 bp, Helicobacter pylori
gtgtcccctctaaagacgatacggatctattcttaccacgattctattaaggactctattaaggcggtggtgaatatctccactgaaaagaagattaaaaacaattttataggtggcggtgtgtttaatgacccctttttccaacaattttttggggatttgggtggcatgattcctaaagaaagaatggaaagggctttaggcagcggcgtaatcatttctaaagacggctatattgtaactaataaccatgtgattgatggcgcggataagattaaagttaccattccagggagcaataaagaatattccgccactctagtaggcaccgattctgaaagcgatttagcggtgattcgcatcactaaagacaatctgcccacgatcaaattctctgattctaatgatatttcagtgggcgatttggtttttgcgattggtaacccttttggcgtgggcgaaagcgttacgcaaggcattgtttcagcgctcaataaaagcgggattgggatcaacagctatgagaatttcattcaaacagacgcttccatcaatcctggaaattccggcggcgctttaattgatagccgtggagggttagtggggattaataccgctattatctctaaaactgggggcaaccacggcattggctttgccatcccttctaacatggttaaagatactgtaacccaactcatcaaaaccggtaagattgaaagaggttacttgggcgtgggcttgcaagatttgagtggcgatttgcaaaattcttatgacaacaaagaaggggcggtagtcattagcgtagaaaaagactctccggctaaaaaagcagggattttggtgtgggatttgatcaccgaagtcaatgggaaaaaggttaaaaacacgaatgagttaagaaatctaatcggctccatgctacccaatcaaagagtaaccttaaaagtcattagagacaaaaaagaacgcgctttcaccctcactctagctgaaaggaaaaaccctaacaaaaaagaaaccatttctgctcaaaacggcgcgcaaggccaattgaacgggcttcaagtagaagatttaactcaagaaaccaaaaggtctatgcgtttgagcgatgatgttcaaggggttttagtctctcaagtgaatgaaaattccccagcagagcaagccggatttaggcaaggtaacattatcacaaaaattgaagaggttgaagttaaaagcgttgcggattttaaccatgctttagaaaagtataaaggcaaacccaaacgattcttagttttagacttgaatcaaggttataggatcattttggtgaaatga

SEQ ID NO: 22673 - DNA, 1221 bp, Helicobacter pylori
atgtctttgattagagtgaatggggaagcttttaaactctctttagaaagtttagaagaagacccttttgaaactaaagaaacgctagaaacgcttatcaaacaaacgagcgttgttttattggctgctggggaatctaggcgtttttctcaaaccatcaaaaaacaatggttgcgctctaatcatacccccttatggctcagcgtttatgaaagctttaaagaagccctagactttaaagaaatcattctagtcgtaagcgaattggattatatttacatcaaacgccattaccctgaaatcaagcttgtaaaaggcggggcatcaaggcaagaatccgtgcgtaacgctttaaaaataattgatagcgcttacacgctcaccagcgatgtggctaggggtttagccaatattgaagcgctcaaaaatttgtttttaaccctccaacaaaccagccattattgcatcgctccttacttgccttgctatgacacagcgatctattataacgaagctttagatagagaagcgatcaaactcattcaaaccccgcaattaagccacaccaaagcgctccaatcagccctaaatcaaggggattttaaagatgaaagcagcgcgattttacaagctttccctgatcgtgtgagctatattgaaggcagtaaggatttgcacaagctcaccacgagcggcgatttgaagcatttcacgctctttttcaacccagcaaaagacacttttataggcatgggctttgatacgcatgcgttcattaaagataagcctatggttttagggggggttgttttggattgcgagtttgggttaaaggcccatagcgatggcgatgctttgttgcatgcggttattgatgcgattttaggagcgattaaagggggggatattggcgaatggttccctgataatgatcccaaatacaaaaacgcctcttctaaagagcttttaaaaatcgtgttggatttttctcaaagcattgggtttgaattgtttgaaatgggagcgaccatctttagcgaaatccctaaaatcactccttacaaaccggcgattttagagaatttgagccaacttttgggtttagaaaaatctcaaatcagcttgaaagccaccacaatggaaaaaatggggttcattggcaaacaagaagggctgttagtccaagcgcatgtgagcatgcgttataaacaaaaactttaa

SEQ ID NO: 22674 - DNA, 867 bp, Helicobacter pylori
atgagtaagagtttataccaaactttaaatgtgagcgaaaacgccagccaagatgaaatcaaaaaatcctaccgccgtttagcccgacaataccacccggatttgaataaaaccaaagaagccgaagagaaattcaaagaaatcaacgccgcttatgaaattttgagcgatgaagaaaaacgccgccaatacgatcagtttggcgataacatgtttggcgggcagaatttcagcgattttgccagaagccgtggtcctagtgaagatttagacgatattttaagctctatttttgggaaaggaggcttttcgcaaagattttctcaaaactcgcaaggcttttctggctttaatttttccaatttcgcccctgaaaatttagacataaccgccgctttaaatgtctctgttttagacacccttttaggcaataaaaaacaagtgagcatcaataatgagacttttagccttaaaatccctattggcgtggaagagggcgaaaagattagggttcgcaacaaggggaaaacggggcgaacgactaggggcgatttgctcttagagatccatattgaagaagatgaaatgtataggcgcgagaaagatgatattacccaaatctttgatttacccttaaaaacggctctttttggagggaaaattgaaatcgctacttggcataaaaccttaaccctaaccattccccctaacaccaaagcgatgcaaaaattccgcattaaagaaaaagggatcaaaaacagaaaaacttcgcatgtgggggatttgtatttgcaggctcgtttgattttgcctaaaactgaaacgctttctaatgagttgaaagcgttattagaaaaagaattgtaa

SEQ ID NO: 22675 - DNA, 1176 bp, Helicobacter pylori
atgagcctgacttcgcttttaaacccaaaaagcctagaagattttttaggccaagagcatttagtagggaaagacgcccccttatttaaagccctacaatccaaacacttcccccatgcctttttctatggccctcctggcgtgggtaaaacaagcctggctcaaatcatcgcctatatgctagagcgccccattcttttattcaatgcgacggattttaaattagaggatttgcgccttaagcttaaaaattaccaaaatacccttttaaaacccgttgtttttattgatgaaacccacagattgaataaaacccaacaagaatttttactccccattatggaaaaagatcacgctttaattttaggggctagcacgcaagatcctaattacagcctaagccatgcgatccgatcaagaagttttatttttgaattaacccccctaaacaagagcgatttagacaggctttgcgctaaagctttaacattgctcaaaaaacaaatagagcctggcgctaaaacctatcttttaaacaacagcgctggcgacgctagagcgttattaaaccttttagatttgagcgctaaaatagaagatcctatcactttaaaaacgctacaatccttacggcctcatagcctaaatgatggatcttatagcgatgatacgcattataaccttactagcgcgttaatcaaatctttaagagggagcgatgaaaacgcttccatctattatctggcgcgcttgattgctggcggggaaaacccggaatttatcgccagaaggctggtgatttttgcgagcgaagatattggtaacgctaacccgaacgcccttaatttagccgcttcttgtttgtttgcagtcaaacaaatcggctaccctgaagcgcgcatcattttaagccaatgcgtgatttatctggcttgttcgcccaagtctaacacggcttatagagcgatcaatcaggctttggattgcgttcaaaaaggctcactctaccctattcctaaacacctgctgcctaacgctaaagattacctttacccgcatgattataacggctatgtcaaacaagattatttggaaaaacccctagatttggtttcttctcaaggcataggatttgaaaaaacccttttagaatggcttgataagataagaaattga

SEQ ID NO: 22676 - DNA, 492 bp, Helicobacter pylori
gtgatgcgagagatccttactagccgctttttccctagcctttttaaaaaaaggcttgatttttctaacagggtggttttagggttgggatctaatcttaaaaatcctttaaaaatattaaaaaattgttttttgtattttaaaaatcatagtaaaatcgggaaaattttttcttcgcccatttatatcaatccgccttttggttacactaagcaacctaacttttataacgctacgatcatccttaaaacatctttaagtttgcgccatttttttgctctggttttttatatagaaaggcgttttggccgccaaaggaagcgcgattttaaagacgctccaagaactttagacattgatattatcgctttcaaccaagtcattttaagacagaatgatttggctttacctcaccctaaatggagtgaaagggattcggtgttagtgccgttggctttgcaacaaattctttttaaaaaaggggagtggtga

SEQ ID NO: 22677 - DNA, 1290 bp, Helicobacter pylori
gtgttgaaagagcgtttgaaggccttttttagtgcggactctgttttcactttaatttttgcccttttctttctcacttcgtttaaaaaacctttaactcaagtcttgttgattgttttaatggtttttttgttttttaggtgttatttccaagcgtctttgaaagaaactttcgcaattaatcatttaaaaacaatgtcttttaaatggctcactctggcttttttgggcgtgtttttaagcatcttccctaacatgtttaacatgcatgatagccaaactttccgctacaatttattcgctctaaacatgtccttaacttatgcttgcggggcgttatgcttgctttttgccagttgcttaagaatcaaattgaatcaaaaaatccttttttacagcatggctgttgcaaatttcatcaacggcttgctctcattggtgcaaaaaatttattttaacatgcccagagcgcaagggtttagcacggttaaggagtatgtggttttagtgagcgtgtccattttaggctgttatatttatgcgctttattcgcacaatcaaaaagaaaaactttttttcacgctttctgtttttgtggggtttttagtcgttattttaagcgccacaaggagcgcgacaatcgcttttgttattacttttttaatcctttcttgctttattttatacgccaaaaaatcgctcaaaccattgggttatatggtggtcgtgagtcttattttgagcgctttgtatgtggggagtaacgctttagaaaaaaagggggcaatagagcaatctagagttcaaaatcaaagctttgaagaagatctgaaacgctacgctaaaaaggacgctgatagcagtatcggatggcgtttggagcgttggaaagaagccctaacggttttgcgtttaaggcccttttttggtatggccgctagcgagaaatgccagaggttagaagagattttatccttatcaaagtcttatagggccaaagatttgattctctgttatgaaagatacgacaatcaaatcattcacattttagccactagggggatcataggctttttgatctggctcttttttttattagttattgtaaagattttttggagcgggataaagcaaaactctttaatatcgttttttatactaatgacactcgccttttacctcatttttggcattgggtttgacccctttgatttcttcattacgggaagtttttttgtaggaatgatcatgatggctgtttttttaaaaaaagataaaagtgctttttag

SEQ ID NO: 22678 - DNA, 273 bp, Helicobacter pylori
atggctttgaatctggagaaaaaacaagaaatcattaaggcgtttgccactaaggaaaacgatacgggttcttgtgaggtgcaagtggcgttattgaatgaaaggatcaagcttttaaccgagcatttaaaggctaaccccaaagatcattccagtcgtttagggcttttaaaattagtcgctcaaagacgcaacttgttgaaatacatcaaacgcactaatcatgcgcgttatgtggttttgattgaaaagttaggcattaaagacagataa

SEQ ID NO: 22679 - DNA, 1989 bp, Helicobacter pylori
atgcaattagacgaagatttagaattcgctaaaaaaatctttaaccctaacagagcgtttgccaagcaagccaggattaaaaacatgtgcgaatataaagatttagtgcatgaagccaatgaagattatgaacatttttggggcgatttagccaagcagaaactcacatggtttaaaccttttgataaggttttaaacagcgataacgccccttttttcaaatggtttgaaaacggcaaaatcaatgtttcttacaattgcatagacaggcatttaaaagacaaaaaaaataaagtggcgatcatttttgaaggggaaatgggggattataatgtcatcacttacagaaaactccactctgaagtcaataaaacagccaaccttttaaaaaacgaattcaatgtcaaaaaaggcgatagggtcattatctatatgcccatgattgtagaaagcgtttatatgatgctcgcatgcactaggattggagcgatccatagcatcgtttttgctgggtttagccctgaagccttaagggataggatcaacgacgctcaagctaaattagttatcacagcggatgggacttttagaaaaggcaaaccttacatgctcaagccagcccttgacaaggctctagaaaataacgcctgccctagcgtggaaaaagcgctcattgtgatacgaaacgccaaagagattgactatgtgagagggcgcgattttgtctataatgaaatggtcaattaccaatccgacaaatgcgaacctgaaatgatggactctgaagatcctttattcttgctctatacaagcggatcaaccggaaagcctaaaggcgttcaacacagcagtgcggggtatttgttatgggcgcaaatgacgatggagtgggtttttgatattagagataacgataatttttggtgcaccgccgatattggctggatcacagggcacacttatgtggtttatggacctttagcttgtggggcgacgactttgatactagaaggcacgatgtcttatccggattatgggagatggtggaggatgatagaagaataccgtgtggataaattctacacttcccctaccgctataagaatgttgcatgccaaaggtgaaaacgaaccctcaaagtataatttagagtcgctcaaagttttaggaacggtgggagagcccattaaccctacagcatggaaatggttttatgaaaaaatcggcaactcaaaatgcagcatcgtggatacttggtggcagacagaaacaggcgggcacatcatcagccctttaccgggagctacgcctataagggccagttgcgcgactttacctttgcctggaatccatgcggaagttttaaacgaagacggcactaaaacaaagcctggagagcaagggtttttatgcatcactaagccatggccttctatgataagaaacatttggggcgatgaaaaacgatacattgatagctatttttctcagatcaagttgaatggggaatatgtctacctctctggagatggcgctatcgtggatgaaaacggatacattactattattgggcgcacagatgatattgtgaatgtgagtgggcataggattggcacggctgaagtggagagcgctatttccaagcatgaaatggtggctgaatgcgcggtggtgggtatccctgatgcgattaaaggagagggcttgtttgcgtttgtggtgctgtgcgatggggctaaatgcaatcttggcgagagtttagaattgctaaaagaaatgaaccatatcttatccattgagattggaaagatcgcgaaattagacaatgtcatgtatgtgccaggtttgcctaaaaccaggagcgggaaaatcatgagaaggcttttgaaatccatcgccaaaaaagagcctatcactcaagatttaagcacgctagaagatgtgaatgtggttaaagaaataatgagcatcgctcaaatggaggagtaa

SEQ ID NO: 22680 - DNA, 2835 bp, Helicobacter pylori
atgagtggtatggttgatttaaaagaatttttagccgagcttggtaagacccaaaaagagcttaaaaatgtgatcgagcaagccaaagacattggtttagagcttaagacaaattctaaaatgaccccagagcaagcaggcaagctatacaaatacattgtggatggcattaaagaacaaatacaagccaatcaacccgctaaaaatcctgaacaagacaataaagacgatttgaatacagccgtagcgtctaaatctcttaacaaaaaggtttccaaaacgcctaaaaaagaagaaacaaaaagccagccaaagcccaaaaaaactaaagaaaagaaaaaagaagctcccacgcccattgctaaaaagaagggagggatagagattgtcaacacttttgaaaaccaaacgccccctacagaaaacacccctaaagtggttagccattctcaaatagaaaaagccaagcaaaaactccaagaaatccaaaaaagccgagaagccctaaacaagctcacccaaagcaacgctaacaacgccagtaacgctaacaacgctaaaaaagaaatcagcgaagttaaaaagcaagagcaagagatcaaacgccatgaaaacattaaaagacgcaccggttttagggtgattaaacgcaacgatgaagtagaaaatgaaagtgaaaacagcgtaacagaaagcaaaaaacccactcaaagcgcggcggctatttttgaagacattaaaaaagaatggcaagaaaaagacaaacaagaggctaaaaaagccaaaaaacccagtaagcccaaagccacccccaccgccaaaaacaacaaatcccataaaattgattttagcgatgcgagggattttaagggcaatgatatttatgatgatgaaaccgatgaaatcttattgtttgatttgcatgaacaagataatttcaataaggaagaagaagaaaaagaaatccgccaaaatatcaacgacagggtgcgcgtccaaagaaaaaacccttggatgaatgaaagcgggatcaaacgacaatccaagaaaaaacgcgcattccgtaacgataacagccaaaaagtgatccaaagcacgactgcaatccctgaagaagtgcgcgtctatgaattcgcgcaaaaagcgaatttgaatctagctgatgtgattaaaaccctctttaatttagggcttatggtaactaaaaacgactttttggataaggatagcatagaaattttagccgaagagttccatttagaaatttctgttcaaaacactttagaagaatttgaagtagaagaagtgctagagggggtgaaaaaagagcgcccgcctgtggttactatcatggggcatgttgatcatggtaaaacttcactgctggataaaatccgtgataaaagagtcgctcacacggaagctggggggatcactcagcacattggcgcttacatggtagaaaaaaatgacaaatgggtgtctttcattgacaccccagggcatgaagcctttagccagatgcgtaatcgtggggctcaagtaacagatattgcagtgattgtgatagcggctgatgatggggtgaagcagcagactattgaagctttagagcatgcaaaggccgctaatgtgcctgtgatttttgcgatgaataaaatggataagcctaatgtgaatccggacaaactcaaagccgaatgcgctgagcttggctataaccctgtggattggggcggggagcatgagtttatccctgtttcagctaaaacgggcgatggcattgacaatttattagaaaccattctcattcaagcgggtattatggaattaaaagccatagaagagggcagcgctagagcggttgttttagaagggagcgtggaaaaagggcgtggggcagtagccacggtgattgtccaaagcgggactttaagcgtgggagatagtttttttgctgaaacggcgtttggtaaagtaagaaccatgactgacgatcaaggcaagagcattcaaaatttaaaaccctctatggtggctctcatcacaggcttaagcgaagtgccgcctgcgggatctgttttaataggggtagaaaacgattccatcgcgcgcttgcaagctcaaaagagggcgacttatttacgccaaaaagcgttgagtaaaagcactaaagtgtcttttgatgagctttcagaaatggtcgctaataaggaattgaaaaatattcctgtagtcattaaagcggatacgcaaggaagcctagaggccattaaaaacagcttgttagagcttaataacgaagaagtggcgatccaagtgatccactcaggggtggggggtattactgagaatgatttgagcctggtttctagcagtgagcatgcggtgattttaggctttaatatccgccccaccggtaatgtgaagaataaggctaaagaatacaatgtgagcattaaaacttacacggtgatttatgccttgattgaagaaatgcgatcgctgttattaggcttgatgagccctattattgaagaagagcataccgggcaagcggaagtgagggaaacctttaatatccctaaagtgggtacgatagccgggtgtgtggtgagcgatggggtgatcgctcgtggcattaaggcgcgtttgattagggatggcgtggtgattcataccggcgaaatcctttctttgaaacgctttaaagacgatgtgaaagaagtttctaagggttatgagtgcgggatcatgctagacaattataatgagattaaagtgggtgatgtgtttgaaacctataaagaaatccataaaaaaagaactctctaa

SEQ ID NO: 22681 - DNA, 882 bp, Helicobacter pylori
ttggtagtgagtgttcctgcaacaagtgcgaatttaggtcccggttttgattgcttgggtttgagtttgaatttacgcaatcggttttttattgagcctagcagtttccatgcggtgaaattggttggggagggtgaagggatccctaagtttttaaccaacaatattttcactaaagtgttttatgagattttaaaaaagcatgggaatgacggctcgtttaaatttttattgcataataaagtccctattacaaggggcatggggtctagctcggcgatgattgtgggggcggtcgcttcagcgtttgcgtttttagggtttgattttgatagagaaaacattgtcaataccgctctaatttatgaaaaccacccggataatatcactccggcggtgtttggggggtataatgcagcgtttgtggaaaaaaagaaagtgataagtttaaaaaccaaaatcccttcttttttaaaagcggtgatggtgatccctaatagggccatttccaccaagcaatcgcgccatctcttgcccaagcgttacagcgtgcaagaaagcgtgtttaacctttcgcatgcgagtttgatgacgatggcgattgtgcaggggaagtgggatttattgcgttgttgctctaaagacaggatgcatcaatataagcgcatgcaaacttaccccgtgttgtttgcgatccaaaagatcgctttagaaaataacgccctaatgagcacgctttcagggagcggttcatcgttttttaacatgtgttatgaagaagacgcccctaaattaaagcaggttttgagcaagaaattccctaaatttagggtagcggttttagattttgataatgatggggttcttattgagaaagactga

SEQ ID NO: 22682 - DNA, 888 bp, Helicobacter pylori
atgaaacaaacaaccattaaccactctgtggaattagtagggataggcttgcacaagggcgttcctgtgaagcttgttttagagcctttaggggaaaatcaaggcattgttttttaccgctctgatttgggcgtgaatctccccttaaaacctgaaaacatcgtggataccaaaatggcaaccgtgttgggtaaggataatgctaggatttctacgattgagcatttgctttcagctgtccatgcgtatggcattgacaatcttaagatctctgtggataacgaagaaatccctatcatggatgggagtgctttgacttattgcatgcttttagatgaagcagggattaaagaactagacgctcctaaaaaggtgatggaaatcaagcaagccgttgagattagagagagcgataagtttgttaaaattgagccagacagccagctttctttgaatttcacgattgattttaaccatccggttatcgctaagcaagcccatcattttgtctttagtaaaaccgcttacaaagagcaagtcgctaaagctcgcacctttgggtttttgcaagaagtgaattacttgcgatccattggtttggcgaaaggagggagtttgaataattgcatcgtgctggatgaaaacagcattttgaataaagagggcttgaggtgcgaaaaggagtttgtgtgccataagattttagacgctatgggggatctaatggttttaggcatgcctgtgatgggcaaatacacttctttttcagggagtcataagctcaattccatgttggttaaagccattttggcggacgctaaaaattacgaagttttgatcgctgcagatccggctaaagaatttgcgttgcaaaaggctttcgcttaa

SEQ ID NO: 22683 - DNA, 813 bp, Helicobacter pylori
atgagcatgcaaaccgccccaattaaaaagatcactctcaaccacctccaagctaaaaaaaatcaagaaaaaatcatcgctattaccgcttatgatgcgctgttcgctcaaatatttgatccgctagtggatgtgattttagtgggcgatagtttgaatatgagttttttcaatcaaaacgacactttaagcgcgagtgtggaaatgatgctctatcacaccaaagccgtgtgcgcgggcgctaagactccttttatcatcacagacatgccttttggaagctataaagatgaaaaaacagccctaaaaaacgccattagggtttataaagaaacccaagcgagcgcaatcaaattagagggggggaaagaaaaagcgaaactggttaaaacgctcactaatgagggcgttattgtggtagggcatattggcttgatgccccaattcgtgcgccttgatggaggttataagattaagggcaaaaatgaagaacaacaaaaaaagcttttagaagacgccttgagtttagaagaagctggggtgggtttgttggttttagagggtataaccacccctatcgctcaaaaaatcacgcaaaaaatcaaaatccccacgatcggcatagggagcggtaaagattgcgatgggcagattttagtgtggagcgatatgttaggcttttttgatagctttaagcctaaattcgtgcgagaataccttaaggggaaagaattgattcaaaacgctatcaaacaatacgctgatgatgtgaaaaagggaaacttccctaacgaattagaaagttatcattaa

SEQ ID NO: 22684 - DNA, 1038 bp, Helicobacter pylori
ttgaaagaatttgatttagaaagctatgattattatttgcctaaggaattgatcgcaagctaccccgttttgcccaaagaaaaggctaaattactcgtctatgaaaggcgttcgcaaaaaatcacgcacaccacttttgagcatgttttagattttttccctaaaaacgcccttattgtgttgaacgacactaaagtgattaaagccaggctttttggatctaagcatgcctttttgccatcaaaaacaaccgaagtgtttttccaccgcttttttaaaaataataccgctctgactcaaattaagggcaagatcaaagtgggggacaaaatcttttttgatgcaaattatcacgctgaagtcttggaattgcttcataacggccagcgcttgatcgctttttatgacaataaaacccccttaaatcaagaaaatatcttaaaacttttagagcaatacgggcatatgcccttacccccttatatcaaaagagcggatgaaagtttggatgcgcatgaataccagagcgtgttcgctaaacacatgggcgcggtggctgcccctacagcgtcattgcatttttctcaaaataccttagaaaaattattgaaagatttcaaacacgcttttttaaccttgcatgtgggggctgggacttttcttagcgtagaaactaaagatattagagagcatcaaatccatacagaagttttacgcattcctaaaaagagccaagaaattttgcaaaaatcccaagagattttatgcgtcggcacgaccgctttaaggagcgtggaatactttaagcgtttagaaaaccctaatcaagaagcgtttgaatgcgacatattcttgcattttgctaatcctattttgcatgttaattatttgctcactaatttccatttgcccaaatcaagccttttaatgcttgtaagcacgatgataggcttagaaaaaaccaaagaaatctacaaaacagccatagaaaagaaatatcgtttttattcttatggcgatgggatgctgattttatga

SEQ ID NO: 22685 - DNA, 537 bp, Helicobacter pylori
atgaaccccttattgcaagattatgcgcgcatccttttagaatggaatcaaacgcacaacttgagcggtgcaaaaaatttaagcgagttagaaccccagatcacagacgctctaaaacccttagaatttatcaaagattttaaaagttgtttggatattgggagcggggcgggactccctgctatccctttagcccttgaaaaacctgaagtcaaattcattcttttagagccaagaataaaaagagcggcttttttaaactaccttaaaagcgttttgcctttaaaaaatattgaaatcattaaaaagcgtttagaagattatcaaaatcttttacaagtggatttgatcacttccagagcggtcgctagctcttcttttttgatagaaaaaagccaacgcttcctaaaagataaggggtattttttattctataaaggcgagcagttaaaagatgaaatcgcttgtaaagacactgaatgctttatgcatcaaaaacgagtttatttttacaaatcaaaggaaagtttatgttaa

SEQ ID NO: 22686 - DNA, 375 bp, Helicobacter pylori
ttgaaactactggtagtagatgatagctcaactatgaggagaattattaaaaacacactttcacgcttaggctatgaagatgttttagaagctgagcatggggtggaagcttgggagaaactggacgctaatgcggacactaaggtgcttattacagattggaacatgcctgaaatgaacggcttagatctcgttaaaaaggtgcgctctgatagccgttttaaagaaatccctattatcatgatcaccacagagggcggtaaggctgaggtcattacggctttgaaagcgggcgtgaacaactacattgtgaaaccttttaccccccaagttttgaaagaaaaattagaggttgttttagggacaaacgattga

SEQ ID NO: 22687 - DNA, 1899 bp, Helicobacter pylori
atgaaaccaacgaacgaacctaaaaaacctttttttcaaagtcccattatccttgcggttcttggagggattttactcatcttttttctacgctctttcaattctgatggcagtttttcggacaatttcttagcttctagcactaaaaatgtgagctaccatgaaatcaaacagctcatcagcaataatgaagtggaaaatgtgagtatcggtcaaactttgatcaaagccagccataaagagggcaacaatcgtgtgatctatatcgctaaacgggtgcctgatttgaccttagtgcctttgttagacgagaaaaaaatcaattattctggttttagcgagtctaacttttttacggacatgctagggtggctcatgcctattttagtgattttagggctatggatgtttatggcgaaccgcatgcaaaaaaatatgggtgggggtatttttggcatggggagcgcgaaaaaactcattaacgctgaaaaacccaatgtgcgttttaatgacatggcaggcaatgaagaagccaaagaagaagtggtagaaatcgtagatttcttaaaataccctgaacgatacgccaatttaggggctaaaatccctaaaggcgtgttattagtagggcctccaggaaccggtaaaacccttttagccaaagcggtagccggcgaagcgcatgtgccgtttttctctatgggagggagcagtttcattgaaatgtttgtgggcttaggggcaagcagggttagggatttatttgaaaccgctaaaaaacaagcccctagcatcatttttattgatgaaattgatgccataggtaagagccgagcggctggaggcgtggtgagcgggaacgatgaaagagagcaaaccttaaaccagctcttagccgaaatggatggttttgggagcgaaaatgcgcctgtaattgtcttagccgcaacgaaccgccccgaaatcttagatccggcgttaatgcgtccagggcgctttgacaggcaggttttagtggataagcctgattttaatggtagggtagaaatcttaaaagtgcatattaaaggcgtgaaacttgctaatgatgtgaatttgcaagaagtcgccaaactcactgcagggcttgcaggagcggatttggcgaatattatcaatgaagccgcacttttagcaggaagaaacaaccaaaaagaagtcaggcagcaacatttaaaagaagcggttgaaagagggattgcagggttagaaaagaaaagcaggcgcatcagtcctaaagaaaagaaaatcgtcgcctaccatgaaagcgggcatgccgtgatttctgaaatgactaaagggagtgctagggtgaataaagtctctatcattccaaggggcatggcggctttgggctacacccttaacacgcctgaagaaaacaaatacttgatgcaaaagcacgaactcatcgctgaaattgatgtgcttttaggcgggagagcggctgaagatgtctttttggaagaaatttctaccggtgcgagcaacgatttagaaagggcgactgatattattaaaggcatggtgagttactacggcatgagtagtgtcagtgggcttatggtattagaaaaacaacggaacgcctttttaggaggcggttatggaagcagtagggaatttagcgaaaagaccgcagaagaaatggatcttttcattaaaaacctgttagaagaacgctataagcatgtcaaacaaaccttaagcgactatagagaagcgattgaaatcatggtcaaagaattgtttgacaaagaagtcattacaggcgaaagggtgcgtgaaatcatcagcgaatacgaagtcgccaacaatttagaaagccgtttgatccctttagaagagcaagcgagttaa

SEQ ID NO: 22688 - DNA, 2238 bp, Helicobacter pylori
atgaaagaatctttttacatagagggaatgacttgcacggcgtgttctagcgggattgaacgctctttggggcgtaagagttttgtgaaaaaaatagaagtgagccttttaaataagagcgctaacattgaatttgacgaaaaccaaaccaatttagacgaaatttttaaactcattgaaaagctaggctatagccctaaaaaagctctgacaaaagaaaaaaaagaattttttagccctaatgttaaattagcgttagcggttattttcacgctttttgtggtgtatctttctatgggggcgatgcttagccctagccttttacctgaaagcttgcttgcaattgataatcatagtaattttttaaacgcttgcttacagcttataggcgcactcattgtcatgcatttggggagggatttttacattcaagggtttaaagccttatggcacagacaacccaacatgagcagccttatcgccataggcacaagcgctgccttaatttcaagcctgtggcaattgtatttggtctataccaatcattataccgatcagtggtcttatgggcattattattttgaaagcgtgtgcgtgattttaatgtttgtgatggtgggcaaacgcattgaaaatgtttctaaagacaaagctttagacgctatgcaagccttgatgaaaaacgccccaaaaaccgcccttaaaatgcaaaataaccaacagattgaagttttagtggatagcattgtggtgggggatattctaaaagtcctccctggaagcgcgattgcggtggatggtgaaatcatagagggcgaaggggaattagatgagagcatgttgagcggcgaagcgttgccggtttataaaaaagtcggcgataaagtcttttcagggacattcaatagccacacgagttttttaatgaaagccacgcaaaacaacaaaaacagcaccttgtctcaaattatagaaatgatttataacgctcaaagttcaaaggcagagatttctcgcttagcggataaggtttcaagcgtgtttgtgccaagcgtgatcgctatttctattttagcgtttgtggtgtggctcatcattgcacctaagcccgatttttggtggaattttggaatcgctttagaagtgtttgtatcggttttagtgatttcttgcccttgcgctttaggattggctacgcctatgagcattttagtagcgaaccagaaagcgagttctttagggttattttttaaagacgctaaaagtttagaaaaagcaaggctagtcaatacgatcgtttttgataaaaccggcacgctcactaacggcaagcctgtcgttaaaagcgttcattctaagatagaattattagagttattgagtttagcgctcagtattgaaaagagtagcgaacatgtcatcgctaaagggattgtagaatacgcaaaagagcataacgctcccttaaaagaaatgagcggggttaaagtgaaaacgggttttggcattagtgctaaaacagattatcaaggcactaaagagattattaaagtaggcaacagcgagttttttaaccctattaacacgctagaaattaaagaaaacgggattttagtgtttgttggtagagcgatcagtgaaaaagaagacgagcttttaggggcgtttgttttagaagatttgcccaaaaaaggcgtgaaagagcatatcgctcaaatcaaaaatttaggcattaacacctttcttttaagcggagacaatagggagaatgtccaaaaatgcgcgtttgaattagggattgatggttatatcagcaacgctaaaccacaagacaagctcaataagatcaaagagcttaaggaaaaagggcagatcgttatgatggtgggcgatggcttgaatgacgctcctagtcttgctatgagcgatgtggcggtggtgatggctaaagggagcgatgtgagcgtgcaagcagcggacattgtgagttttaataacgatattaaatcggtttatagcgcgattaaattaagccaggcgacaattaaaaatatcaaagaaaatttgttttgggctttttgttataatagcgtgttcatccctttagcttgtggggttctttataaggctaatctcatgttaagcccggcgattgcgggtttagcgatgagtttaagctctgtgagtgtggtcttaaactcccaaaggctaaggaattttaaaattaaggatcattga

SEQ ID NO: 22689 - DNA, 201 bp, Helicobacter pylori
atgaaagcaacttttcaagtgccaagcattacttgcaaccattgcgtggataaaattgaaaaatttgtgggcgaaattgaaggcgtgagctttattgatgtgagcgtggaaaaaaagagcgtggttgtggaatttgacgctccagcgacacaggatttgatcaaagaagctttattagatgctgggcaagaagtggtgtga

SEQ ID NO: 22690 - DNA, 1656 bp, Helicobacter pylori
ttgaaactctttttcaagcgttattctaaataccttaaagagcattataaaagttttatagtggttttattttcttctttagtggtggctttaagcacggcttgggggacttatttagtcaagcccactttagatgaaatttttatcaataaagacactcacatgctcaaaatcctgccttttttagtgattttggcgtatttgggtaagagtgggggcatgtatttaggcacttatttcaccaacttcattgggcttgatattgtcaaaaaaatacgcaacactatgctagaaagccttcttaaaatggaaatggatttttttaacaggacgaaaaagggcgaattgatcgcaaggatcaccaatgatataggtttgattagagcgagtttgtccaattacctttcagagagcataagagaggggctaacgattgttgggttagtgggggtggtgatctatcaaagccctaaattagcgttagtggggttagtcatcatgccgttagctgctattcctatcagtaaaatcattcgtaaggttaaaaaactcgctaaatcccatcaagagagtaacgccaaaatcaccgctcgtttgagtgaagtttttaacaacgtggaagcgattaaaatctctaatggcgaaaaattagagcataaggcttttgtgaaagaaaatgaagcgttttttaaaatcggtatcaaaaacatcgccgtggctgaaatttcttcgcctttaatggagtttttaggttcaatcgctatagcgctagtgatttatttaggggggaatgaagtgattagaggccatattagcgtgggggcgtttttttctttcattacggccctttttatgctctatacgccgattaaacgcttaactaggattgtttctaattttcaagaagccttagtcgctagcgacaggatccatgagattttagaaagagagccggctattgttgatggggaattgacgctaaataacgccatacacaccatagaatttaaaaaggtatggctggcttatacgctagacaatcaagagcgttatgttttaaacgatattagtttgaagttccaacaaaatgaaatcatcgctttaaagggcgaaagcgggagcggtaaaagctcattagtgaatctgatcttacgcctttatgagccaagcaaaggcgaaattttcatcaacgatcaaaaaatagagagcatcactcaaaaatccttaagagaaaagattagcgttgtcactcaaagggtgtttatttttaacgggagcgtggctgaaaatgtggcgtatggtttagaaattgatgaggtaaaaatcaaagaatgcctaaaaaaagctcaagccttagattttgttgaaaaaatgcctcatgggatagagagcgttttagatgaatttggcgctaatcttagcggcggccaacgccaaagaatcgccattgcaagagctttgtataaagacgttcaagttttaatctttgatgaagccacttccgctttagacaataacacagaagagagcgttaaacaaagcattttagaattgaaacaaaaccgcttgatcattcttatttcgcacaacccaagcacgctaaaattagccactaagcatgtgaaattagagcatgggcgtttgacagaatgctaa

SEQ ID NO: 22691 - DNA, 843 bp, Helicobacter pylori
atgttgaattttttatccatttcaagcgagcctaaaattaaaagcctagctatcggtaaatttgacggcttgcatttagggcatcaagccctttttaaagagttaaaagatcccaaagcccttttaatcatagaaaaaaaacattacactaaaggctatttaacccccctaaaataccgcgctaaactcgtgggcatgcctttattttttgtgtatttagaagagatttcacaattaaacgccctagattttttagatcttttaaaaaagaaatttccccatttagaacgcctggtcgtgggctatgatttcaggtttgggcatgagaggcaaaatgacgctttatttttaaaagagcgttttgaaaaaaccattattgtgcctgaagtgaaagtccaagagattagcgtgcattctaagatgatcaaactagccctaagtcatggcgacttatctttagctaacaagctcttaggcagaccttatgaagtgtgtggggaagtcattagtgatcaaggtttggggcataaagaattagcacccactttaaatataaaaactaaagattttatcctccctagttttggggtgtatgcgagtttagtgaaaataaaagatccaatttatcaaaaaagcgtgagttttataggcaatcgcttaagcacggatcaaaatttcgccatagaatgccatgtccttgataccatcatagaaaacccgccccaagaaatcgctttgcgttgggttcaaaaaatacgagacaacatgcgtttttcttctttaaaagagcttaaaaatcagatccaacaagacatcttaagagccaaagagattttgagataa

SEQ ID NO: 22692 - DNA, 1926 bp, Helicobacter pylori
atgcgattgagtaacgctgacttagaacgattaaaaagcatggcgaatgcacttcgctttttgtgtgcggacatgatagataaggctaatagcgggcatccgggcgtgtgcttgggattagctgatgtgatggtggttttaagcttgcacctaaacctaaaccccactaaccctaaatggctcaatagggataggctggtttttagcggagggcatgcgagcgcgttagcgtatagtttgttgcatttgtggggctttgatttgagtttagaagatttaaagcgtttcaggcaattacactctaaaaccccaggacaccccgaattgcaccacaccgaaggcattgagatcaccacaggtcctttggggcaaggttttgctaacgctgtgggctttagcatggcgagccaatacgctcaaaaccttttggataaagaagccatttctcataaagtctattgcttgtgtggggatggggatttgcaagaaggcattagttatgagagcgcttctttagccgggcaccttcgccttgataacctcattgtgatttacgacagcaaccagatcagcattgaaggcgctatcaatattagttttagcgaacaggttaaaacgcggtttgtggcgcaaaattgggaagtgctagaatgcgatgggcatgactatcaagcgattcataacgctttagaagaagccaaaaaatccaccaaacccacgcttttaatcgctcatacgattattggtaagggggctgttggcttagaggggagtgaaaaaacgcatggctcgcctttaaataaagaagtgttaaaacaatccaaagaaaacgctcaaatcaatcctaacgaaagctttatcattagcccaaaaaacaaaatgcattttgaagaagtgaaagttaggggcgttagtttagaagccttatgggaaaaatccttaagccctaaaataaaagaaaagatccatgcgttaaaggattttgattttagcgccatccattaccccacctttaaaaaaggcgaatctctagccacgagagtgagtaacggcatgattttaaacgctatcgctaaagaatgcgagggctttttaggggggagcgcggatctagccccctctaacaacacgcagttaaaacactctggcgatttccctttagggcaaaacttgcattttgggatcagagagcatgccatgggggctatcactaacgctttagcggcgtatggcttgtttgtgcctttttgcgcgaccttttttgtgtttagcgattacttgatgcccagcattcgtttgagcgctttaatgaaactgaaagccctttttatcttcacgcatgacagcattggcgtgggtgaagatggagcgacgcaccagcccatagagcaattgaaccatttacgcgctttgcccaatttctatgctttcagacccagcgacgcttttgaaaatacggcttgcatgcaaatagcgttaagtttgaacgctcctagtgggcttattttatcacgccagaatttacccgtgcttgatgaggtttctaaagagcgggttttaaaaggggcgtatgttaaacaccattctaaagatcccattatcacgcttgttgcgagcgggagcgaagtgtctttggctttagagagcgctaaaattttagagcgagaaaatatccaaacgcaagtcatcagcgcgccatgctttgacttgttgatagagcaagatgaaagctatcttaaagaactttttaagggtaaagtcttagtcattgaagcgagccgcgcgatagagtggtatcgttttgcggataaaatcattggcatggattcttttgggagctcagcaaagggcgataaactctttgaaaaatttggctttagcgttgaaaacattaccgctcaagcgaaaagattactcaacgcatga

SEQ ID NO: 22693 - DNA, 2577 bp, Helicobacter pylori
gtgcaaccgatgaaatctaaaaaactttatttggctttaatcataggggttttattagcgtttttaaccctatcttcatggctgggtaatagcggtttagtggggcgttttggggtgtggtttgccgcactcaataaaaaatattttgggcatctttcattcattaatttaccctatttagcatgggttttattccttttatacaagactaaaaacccttttacagaaatcgttttagaaaaaactttagggcatctattaggcattttatctttgctctttttacaatctagcctattaaatcaaggggaaatcggcaacagcgcgcgtttgtttttacgcccttttataggggattttgggctttatgcgctgataacgcttatggtagttatttcttatttgattctattcaaactaccccctaaaagcgttttttatccttatatgaacaaaacacaaaaccttttaaaagagatttacaaacaatgcttacaagcctttagccctaattttagcccaaaaaaagagggttttgaaaacaccccatcagatattcaaaaaaaagaaaccaaaaacgacaaagaaaaagaaaaccgcaaagaaaaccctattaatgaaaaccacaaaacccctaacgaagaaccgtttttagcgatccctaccccctataacacgactttaaatgattcagagccgcaagaaggcttagtccaaatttcctcccacccccctacccattacaccatttaccctaaaagaaaccgatttgatgatttgactaaccccactaacccccctttaaaagaaattaaacaagaaactaaagaaagagaacccacgcctacaaaagaaactcttacgcccaccacgcccaaacctatcatgcccacacttgcacccataatagaaaatgacaacaaaacagaaaaccaaaaaacccccaaccaccctaaaaaagaagaaaacccacaagaaaacacgcaagaagaaatgatagaaggaaggatagaagaaatgataaaggaaaatctaaaaaaagaagaaaaagaagtgcaaaacgctccaaactttagcccagtaacccccacaagcgctaaaaaacccgttatggttaaagaattgagcgaaaataaagagatattagacggattggattatggcgaagtgcaaaaacccaaagattatgagcttcccaccacgcaattattgaatgcggtttgtttgaaagacacttctttagacgaaaacgagattgaccaaaaaatccaggatctattgagcaaactgcgcacctttaaaattgatggcgatattatccgcacttattcaggccctattgtaaccacttttgaattccgcccagcccctaacgttaaggtgagtcgtattttaggcttgagcgatgatttagcgatgactttatgcgctgaatccatccgcattcaagcccctattaagggtaaagatgtcgttggcattgaaatccctaacagccaaagccaaattatttatttaagagaaattctagagagcgaattgtttcaaaaatccagctcgcccttaactctagctttaggcaaagacattgtgggtaaccctttcatcacggatttaaaaaagctcccccatttgctcatcgctggcacgacaggaagcggtaagagcgtgggcgtgaatgcgatgattttatccttactttataaaaaccctcccgatcaactcaaattagtgatgatcgatcccaaaatggtagaatttagtatttatgcggatatccctcatttgctcacgcccattatcaccgaccctaaaaaagctattggggctttgcaaagcgtggctaaagaaatggaacgccggtattctttaatgagcgaatacaaggttaaaaccattgattcttataatgaacaagccccaagtaacggcgttgaagcgttcccctatttgattgtggtgattgatgaattagcggatttaatgatgacagggggcaaagaagcggagtttcctatcgctagaatcgctcaaatggggcgcgcgagcggcttacacctcattgtagcgacccaacgcccaagcgtggatgtcgtaaccggcttgattaaaaccaacttgccttcaagggtgagttttagggtaggcactaagattgattctaaagtgattttagacactgatggggcgcaaagcttgttaggaagaggcgatatgctctttacccccccaggagcgaacgggttagtgcgcttgcatgccccctttgccactgaagatgaaatcaaaaaaatcgtggattttattaaagcccaaaaagaagtacaatacgataaagatttcttgctagaagaatcacgcatgcctttagacacccctaattatcaaggcgatgacattttagaaagggctaaagcggtgattttagaaaaaaagatcacttctacgagttttttacaacgccaattaaaaatcggctacaaccaagccgctaccattactgacgaattagaagctcaaggctttttatccccaagaaacgctaaaggcaacagagagattttgcaaaacttttag

SEQ ID NO: 22694 - DNA, 1284 bp, Helicobacter pylori; identical to SEQ ID NO: 22527

SEQ ID NO: 22695 - DNA, 1278 bp, Helicobacter pylori
atgttagattttgatttggttctttttggcgcgactggggatttagccatgcgaaagctctttgtttcgctctatgaaatttatactcattatggttttaaaaacgattctaggattatcgcatcggggcgtaaggagctatccaatgaagaatttttaacactcctttgtgagaaaacacaactgcattcaagagaaaagggtagggaatttttagcccatatcagttatttgtgcgttcgtttggataaccctaaagactttgaagaattgagtaaaatcgctacaaaaaataaacccttgattttctacttttctatctcgcctagtttttttgcaacgaccgcccaacatttggccaaaaacgcgctcaatcacgccaacacacgcttgattttagaaaagcctttagggcatgatttaaagacatgtaaagagattttccaaagcattagcgttttttttaaagaagaacaaatctttagaatcgatcattatttagggaaaaagggcgttcaaaatatccttgaattgcgcctgaataaccctattttaaatattttatgggatcaaatcagcgcagttgaaatctgcgtgtatgagactttgggggtggaagaaagaggcgaattttacgataaaatcggggctttaagggatatggttcaaaaccatctcttgcaagttttatcccttatcgctacagatttacccaacaatttaaaggatttgaggaaagaaaaaatcaaagttttaaaaaccttacaaccccctaaagattttaaaaaacaggttattcgggcccaatatcaaggctatagagatgaaaataaggtccataaagagagccagacagagacttttgttgctattaaagcctttttggatacgcccaaatttaaaggcgtgcctttctaccttaagcacgctaaaaaaatgccccacaaccaagcgagcgtgaaaatccattttaacgcggtcaatacgctagaatttttcctctctcaagataaaatcaccctcaccctaaaagatcatcaaaacccccttattttagaaacccataacaaacaagaatttttacggccctacgctaaattgctctatgatgcgatacaaaataaccacaataatttcgcccaccagttggaattagaagcgtcatgggtttttattgacacgctcatagagggttttatgaataacgccacgcccttatattcctatgaaagccaccatctaaacgaatcagaatttttaaaaccactctatcaataa

SEQ ID NO: 22696 - DNA, 1047 bp, Helicobacter pylori
atgagagttcaatctaaaggttttgctattttttctaaagacgggcatttcaaaccccatgattttagccgccatgctgtaggccctaaagatgtgttgattgacattctttatgcagggatttgtcatagcgatattcatagcgcttatagcgaatggaaagaaggcatttaccctatggttcctgggcatgaaattgctggggccatcaaagaagtgggtaaggaagttaagaaatttaaggttggcgatgtggtgggcgtgggctgttttgtcaattcatgcaaagcgtgtaagccctgtaaagaacaccaagagcaattttgcgccaaagtggtattcacttacgattgtttggattatttccatgacaacgaaccccacatgggcggatactctaataatattgtagtggatgaaaactatgtgattagcgtggataaaaacgctcctttagaaaaagtagcccccttgctttgtgcgggcatcaccacttattcgcccttaaaattttctaaggttactaaaggcacaaaagttggcgtcgctgggtttggcgggctaggaagcatggcggttaaatacgctgtggctatgggggctgaagtgagcgtttttgcaagaaacgaacacaaaaagcaagacgctttgagcatgggggttaaacatttctacactgaccccaaacaatgcaaagaggaattggactttatcatttcaaccattcctacccattatgatttaaaagactacctcaagctcttaacttataatggcgatctagcccttgtgggactcccccctgtagaaatcgctccagcgcttagcgtttttgattttatccatttaggcaatcgcaaggtttatggctcattgattgggggcattaaagaaacccaagaaatgatggatttttctatcaaacacaatatttaccctgaaatagatttgatcttaggcaaggatattgacaccgcttatcataatctaacccatgggaaagcgaaattccgctatgtgattgatatgaaaaaatcgtttgattaa

SEQ ID NO: 22697 - DNA, 1323 bp, Helicobacter pylori
gtgttagaacgctatgcgaatgaagaaatgaaagccctatggaatgagcaaaccaagtttgaaacctatttagaagtggaaaaagctgtcgttagggcgtggaacaagcttgggcaaatccaagatagcgattgtgaaaaaatctgtgcgaaagcggcattcaatcttgaacgcatcaaagaaattgaaaaaaccactaagcatgatttaatcgctttcactacttgcgtggctgaaagcttgggcgaagaatcccgctttttccattatgggatcacttctagcgattgcattgatacggctatggcgttattgatgacaaaaagcttaaaactcattcaaaaaggcgttaaaaacctttatgaaacccttaaaaacagggctttagagcataaagacacgctgatggtgggcagaagccatggggtgtttggcgaacccattacttttggcttagtgttagccctttttgctgacgaaatcaaacggcatttaaaagccttggatttaacgatggaatttatcagcgtgggagcgatcagtggggctatggggaatttcgcacacgcccctttagaattagaagaattagcgtgcgaatttttaggcttaaaaaccgccaatatcagcaatcaagtcattcaaagggaccgctacgctaggcttgcatgcgatctggctcttttggcgagcagttgtgaaaaaatcgctgtcaatatccgccatttgcaacgcagtgaagtctatgaagtggaagaagctttttcaacagggcaaaaagggagctctgcgatgcctcacaaaagaaaccccatattgagcgagaatatcaccgggctttgcagggtgattcgctcttttacgacccctatgctagaaaatgtcgccttatggcatgaaagagacatgagccatagctctgtggagcgttttgccttgcccgatctgtttatcactagcgattttatgctcagccgcctgaatagcgtgattaaaaatttggtggtttatcctaaaaacatgcttaaaaatttagctttgagtggagggttagttttttcgcaacgggtgttattggaattgcccaaaaaaggtttgagccgagaagaaagctattctatcgtgcaagaaaatgcgatgaaaatatgggaggttttgcaacaaggcgcttttaaaaacactgatgaaaatttgtttttaaacgccctactcaacgatgaacgcttgaaaaaatatttgagcgaagatgaaatcaaagcatgttttgattacaattattacactaaaaatgtgggggcgatttttaaaagggtgtttgaataa

SEQ ID NO: 22698 - DNA, 1704 bp, Helicobacter pylori
atgagacggagttttttgaaaacgattggcttgggtgtgatagcactctttttgggtttgttaaaccctttgagtgcggcgagttacccccccattaaaaacactaaagtaggcttagccctttctagccacccgctagctagtgagatcgggcaaaaggttttagaagagggaggtaatgcgattgatgcggctgtagcgataggttttgctcttgcggttgtccatccggcagcaggcaatattggtggaggcggttttgcggttatccatttggctaatggtgaaaatgttgcgttagattttagagaaaaagcccccttaaaagccactaaaaacatgtttttagacaagcaaggcaatgtagtccctaaactcagcgaagatggctatttggcggccggggttcctggaacggtggcaggcatggaagcgatgctgaaaaaatacggcactaaaaaactatcgcaactcattgatcctgccattaaattggctgaaaatggttatgcgatttcacaaagacaagcagaaaccctaaaggaagcaagggagcggtttttaaaatacagttctagcaaaaagtatttttttaaaaaaggccatcttgattatcaagaaggggatttgtttgtccaaaaagatttagccaagactttgaatcaaatcaaaacgctaggcgctaaaggcttttatcaagggcaagtcgctgagcttattgagaaagacatgaaaaaaaatggagggattatcactaaagaagatttagccagttacaatgtgaaatggcgcaaacccgtggtagggagttatcgtgggtataagatcatttctatgtcgccgccaagttcgggaggcacgcatttgatccagattttaaatgtcatggaaaatgcggatttaagcgcccttgggtatggggcttctaagaatatccatatcgctgccgaagcgatgcgtcaggcttatgcggatagatcggtttatatgggagacgctgattttgtttcggtgccggtggataaattgattaataaagcgtatgccaaaaagatttttgacactatccagccagatacggttacgccaagctctcaaatcaaaccaggaatggggcagttgcatgaggggagcaataccacgcattattctgtagcggacaggtgggggaatgcagtcagcgttacttacaccattaacgcttcttatggaagcgctgccagtattgatggggcaggatttttattgaacaatgaaatggatgatttttccatcaagccagggaatcccaatctctatggtttagtagggggcgatgcgaatgcgattgaagccaataagcgccctttaagctccatgtcgcctacgattgtgttgaaaaacaataaggtttttttggtggtgggaagccctggagggtctaggattatcactacggtgctgcaagtgatttctaatgtcattgattataatatgaatatttctgaagcggtttcagccccaagatttcacatgcaatggctccctgatgaattaaggattgaaaagtttggcatgcccgctgatgtgaaagacaacctcactaaaatgggctatcaaatcgttactaagccggtcatgggtgatgtgaatgcgatccaagttttgcctaaaactaaagggagcgttttctatggttcaacggatccaaggaaagaattttaa

SEQ ID NO: 22699 - DNA, 1512 bp, Helicobacter pylori
atgtcccaactaaaattggaagaaatcagctcggttattgaagaaaaaatcaagaattttgaacttgattgcgatatggctgaagtaggaaaagtcgtttcatacgctgatggtgtggctaaggtttatggcttaaatggtgtgatgtcgtatgaagtgctggagtttgaaacaggggataaaggcgttgcggctaacttagaagaagatagcgttggcgtgattgtgtttggttttggcaacaatattaaagaggggactagcgttaaacgcacgaagagtttgatgaaagttcctgttggcgatgcggttgtagggcgtgtgctaaacgctttgggtgagcctattgatggcaagggtgagatagaaacgaatgagtttagcctaatagagcaaaaagccccgggcattatggacagaaaatctgtgcatgagcctttgcaaacaggcattaaagccattgatgcgttagtgcctattgggcgcgggcaaagggaattgattattggggataaacaaaccggtaaaaccaccgtagcgatcgatgcgatcattaaccaaaaagggcaaaatgtgatctgtatctatgtggctattgggcaaaaagaatccactgtcgcgcaagtggtccgcaaattagaagaatatggggcgatggaatacagtgtcgtgatcaacgcttcggcttcagattcagctgcaatgcaatatttagccccttattcaggtgtggctatgggggaatactttagagatcatgcccgccatgccctaatcatttatgacgatttgagtaaacatgctgtcgcttacagagagatttctttgattttgaggagacccccaggtagggaggcttttcctggagatgtgttttatatccactcacggcttttagaaagagcggctaaactttgcgatgaaaagggtgccggctctttgaccgcactccctattgtggaaactcaagcgggcgatgtttcagcttatatccctacgaatatcatttctattacagacgggcaaattttcttagaaacggatttgttttattcagggattcgcccggctattaatgtgggcttgtcggtttcaagggttggaggggccgctcaaatcaaagcgaccaagcaggtttcagggactttgcgcctggatttagcgcaatacagagagttgcaagccttcacgcaattcgcttctgatttagatgaagcgagtaaaaagcaattagaaagggggcaacgcatggtggaagtgctgaaacaagccccttattcgcccttgcccattgaaaagcaagtggtcattatttatgctggggctaagggctttttagatagcgtgagcgtgaaaaaagtcgtggattttgaagagcaactgcaccctttcttggaagcaaaatacccccaagttttagaagaaatccacactaaaaaagcgctagataaggatttagaagccatgctaagaaaagtcttagaggaatttaagctcacttatagcgagtag

SEQ ID NO: 22700 - DNA, 795 bp, Helicobacter pylori
atgatgagtgaaatcattgcggtggctaatcaaaaagggggtgtgggcaaaacaacaacagcggttaatttagcggcttctttagcggtgcatgaaaaaaaaatcttgttgattgattttgaccctcaagccaacgccacttcaagcttgggttttaggcgcgataaaattgattatgatatttatcatgtgttgattggtcgtaagcaaatttctcaagtgatcttaaaaacccaaatgccttttttggatctagtgccttctaatttgggtttagccgggtttgaaaaaaccttttatgatagccaagatgagaacaaacgaggcgaactcatgcttaaaaacgccttagagagcgtggtagggctttatgattatattattattgattccccgccagctctagggcctctcacgatcaattcgctttcagcagcccattcggtgatcattcctatccaatgcgagttctttgcccttgaaggcactaaattattgcttaacaccattagaatgctgcaaaaaagcacgaaccctaagctcaaaatcagaggttttttacccacaatgcatgtccctcaactcaatttgacaaaaggggttttagcggaattgttcaagtattttgactcagaattttttagagattcagctacaggagagtatattatgatccctaaaagcgtgaaactagcggaatcgcctagctttggtaagcccatcttgctctatgatattaaatctaatggcagtatcgcttatcaaaaattagctcaaagcattcttcaggggtag

SEQ ID NO: 22701 - DNA, 357 bp, Helicobacter pylori
atgaaaaaccgctacattcagcagtttgaagacgctcaattaaaagacaagaccatgccagcatttaaagccggcgatactttgaggcttggtatcaccattaaagaaggcgaaaaaacacgaactcagtattttgaaggcgtgtgcattgcgattagaggcaatggtgtggataagactttttgcgtgcgtaaaataggggctaacaatatcggcgtggagaaaattttccctttttatagcgaaagtttggcgagcgttgaggtgttgcgtgtgggtagggtgcgccgtgcgaagctctactacttgcgcgataggagaggtaaggcagcaaggattaaagaagtccgccattaa

SEQ ID NO: 22702 - DNA, 690 bp, Helicobacter pylori
gtgaaattcagcgttttaacccttttcccgcaactcgtatggccttattttgaagattctattttaaaaagagcgttagaaaaaaatctttttgaattggaagtgttaaaccttagggattttagcgctaataaatatcaaaaagcggatcacacgctcattggtgggggtgcagggcagattttagaccctgagatggtagaaaacgcgctccactctgttaaaaaccctaaacacacgatttttttaagcgcggtgggcaagcctttcaagcaaacagatgcgatgcgtttggctcaaaaaaagcatgtcgttttggtgtgcgggcgttatgagggctttgatgaacgctctattgaacttggtgctgatgaggttttttgtataggcgattttattttaacagggggcgagcttggggcgttgtgcttgatagatagtatcgctcgccacattcaaggggttttgggtaacgctcaatctttagaaaatgagagctttgaaaaccattatttggaagcccctaatttcgctaacgctgtttttaaatccaaagaaatcaataaaatccctgcacctttagaatattctaaaggaaatcatgctaaaatcaagcaactgaaacttgatttgtcaaaattaaggacgaaattttaccgccttgatttattcaaacagcacaaatcatga

SEQ ID NO: 22703 - DNA, 555 bp, Helicobacter pylori
atggtttctatgcttttagtgggcagaattggtaaaagcgtggggcttaatggggggttaaggcttcatttagagagcgattttccggagtgcttaaaaaaaggcgttaaggtgagtgtcgctcccttgaacgctttctcttgcgtttcttcttttaaagaatatataatccattcttatgaacatgctaaaaacctgttgtttttagaaacgatccaaacgcctgaaaaggctaaagagctgactaatttagggctttttatgagcgaagcagagagcaagaaactctgtgttttaaaagagggggagtttttttattgcgatttagtagggcttagcgtggtggaagaaaacgagattctaggaaaagtcatagaaatccaaaggatttctcaaacagattattttctggttgaaaccacgctgaacttggttgaaaaaggtttggctaagatttttttaatcccttatagggatttttatatccaagaaatccttttgcaagacaaaaaaataaccacccataacgctaaaacgcttttagagaatagttga

SEQ ID NO: 22704 - DNA, 348 bp, Helicobacter pylori
atgcacgaatcagatcctttaaacacgcctttttctcaagctgattgtaaggactattcgcattgcgtggcaacttttttagagaaatatttaaaaaaggttgtttcttttcctcaagctttgagcgtggaacacacgcttttagaagataaagtcaaacaaatcactatttatacccacccatcagacatggggcatgtgatcggtaaagagggcaaaatggtgagcgcgattaaggcgtttatttctggtgtgaaagccaaagacgggttttcttataaaatcgttgtttttgctagtaaaaacggcgataaaaatccccatgttttaggcgatcaaacgccttga

SEQ ID NO: 22705 - DNA, 231 bp, Helicobacter pylori
atgacagtcattagactcactcgtatcgggagaaagaaaaagcctttttacagagtggtggtaaccgattctaggaaaagaagggatggaggctggattgaatccattgggtattacaaccctttaagcgagcctaaagatattaaaattgataaggagcgcttgaattactggaaaggcgtgggggctaaaatgagcgagagggtggaaaaactttctcaaaaagcctaa

SEQ ID NO: 22706 - DNA, 1347 bp, Helicobacter pylori
atgtttcaagcgttaagcgatgggtttaaaaacgcgctcaataaaatccgctttcaagatgatgaaaaagcgctagacagagcgttagatgaattgaaaaaaacgctcttaaaaaacgatgtgcatcataaagtggctagagaattgctcaaaaaagtggaaagtcaaactaaacttaatggcattggtaagcagcaatttttagacgctttagaaaagagtttgttagaaattttaagcgctaaagggagcagtggtttcactttcgctcaaacgcccccaactgtggttttaatggccggtttgcaagggagcggtaagacaaccaccaccgctaaactcgctcattatttaaaaaccaaaaataaaaaagtgcttttatgcgcatgcgatttgcaacgcctagcggcagtggagcaattaaaggttttgggcgaacaggtgggcgtggaagttttttatgaagaaaataaaagcgtgaaagaaatcgctagcaacgctttaaaaagggctaaagaagcgcaatttgatgttttgctcgtggatagcgcggggcgtttagccattgataaagagcttatgcaagaattaaaagaagttaaagaaatcttaaacccccatgaagtgctgtatgtcgcagacgcattgagcgggcaagatggcgtcaaaagcgcgaacacctttaatgaagaaataggcgtgagtggggtggtgttaagcaaatttgatagcgattctaaagggggtatcgccttaggcatcacttaccaattaggcttacccttgcgttttattgggagcggggaaaaaatccctgatttagacgtgtttgtgcctgaaagaattgtggggcgtttgatgggggctggagatattgtctcgctcgctgaaaaaaccgctagcgttttaaaccctaatgaagccaaagatttaagcaaaaaactcaaaaaagggcaattcactttcaatgactttttaaaccagattgaaaaagtgaaaaaattaggctctatgagttctctaatctctatgattccaggtttagggaatatggcaagcgcgttaaaagacacggatttagaaagctctttagaagtgaaaaaaatcaaggctatggtcaattccatgaccaaaaaagagcaagaaaaccccgagattttaaacggcagccgaagaaaaaggatcgctttagggagcggtttagaagtgtctgaaatcaatcgcatcatcaaacgctttgatcaagcgagcaaaatggcgaaacgcttaaccaataaaaagggtattagcgatttgatgaatctaatgagtcaggctaaaaatcaaacgccccctaaaatgcgctaa

SEQ ID NO: 22707 - DNA, 2625 bp, Helicobacter pylori
atgataatgaaacaagaacccaccacctaccaaccagaagagatagaaaaaaagatttatgaaatttgctctcatagggggtattttgaaattgatggcaatgaagcgatccaagaaaaaaacaaacgattttgcttgatgatgccccctcctaatgtgaccggtgtgttgcacatagggcatgccctgactttaagcttgcaagatattttagcgcgttacaaacgcatggatgggtataagactttgtatcagcccgggttggatcacgctggcattgcaacgcaaaatgtcgtggaaaagcagcttttaagtcaagggattaaaaaagaagatttagggcgtgaagagttcattaaaaaagtgtgggaatggaaagaaaagagcgggggagcgattttagagcaaatgaagcgtttaggcgtgagcgcggccttttctaggactcgtttcacgatggataagggcttgcaaagagcggtcaaattggcgtttttgaaatggtatgaaaaaggtctcattattcaagataattacatggtgaattggtgcactaaagatggggcgttgagcgatattgaagtggagtatgaagagcgtaagggggcgttgtattatattagatattatttagaaaatcaaaaagattatttagtggtggctaccacacgccctgaaaccttgtttggcgatagcgcgcttatggtcaatcctaacgatgagagatacaagcatttggtggggcaaaaagcgatcttgcctttaatccatcgcacaatccctattatcgctgatgaacatgttgaaatggagtttggcacagggtgtgtgaaagtaacccctgggcatgattttaacgattatgaagtgggcaaacgccaccatttggaaacgattaaaatctttgatgaaaaggggattttaaacgcgcattgcggggagtttgaaaatttagaacgattagaagctagagataaggtcgtagaaagattaaaagaaaacgccctattggaaaaaatagaagaacacacgcatcaagtggggcattgctatcgttgtcataatgtggtagaaccttatgtgtctaagcaatggtttgtcaagcctgaaatcgctcaaagttctattgaaaaaatccaacaaggtttggcgcgattctacccttctaattggatcaataattacaacgcttggatgagggaattacgcccttggtgtatcagcaggcaattgttttgggggcatcaaataccggtattcacttgcgagaataaccaccagttcgtaagcttagacacccccttaagttgccctacttgtaagagcgaaacactagagcaagataaggatgtgctagacacatggtttagttcagggctatgggcgttttccactctagggtgggggcaagaaaaaagcggtttgtttaatgaaagcgatttgaaagatttctaccctaacacaacgctcattactgggtttgacatcctctttttttgggtggctaggatgcttttttgcagcgaatcgcttttaggcgaattgccctttaaagatatttacttgcacgccttagtgagagatgaaaagggtgaaaaaatgagcaaatctaagggtaatgtgatcgatcctttagagatgatagaaaaatacggcgcggatagcttgcgtttcactttagccaatttgtgcgctacgggtagggacattaagctttccactacgcatttagaaaataacaagaatttcgccaacaagctttttaatgcggcgagttacttgaagctcaaacaagaatctttcaaagataaagagcgtttgaatgaataccaaacgcctttggggcgttatgcgaaatcgcgcttgaattcagcgactaaagaggcgcgtaacgctttagataattatcgttttaatgacgccacgactttgttataccgctttttgtggggggaattttgcgactggttcattgaattttctaaagtggaaaatgaagcgatagacgaattagggagcgtgttaaaagaggctttaaaactcttgcaccctttcatgccctttatcagcgagtctttataccacaagctcagcaatacggaactagaaaacactgaatctatcatggtcatgccttaccctaaagatttggcgcaagatgaaaaattagagcatgaatttgaagtgattaaagattgcattgtgtctttaaggcgtttaaaaatcatgctagaaaccccaccgattgttctaaaagaagcgagcgtgggattaagagaagccatagaaaacacagagcgtttgcaaacttacgcccaaaaattagcgaggttggaaaaagtcagcgtgattagttctaagcctttaaaaagcgtgagcgatgtgggggaattttgccagacttatgcgaatttagaaaatcttgatttaagcccgcttgttgcgcgtttgaaaaagcagttggaaaaattggaaaaagaaaaattaaaactcaatttgcacaatgaaaattttgtcaaaaacgcgcctaaaagcgtgctagaaaaagctaaagagagtttaaaaacgcttttagaaaaagaaagtaaaattaagcaagaattggacttgttagaacaaccataa

SEQ ID NO: 22708 - DNA, 1062 bp, Helicobacter pylori
atgaaattcgctcttacagggggaggcacaggggggcatctctctatcgctaaagccttagccatagaattagaaaagcaaggcatagaggctatttatttaggctccacttacgggcaagataaagaatggtttgaaaatagccccttatttagcgaacgctattttttcaacacgcaaggcgtggtcaataaaagcttttttaaaaaaataggctctttattcttgcaagctaaagccgcttttaaggctaaagagattttaaaaaaacaccagatcacgcacaccattagcgtggggggttttagcgcagggccggcaagttttgcaagcttgctcaataaaatacccctttatatccatgagcaaaatgcgattaaaggctctctcaatcgctacctttcccctaaagctaaggcggtgttttcaagctatgcctttaaagataaaggaaatcatgttttaacctcctatcccgtgcaaaacgctttttttgattttgctaggactcgcacggaaatcaagcacattttatttttaggcggttcgcaaggggcaaaagcgatcaatgaattcgctttattaaacgctcccaaactcaccaaacaagggattaaaatcacgcacatttgcggccccaattcttatgaacaagtgcgttttttttaccaggaattagggctgttggataagatagaattgttcgctttccacaacaacatcacagaaatcatgcacagggcggatttgtgtgtgagtagagcgggtgctagtagcgtgtgggaattgtgcgccaatggcctacccacgatttttatcccctacccttttgcgagcaataaccaccagtattacaatgtcttagaatttgaaaaagaaaacctatgctatgtcgtgcctcaaaatgaattattgcctaaaaaactctttgaagtcattagaaagctcaaccaaaaagacgatcaaggcaataaaaacctaaccactatcagcaaccaattgcaacaaaaaatcgctaaagacggcgcaaaaaccattattgaaacgattttgagcgcctaa

SEQ ID NO: 22709 - DNA, 3693 bp, Helicobacter pylori
atgataaaaaaagctagaaaattcataccattctttttaattggctccctcttagctgaagacaatggctggtatatgtctgtaggctatcaaatcggtggcacgcaacaattcatcaataacaaacaacttttagaaaatcaaaatatcatcaacagcgtaacccaaagcgcgatcaacattgcagggcctactaccggccttatcactttaagctctcaaaccgtcattgacgctttaggctatggcgtgagtaacactgttggcaaccaattagagggcatttctaatatcttgaatcaaattggcaaaagaaaagacttttattctagccgtcaaatctctagcatttcccaacaaatcatagggcttaaaggaagctctgatcccttaaaagcccattcttcacagatcacagccaaactcctttccaacacccaaagcgcgtttgatcagggcatcgcgctaagcactaacatcattagctctatcaatagcctaaaccctagcaacaacacccaagaggttaaaaaacagctccaaaacaccgcgcaatccatgacagaattgttgcaacaaattgaacacagcatcactaaaaccactagcaccacttacgcgcaatccttactctccaatctaaccgatgcggtgaatgcctctagcaataataccgcttatgtgagcgctcttgttaacgctttaaacactttaggggtaggggttttccccaccacaaccacaacgcatgtggtgttaaacccaccgggacaagtcgtattctatccaaccaattccattttaggctctacttcttcaaacagcaataaccaacaacaatacaacaacacccttttaatgaacaccttacaagggacattaagcgctaatactcaaaataaccccaatggttgcgccaatcaagtccagtgtttggagcaattcatccaaaatttagcccctttagccgcaacccccacttcaaacaaccaggccaaccagcaagtccaagccatcgctcaaaagcttcaaagcgttgctatcaacactttagacaacaatgcgatcaacaacaccacctataatttaaacaatttgcacaacgctttgaatttccaagcctatgaaagcacgatagaacaatacaataacgctttaaaacaaatttcttggatcagttttactgagcctaaaaacttactcaaaaacacttccaataactaccaaatcggcaccgttaccaacgctcaagggcaaaatatcagcgcctatgattgcatgactgctaccggaagcctttctagcaatgcttctagcgggatttcatgctcagccacaagctccacaagttccacaaatagctttgacaattctttagtcgctacctccaaagtccaaaccatcaacggcaaagagcagatcggcgtgaattcttttaaccttgtctctcaagtgtggagcgtttataattctttaaaaacttcagaagaaaatttgcaaaaaaacgccaatattttatgcgctaatgggacgcaatctgggacaagctcatgcaatagctcttcagggggtttgagcatcagcgggaacgcccaattgcaaaatattttaagccctactagtgggactaccactaatactcaagctaaaagcaacgctcccaaactaaaagcgatggtggtggtgaataatgaagaagaagctaaaacggccaatttagcccaaagcagcgggacaaccacacaatctcctaacagcacggtgatgggagctttaaacaccgtgttgcaaaatgtcagcaatttccaacaaagcattcaaaacgcttttcaaaaccaagaaagtaatatccaagcttgggcgaatgcgatttataacactaatgggagtcagtcgcaagagatgacacctaacaataaccaagatttacgcatccaattgagggcgaatttttaccagctcatcaataccattaaccagcaagtgcctacagacatgaatgctttaattaatcaaagccaacaaacccaacaaacaagcggatcagcaagcaataataacgcatgcgcgagtggaatgagtgggagtaatggtaactggtgctatcagcaatggtccgattctaaggcttattacagcgggttgcaaagcgctttagggtatcaaacgcaagcgacaactcaaagcgggagcaatggtgggaacagcatcacctacaatgtccaacaaatcacgctcactagtaatggtttgctcaaccaaatcatcacaaatcttaagagcgttaatggaggcaatggcgcgagtggtacaggcagtgggaatggcaccagtcaaatcaacacagcctaccagatgctcacagacgccagcgatgggaaattagggacttatagtagtagtagtggcagtaataacggctatacgccatgcaatagcaccaatgggagcaataaaacgagtgggaacaattgttatgaacccaacaaacaacaaaacgccaccaccgcaaccgccacaaccgacagcaatttacaaaaagtctataatgacgcccaaaaaatagccaacattatcgccagctctgggaacaataaaggcgttgaaaacggcttaaaacaattctttgaagcgttaaaaaataatagcagcagtctcagtaatttatgtggtaatggtagtagcggtagtagtggcactacttgctccggttggcttatcaaccttttaggggcaatccccaccaatggagtgagcgatacgaataatttaattaatctgctcactgaattcattaaaaccgccgggtttatccaaaataatgatagtagtgtatctactagtcttacaagcgcttttcaagccattacgagcgctatttctcaagggtttcaagccttacaaaacgatattagccctaatgcgattttaaccttgctccaagagattacttctaacaccaccaccattcagtcattctcgcaaaccttacggcagcttttaggggataaaacattctttatggcgcaacaaaagctcattgatgcgatgattaacgccagaaatcaggttcaaaacgcgcaaaatcaagccaataactacggctctcaacccgttttaagccagtatgcggccgctaaaagcacccaacatggcatgagcaatggtttaggggttggtttgggctataaatacttctttggtaaagcgagaaaattaggccttaggcattattttttctttgattacggctttagtgaaataggcctagccaatcaaagcgtgaaagcgaatatctttgcttatggggtaggcacggattttttatggaacttattcaggaggacttacaacactaaagcgttgaattttgggctatttgctggggtccaactgggcggcgcaacctggcttagctccttaaggcaacaaatcattgacaactgggggagtgctaatgacatccattcaacgaattttcaagtggcgctgaattttggggtgcgcaccaacttcgcggagtttaagcgttttgctaagaaattccacaatcaaggggtcatcagccaaaagagcgtggaatttgggatcaaagtgcctctcatcaatcaagcgtatttgaatagcgctggagctgatgtgagttacaggaggctttatactttttatatcaattacatcatggggttttaa

SEQ ID NO: 22710 - DNA, 534 bp, Helicobacter pylori
atgcatttagacaggcagagtttagaaaaagccaagcacttgatccaaagcggtctgattgacaccatagaagtaggcacaatcaagggcttgcaagaaatccatcggtttttgtttgaagggttgtatgaatttgctgggaaaatcagggataaaaacattgctaaagggaatttcaggttcgctaactgcttgtatttggatttgattttacccagaattgagagcatgccgcaaaataatttcaatcaaatcgtagaaaaatatgtggagatgaatatcgctcacccttttttggagggtaatggcagagcgactaggatatggcttgatttgttgcttaagaaggaattgaaaaaaatcgtgctttgggataggattgataaagccgcttatttgagcgcaatggaaaggagtcctgtgaatgatttggaaatcaaaacgcttttaaaaaagcatttgagttctaataccaacgatcccttaactctcattaaaggcatcacgcagtcgtattattatgaagggctttga

SEQ ID NO: 22711 - DNA, 1638 bp, Helicobacter pylori
atgctaacccaattaaaaacttatccaaaattactcaaacattatgaagaaatcaaagaagtgcatatgcgcgattggttttttaaagacaaagagcgagcgagccgttattttttgcaatttgaaagcttgagcttggattattccaaaaaccgcctgaacgataccactttaaagcttctttttgaattagcgaatgactgctctttaaaagaaaagattgaagcgatgtttaagggcgaaaaaatcaacaccaccgaaaaaagggccgttttacacaccgccttaagaagcttgaatgacactgaaattttactagacaacatggaagtgttaaaaagtattaggagcgttttaaaacgcatgcgagcctttagcgatagcgtgagaagcggtaaaagattaggctataccaatcaagtgatcaccgatattgtcaatatcggcattggggggtcagatttaggcgctttaatggtttgcaccgccttaaaacgctacgcccacccgagattaaagatgcattttgtgtctaatgtggatggcacacagattttagatgttttagaaaaactcaatccagccagcacgctttttatcgtggcttctaagactttttccactcaagaaaccttaaccaacgccctaaccgctagaaaatggtttgtagaaaggagtggcgatgaaaagcatatcgctaagcactttgtagcggtatccaccaataaagaagccgtgcaacaatttggcattgacgagcataacatgtttgaattttgggattttgtaggggggcgctatagcttgtggtcggctattggcttatccattatgatctatttagggaagaaaaattttaacgctcttttgaaaggagcgtatctgatggatgagcattttagaaacgccccttttgaaagcaatttacccgttttaatggggctaattggcgtgtggtatatcaattttttccaatccaaaagccatttaatcgctccttacgatcagtatttaaggcatttccctaaattcatccagcaattagatatggaaagcaatggcaaacgcatcagcaaaaaaggcgaaattatcccctatgacacatgccctgttgtttggggcgatatgggcattaacgctcagcacgcctttttccagctcttgcatcaaggcacgcatttaatacccattgattttatcgcttccttagataaaaagcctaacgctaaaggccaccatgagattttattcagcaatgttttagcgcaagcgcaagccttcatgaaaggcaagagttatgaagaagcgcttggggaattgctctttaaaggattagacaaagatgaagccaaagatttagcccaccacagggtgttttttggcaaccgcccctctaatatccttttattagaaaagatttcaccaagcaatattggagcattagtggctctttatgagcataaagtctttgtgcaaggggtcatttgggatattaacagctttgatcaatggggcgtggagcttgggaaagaattggccgtgccgattttacaagaattagaggggcataaaagcaacgcttattttgacagctccactaagcacttaatagaattgtataaaaattacaaccaatag

SEQ ID NO: 22712 - DNA, 654 bp, Helicobacter pylori
atggcattagattgggattttatgtttcactccatccctgcgttttttaaggggttagaactcacgctttatatttctttctttgggattttgctctctcttttggtggggtttttgtgcgcgatcgttttgtattttaaaacgcgctttctctctcctgttgtctatatctatggcgaaatcgctaggaacacgcccctgctcatccagcttttctttttgtattacgggttgaatgaaatcggtttgagcgctttagagtgcgcgattttagcgttagggtttttgggtggggggtatatgagtcaaagttttttgcttgggtttaagagcctagcttccattcaaagagaaagcgctttgagtttggggtttagccctttgaaaatgatgtattatattattctgcctcaaagtttaagcgtttctatgccttccataggggcgaatgtgatttttttactcaaagaaacttcggtggtgggcgcgatagccctaaccgatattatgtttgtggcgaaagattttattggcatttattataaaacgactgaaagccttttgatgttaagcctcacttatttgatcgctttactccctttaagcgttttgtttgtgatcttagagcgtttctttaaaaagaaagtggcttaa

SEQ ID NO: 22713 - DNA, 834 bp, Helicobacter pylori
atgaaaacaaacgggctttttaaaatgtgggggctgtttttagttttaatcgctttagtctttaatgcatgttctgatagccataaagaaaaaaaggacgctttagaagtcattaaacaaagaggggttttaaaagtgggggtttttagcgataagcctccttttggctctgtggattctaaagggaaatatcaaggctatgatgtagttattgctaaacgcatggctcttgatttattgggcgatgaaaataagattgagtttattcctgtagaagcttcagctagggtggaatttttaaaagccaataaagtggatattatcatggctaatttcacgcgcactaaagaaagagaaaaagtcgtggatttcgctaagccgtatatgaaagtcgctttaggggtggtttctaaagatggggtcattaaaaatatagaagagttgaaagataaagagttgattgtgaataaaggcacgacagcggatttttatttcactaaaaattaccccaatatcaagcttttgaaatttgagcaaaatacagagacttttttagcccttttaaacaataaggctaccgctctagcccatgacaacactttattgctcgcttggacgaaacaacaccctgaatttaaattaggcattacaagccttggcgataaggatgtgatcgctccagcgattaaaaaaggcaaccccaagcttttagaatggttgaataacgaaatagattccctcatttctagcgacttcttaaaagaagcttatcaagagactttagcacctgtttatggcgatgaaatcaaaccggaagaaattatttttgaatga

SEQ ID NO: 22714 - DNA, 1224 bp, Helicobacter pylori
atgcaaaaaacttctaacactctggcgctggggagtttgacagcgctattctttctaatgggttttatcacggttttaaacgatattttaatcccacacttaaagcccatttttgacttgacctattttgaagcttcactcattcaattttgcttttttggggcgtatttcatcatgggaggagtttttgggaatgtgatcagtaaaatcggctacccttttggcgtggtgcttggttttgtgatcacagcgacggggtgcgcgttgttttatccggcggcgcattttggatcctatgggttttttttaggagcgttgtttattttagcgagcgggattgtgtgcttgcaaaccgctggtaatccctttgtaaccttgctttctaaaggtaaagaagccagaaatttggttttagtccaggcgttcaattcgcttggcacaactttagggcctatttttgggagcttgttgatttttagcacgactaaaatgggcgataatgcaagtttgatagataaattagcggacgctaaaagcgttcaaatgccttatttgggcttggcggtgttttcgcttcttttagcgctcatcatgtatcttttgaaattgcctgatgtggaaaaagaaatgcccaaagagacgactcaaaaaagcttgttttcgcacaaacactttgtttttggggctttggggatctttttttatgtggggggagaagtggcgattggctcattcttggtgctaagctttgaaaagcttttgaatttagactctcaatcaagcgcgcattacttggtgtattattggggaggcgcgatggtgggccgtttcttaggcagtgtgttgatgaataaaattgcccctaataaatacttggctttcaacgccttaagctctattgttctcatcgctttagccattatcattggaggcaagatcgctttattcgctctgacttttgtgggctttttcaactctatcatgttccctaccatcttttctttggctacgctcaatttagggcatctcacttctaaagcttctggggtgattagcatggcgattgtgggaggggcgttaatcccccccattcaaggtgcggttacagacatgctaacagcaaccgaatcaaatttgctctacgcttatggtgtgccgttgttgtgctatttttatattctcttctttgcgcttaaagggtataagcaagaagaaaactcctaa

SEQ ID NO: 22715 - DNA, 1926 bp, Helicobacter pylori
atgaaaaaaacgaaaaaaacgattctgctttctctaactctcgcggcgtcattgctccatgctgaagacaacggcgtttttttaagcgtgggttatcaaatcggtgaagcggttcaaaaagtgaaaaacgccgacaaggtgcaaaaactttcagacacttatgaacaattaagccggcttttaaccaacgataatggcacaaactcaaagacaagcgcgcaagcgatcaaccaagcggttaataatttgaacgaacgcgcaaaaactttagccggtgggacaaccaattcccctgcctatcaagccacgcttttagcgttgagatcggtgttagggctatggaatagcatgggttatgcggtcatatgcggaggttataccaaaagtccaggcgaaaacaatcaaaaagatttccactacaccgatgagaatggcaatggcactacaatcaattgcggtgggagcacaaatagtaatggcactcatagttctagtggcacaaatacattaaaagcagacaaaaatgtttctctatctattgagcaatatgaaaaaatccatgaagcttatcagattctttcaaaagctttaaaacaagccgggcttgctcctttaaatagcaaaggggaaaagttagaagcgcatgtaaccacatcaaaaccagaaaataatagtcaaactaaaacgacaacttctgttattgatacgactaatgatgcgcaaaatcttttgactcaagcgcaaacgattgtcaatacccttaaagattattgccccatgttgatagcgaaatctagtagtgaaagtagtggcgcagctactacaaacgccccttcatggcaaacagccggtggcggcaaaaattcatgtgcgacttttggtgcggagtttagtgccgcttcagacatgattaataatgcgcaaaaaatcgttcaagaaacccaacaactcagcgccaaccaaccaaaaaatatcacacaaccccataatctcaaccttaacacccctagcagtcttacggctttagctcaaaaaatgctcaaaaatgcgcaatctcaagcagaaattttaaaactagccaatcaagtggagagcgattttaacaaactttcttcaggccatcttaaagactacatagggaaatgcgatgcgagcgctataagcagtgcgaatatgacaatgcaaaatcaaaagaacaattgggggaacgggtgtgctggcgtggaagaaactctgtcttcattaaaaacaagtgccgctgattttaacaaccaaacgccacaaatcaatcaagcgcaaaacctagccaacacccttattcaagaacttggcaacaacccttttaggaatatgggcatgatcgcttcttcaaccacgaataacggcgccttgaatggccttggggtgcaagtgggttataagcaattttttggggaaaagaaaagatgggggttaaggtattatggtttctttgattacaaccacgcctatatcaaatccaatttctttaactcggcttctgatgtgtggacttatggggtgggcagcgatttattgtttaatttcatcaatgataaaaacaccaactttttaggcaagaataacaagatttcagtgggattttttggaggtatcgccttagcagggacttcatggcttaattctcaattcgtgaatttaaaaaccatcagcaatgtttatagcgctaaagtgaatacggctaacttccaatttttattcaatttgggcttgagaaccaatctcgctagacctaagaaaaaagatagtcatcatgcggctcaacatggcatggaattgggcgtgaaaatccctaccattaacacgaattattattcttttctagacactaaactagaatatcgaaggctttatagcgtgtatctcaattatgtgtttgcctattaa

SEQ ID NO: 22716 - DNA, 1176 bp, Helicobacter pylori
atgatgataaccaaacaatcgtatcaaaagttcgccttaatgcgggtttttgtgttttcgctttcggcgtttatttttaacaccacggagtttgtccctgtcgcgcttctgtcagatattgcgaaaagctttgaaatggagagcgcaacggtggggcttatgatcactgcttatgcatgggtggtgtctcttggctcattgcccttgatgctgcttagcgctaaaattgaaaggaaacgcttattgctttttcttttcgccctttttattctcagccatatcctttcagcgttagcgtggaatttttgggtgctactcctttctcgtatgggtatcgcttttgcccactctattttttggtccatcacggcttctttagtcattcgtgtcgcgccaagaaataaaaaacaacaggccttagggctgttagcgttagggagttcgttagcgatgattttagggttgccgcttgggaggatcattgggcaaattctagattggcgttccacttttggcgtgatcgggggcgttgcgacccttatagcgttgcttatgtggaaattgctcccgcatctacccagtagaaacgcaggcacgctcgcaagtgtccctgtattaatgaaacggccgcttttaatggggatttatttgcttgtgatcatggtcatctctgggcatttcaccacttatagttatattgagccttttatcattcaaatcagccaattttctcctgacattacaacgctaatgttgtttgtgtttgggttagcgggcgtggtggggagttttttgttcggccgtttgtatgcaaaaaattcaagaaaatttatcgcttttgcgatggttttagtcatttgcccgcaactcttgctttttgtgtttaaaaacttagagtgggtggttttcttgcaaattttcttatgggggattgggatcacttcgcttgggatttccttgcaaatgagggtgttgcagcttgcgccggatgccacggatgttgcgagtgcgatttactcagggagctataatgtggggattggatcaggagcgctgtttggcagtattgtgatccaccaactagggctaggatatattggctttgtgggtggggctttaggtttgttggcgctcttttggcttagattcattacgataaagtttaaaaaaacataa

SEQ ID NO: 22717 - DNA, 1041 bp, Helicobacter pylori
atgaagacttataatgtcgctattgttggggccagtggggcggtaggccaagagctgattaagggtttagaaaattcttttttcccaattaaaaaatttgtcccgctcgctagcactaggagtgctggtaaaaagatcaaagctttcaataaagactatgaaattttagaaaccacgcatgaagtttttgaaagagaaaaaatagacatcgccttttttagcgctggggggagcgtgagcgaagaatttgctacaagcgcttcaaaaacggccttagtggttgataacacgagcttttttagattgaataaagatgtgcctttagtcgttcctgaaatcaacgctaaagaaatttttaacgctcccttgaatatcatcgctaaccctaattgctccaccattcaaatgacgcaaatcttaaaccccttacatctccattttaagataaaaagcgtgattgttagcacctatcaagccgtgagtggggcagggaacaagggcatagagagtttaaaaaatgagttaaaaaccgctttagagtgtttggaaaaagaccccactattgatttaaaccaagtcttgcaagctggggctttcgcttatccgatcgctttcaatgcgatcgctcatattgatacttttaaggagaatggttacacgaaagaagagctaaaaatgctgcatgaaacccataaaatcatgggcgtggatttccctatcagcgcgacttgcgtgcgcgtgccggtattgaggagccatagcgagagtttgagtatcgcttttgaaaaagaattcgatctcaaagaagtctatgaagttttaaaaaacgcccctagcgtggctgtttgcgatgatcccagtcataatctttaccccacgcccctaaaagcgagccacacggatagcgtctttatagggcgcttgaggaaggatttgtttgataagaaaactttgcatggcttttgtgtggcggatcaattgagagtgggggcagccaccaacgcactcaaaatcgctctgcattacattaagaacgcttga

SEQ ID NO: 22718 - DNA, 1329 bp, Helicobacter pylori
atgattacccctaaagtgttgagcgggtttaaagaccgcttgcctaaagatgcgatacaaaaagcccagttgcttgcgaaagtttcagtcgtgtttcaaagttttggttttgtgccgattgaaacccctcatttggaatacgctcaaacgttattgcctgatgcgagcagtgatattcaaaaagaaatttatcgttttaaagaccatggggatagagatgtggctttaaggtttgatttgactgtgccattagcccgctttgtctctttgcaccaccaaacgctaggcatgccctttaaacgctacgctataggcaatgtctttaggggcgaaagggcgcaaaaagggcgttatagggaatttacgcaatgcgattttgattttatagggagcgagagtttggtgtgcgatgctgagatcattcaagtgattgtcgcttctttaaaagccctagatttagaagatttttgcgtctctatcaaccacagaaaaattttgaacgggatatgcgaatattttgggatctctcaagtgaatgaagcgttgcgcattgtggataaattggaaaaaattggcttgaatggggttgaagaagaattaaaaaaagagtgcggtttaaattcaaacaccattaaagagcttttagaattaattcaaatcaaacaaaacgatttaagccatgcggaattttttgaaaaaattgcttatttgaaagactataatgaaaatctaaaaaaaggcatacaggatttagaaaggctataccagttgctaggggatttgcaaatttctcaaaacctgtataaaattgatttttctatcgctaggggattagggtattatacagggattgtgtatgaaaccacgcttaatgaaatgaagtctttagggagcgtgtgttcaggggggcgttatgatcatttgactaaaaatttttctaaagagaatttacaaggggtaggggcttctattgggattgatcgattgattgtggctttgagtgaaatgcaattattagacgagcgctccacccaagccaaagttttaatcgcttgcatgcatgaagagtatttttcttacgccaaccgcttagcggagtctttaaggcaaagcgggatttttagtgaagtctatccagaagctcaaaaaatcaaaaaacccttttcttatgccaaccataaagggcatgagtttgtggctgtcattggcgaagaagaatttaaaagcgaaactttaagcttgaaaaacatgcattcaggcatgcagttgaattgcttgagttttttaaaagcccttgaaatcattggagaaaacgatgaagacttataa

SEQ ID NO: 22719 - DNA, 990 bp, Helicobacter pylori
atgcaacagcgtcatttaggccctttaaaagtgggtgcattagctctagggtgcatgggcatgacttatgggtatggggaagtccatgataaaaagcagatggttaaacttatccataaggctttggaattgggtattaacttttttgacactgcagaggcttatggggaagataatgaaaagcttttaggcgaagcgatcaagccttttaaagacaaggttgtggtagcgagcaagtttgggatttactacgcagatcctaatgacaaatacgcaaccatgtttttagactccagtcctaaccgcattaagagcgccattgaagggagtttgaaacgcttaaaagtagaatgcattgatttatactaccaacaccgcatggatactaacacgcccataggagaagtggcagaagttatgcagcttcttattaaagaaggaaaaattaaagcttgggggatgagtgaggcagggttatctagcatccaaaaagcccatcaaatttgccctttaagcgcgttgcagagcgaatattccttgtggtggcgcgaacctgaaaaagagattttaggttttttagaaaaagaaaaaattggatttgtcgctttttcgcctttgggtaaggggtttttaggcgcgaaatttgaaaaaaatgccactttcgctagtgaggattttagaagcgtttctcctaggtttaatcaagaaaatctagccaaaaattacgccttggtggaattaatccaagatcatgcacacgctaaaggcgttacaccagcccaactggctctctcatggattttgcacacgcaaaaaatcattgtccctctctttggcaccaccaaagaatctaggctcatagaaaatataggggctttgcaggtttcttggagtcaaaaagaattggagattttccaaaaagaattgactgcaatcaaaatagaaggggcccgctaccctgaaagaatcaatgaaatggtgaatcaataa

SEQ ID NO: 22720 - DNA, 2079 bp, Helicobacter pylori
atggctagaaaaaccccattaaataggatcaggaatattggtatcgccgctcacattgacgctgggaaaaccaccacttctgaaaggattttattctatacaggcgtgagccataagattggcgaagtgcatgacggcgcggcgacaatggattggatggagcaagaaaaagaaagagggatcactatcacttctgcggcaacgacttgtttttggaaggatcaccaaatcaatttgattgacaccccagggcatgtggatttcactattgaagtggaacgatccatgcgcgtgctagatggcgcggtttcggtgttttgctcggttgggggagtgcaacctcaaagcgagaccgtgtggcgtcaagcgaataaatacggcgtgcctaggattgtttttgtcaataaaatggataggattggagcgaatttctataatgtagaaaaccagattaagcttcgcttgaaagctaatcctgtgcctattaatatccctattggggctgaagacactttcattggcgtgattgatttagtccaaatgaaagcgatcgtttggaataatgaaaccatgggggccaaatacgatgtggaagaaatccctagcgatttgttagaaaaggctaaagaataccgagaaaagcttgtagaagccgtagccgagcaagatgaagccttgatggaaaagtatttgggcggtgaagaattgagtattgaagaaatcaaaaaaggcattaaagcgggttgtttgaacatgagccttgtccctatgctttgtggttcttcttttaaaaataaaggcgtgcagaccttattagacgcagtcattgattacttaccagcgcctacggaggttgtggatattaaggggattgatccaaaaaccgaagaagaggtttttgtgaaatccagcgatgatggcgagtttgccggtttggcgtttaaaatcatgacggatccttttgtgggccaactcacttttgtgcgcgtgtatcgcggcaagctagagtccggtagctatgtgtataactccaccaaagacaaaaaagagcgcgtgggaagactgcttaaaatgcactccaataagagagaagacattaaagaagtttatgcgggtgagatttgcgcgtttgtgggcttaaaagacacgctaaccggggacacgctttgcgatgaaaaaaatgcggtggttttagagagaatggaatttcctgagccagtcattcacatcgctgtggagcctaaaacgaaagcagaccaagaaaaaatgggcgtagcgttaggcaagctcgctgaagaagatccaagctttagggtgatgactcaagaagaaaccgggcaaacccttattggtggcatgggtgaattgcacctagaaatcatcgtggacaggttgaagagagaatttaaggtggaagctgaaatcggtcagccgcaagtcgcctttagagagactatccgctcaagcgtgagcaaagagcataaatacgctaagcaaagcggtggtcgtgggcaatacgggcatgtgtttatcaagcttgagcctaaagagcctggcagtgggtatgaatttgtgaatgaaatttctgggggcgtgatccctaaagaatatatccctgcggtggataagggtatccaagaagcgatgcaaaatggcgttttggcaggctatccggtggtggattttaaagttaccctttatgatgggagctaccatgatgtggattcttcagaaatggcgtttaaaatcgctggctctatggcgtttaaagaagcgagtcgcgcggctaacccggttttactagagcctatgatgaaagtggaagtggaagtccctgaagaatacatgggcgatgtgattggcgatttgaatagaagaagagggcaaatcaattctatggacgatagattaggcttgaaaatcgtgaacgcttttgtgccgttggtggaaatgtttggctattctacggatttacgatcagccacccaagggcgtgggacttactctatggagtttgatcattatggcgaagtgcctagcaatatcgctaaggaaattgtagaaaagcgcaaaggctga

SEQ ID NO: 22721 - DNA, 468 bp, Helicobacter pylori
atgagaagaagaaaagcacccgttagggaggttttgggcgatcctgtttatgggaacaaagtggttactaagtttatcaataagatgatgttcgacggcaagaaaagcgtagcggaaaaaatcatctacaaagcttttaataagattgaagaaaaaagcggtgaaaaagggattgaagtgtttgaaaaagccctagaaagagtgcgtcctttagtggaagtgcgcagcagaagagtgggtggggctacctatcaagtgccggtagaagtgagagcgagccgccagcagtcgctatctattcgttggattttagaagcgaccagaaaacgcaatgaaagaatgatggtggatagattggctaacgagcttatggatgcggctagcgataagggtgcggcttttaagaaaaaagaagatgtgcataaaatggcagaagcgaataaagcgttcgcacactaccgctggtaa

SEQ ID NO: 22722 - DNA, 408 bp, Helicobacter pylori
gtgcctactatcaatcagctgattagaaaagaaaggaaaaaggtggttaaaaaaaccaaatcacctgcattagtggaatgccctcaaaggagaggggtttgtactagggtttatacgactacccctaaaaagcctaactcggctttaagaaaggttgccaaagttcgtttgaccagtaaatttgaagtgatcagttatatccctggtgaagggcataacttgcaagaacactctattgtgttagtgcgtgggggtagggttaaggatttacccggtgtgaaataccacatcgttcgtggcgctttagacactgcaggggtcaataaaagaacggtttcacgctctaagtatgggactaaaaaagctaaagcgaccgacaagaaagcaaccgacaacaagaaaaaataa

SEQ ID NO: 22723 - DNA, 8673 bp, Helicobacter pylori
atgtcaaaaaaaattcccctaaaaaaccgcttgagagctgattttacaaaaaccccaacagatttagaagtccctaatttattattattacaacgagacagctatgattctttcttgtattctaaagagggtaaagagagcgggattgaaaaggtttttaaatccattttccctatccaagatgagcataaccgcatcactttagaatacgcgggttgcgaatttggcaagtctaaatacaccgttagagaagcgatggagaggggcattacctactctatccctctcaaaattaaggtgcgcttgatcttgtgggaaaaagataccaagagtggcgaaaagaacggcattaaggatattaaagaacaaagcattttcattcgtgagatccctttgatgacagaacgcacttcatttattattaatggggtggagcgcgtggtggtcaatcaactccacagaagccccggtgtgattttcaaagaagaagagtctagcacttctttaaacaagctcatttacacagggcaaatcattcctgataggggttcgtggttgtattttgaatacgattctaaagatgttttatacgctcgtatcaataaacgccgtaaagtgcctgttaccattttattcagggcgatggattatcaaaaacaagacatcatcaaaatgttctacccgcttgttaaagtgcgttatgaaaacgataaatatttgatcccgtttgcttcattagacgccaatcaaagaatggaatttgacttgaaagatcctcaaggcaaggttattcttttagcgggtaaaaagctcacttcaagaaagattaaagagcttaaagaaaaccatttagaatgggtggaataccctatggatattttactcaatcgccatttagctgagcctgttatggtagggaaagaagtcttattggacatgctcactcagctagataaaaacaaattagaaaaaatccacgatttaggcgtgcaagaatttgtgatcatcaacgatctggcgttagggcatgacgcttccattatccaatctttttcagccgattctgagtctttgaaattactcaagcaaaccgaaaaaattgatgatgaaaacgctctagcggcgattcgtatccataaggttatgaaaccaggcgatcccgttacgactgaagtggctaagcagtttgtcaaaaaacttttctttgatccagaacgctatgatttgaccatggtgggccgcatgaaaatgaatcacaagttaggcttgcatgtgcctgattacattacgactttaacgcatgaagatattatcaccaccgttaaatacctcatgaagatcaaaaacaatcaaggcaagattgatgacagggaccacttgggcaatcgtaggattagggcggtaggggaattgttggccaatgaattgcattcaggtttagtgaaaatgcaaaagaccattaaagacaagctcactaccatgagcggggcttttgattcgctcatgccccatgacttggtcaattctaaaatgatcacaagcaccatcatggaatttttcatgggcggtcagctctcgcaatttatggatcaaacgaatcccttgagtgaggttacgcacaagcgccgcctttcagcgctcggcgaaggggggttggtgaaagacagagtggggtttgaagccagggatgtgcaccccacgcattatggccgaatttgtcccattgagaccccagaaggtcaaaatatcggtctgatcaacaccctttccactttcacaagagtgaatgatttaggctttattgaagccccttataaaaaggttgtggatggcaaggtcgtgggtgagacgatttatttgaccgctattcaagaagacagccacatcatcgctcccgcaagcacccccattgatgaagaggggaatattttgggcgatttgattgaaacgcgcgtggaaggcgagatcgttttaaacgaaaaaagcaaagtaaccttaatggatttaagctctagcatgctagtgggggtagccgcatcgctcattcctttcttagagcatgatgacgccaaccgtgccttaatggggactaacatgcagcgccaagcggtgcccttattaagaagcgacgctcccattgtaggcacggggattgaaaaaattattgctagggattcttggggagcgatcaaagccaatcgcgcaggcgttgtagaaaaaattgattctaaaaatatttatattttaggcgaaagcaaagaagaagcctatattgatgcgtattctttgcaaaaaaacttgcgcaccaaccaaaacaccagtttcaatcaagtccctatcgttaaagtgggcgataaagtgggagccgggcaaatcatcgctgatggccctagcatggatagaggcgagttggcgttagggaaaaatgtgcgcgtggcgttcatgccttggaatggctataactttgaagacgcgatcgtggtgagtgagtgcatcactaaagatgatattttcacttccacccacatttatgaaaaagaagtggatgctagggagcttaagcatggtgtggaagaatttaccgctgatattcctgatgtgaaagaagaagcgctcgctcatcttgatgaaagcgggatcgttaaagtcggtacttatgtgagcgctggcatgattttggtgggcaaaacttctcctaaaggcgagattaaaagcacgcctgaagagcggcttttaagggctatttttggggataaagccgggcatgtggtcaataagagtttgtattgccctcccagtttggaaggcacggtgattgatgtgaaagtcttcactaaaaaaggctatgagaaagacgcgcgagttttgagcgcgtatgaagaagaaaaagccaagcttgatatggagcattttgatcgcttgaccatgctcaatagagaagaattgttgcgcgttagctcgctcctttctcaagcgattttagaagagcctttcagccataacggcaaggattataaagaaggcgatcaaatccctaaagaagaaatcgcttcaatcaaccgcttcactttggctagtttggtcaaaaagtattctaaagaagtgcaaaaccactatgaaatcactaaaaacaatttcttagagcaaaagaaagttttgggcgaagagcatgaagaaaagctttctattttagaaaaagatgatattttgcctaatggcgtgatcaaaaaagtcaagctctatatcgctacaaaacgaaagcttaaagtgggcgataaaatggcaggaaggcatgggaataaagggattgtgtctaatatcgtgccggttgcggatatgccttataccgctgatggcgagcctgtagatattgttttaaaccctttaggcgtgccaagccgcatgaatatcgggcagattttagaaatgcatttaggcttagtggggaaagaatttgggaagcaaatcgctcgcatgctagaggataaaaccaaagattttgccaaagaattgcgtgctaaaatgctagaaatcgctaacgctattaatgaaaaagaccccttgacaatccatgcgcttgagaattgttctgatgaagagcttttggaatacgcaaaagattggagcaagggcgttaagatggctatccctgtgtttgaaggcatctcgcaagaaaaattttataagctatttgaattagctaagatcgctatggatggcaaaatggatctgtatgacggacgcacaggcgagaaaatgagggagcgcgtgaatgtgggctacatgtatatgatcaaactccaccatttagtggatgaaaaagtccatgccagaagcacaggcccttatagcttagtaacgcaccagcccgtggggggtaaagcgctctttgggggtcaaaggtttggggaaatggaagtgtgggccttggaagcttatggcgcagcgcacactctaaaagaaatgctcaccattaaatccgatgatattagaggcagagagaacgcttatagggctatcgctaaaggtgagcaagtgggcgagagtgaaatccctgagactttctatgttttgactaaagaattgcaatcgctcgctttggatattaatatttttggggacgatgtggatgaggatggagcacctaaacccattgtcattaaagaagatgacaggcctaaagactttagctctttccagctcacactagctagccctgaaaaaatccattcttggagttatggggaagttaaaaagccagaaacgatcaattatcgcaccctaaaacctgaacgagacggcttgttttgcatgaaaatctttggccccactaaagattatgaatgcttgtgcggcaaatacaaaaagcctcgcttcaaagacattggcacatgcgaaaaatgcggcgtggcgatcacgcactccaaagtcaggcgttttagaatggggcatattgaattggccactcctgtagcgcatatctggtatgttaattccttgcctagccgtatcggcacgcttttaggcgttaagatgaaagacttagagcgcgtgttgtattatgaagcttatatcgttaaagaaccaggcgaagccgcttatgacaatgaaggcactaagcttgtgatgaaatacgatattttgaatgaagagcagtatcaaaatatctcacgaagatacgaagacaggggctttgtagcgcaaatgggcggtgaagcgatcaaggatttgttagaagaaattgatttgatcaccttattgcagagtttgaaagaagaagtgaaagacaccaattctgatgcgaaaaagaaaaaactcattaagcgtttgaaagtggtagaaagctttttaaattctggtaataggcctgaatggatgatgctcacggttttaccggtattgccaccggatttaaggcctttagtcgcgctagatggcgggaagtttgcagtcagcgatgtgaatgaattgtatcgtcgtgtcatcaatcgtaaccaacgcttgaaacgcttaatggagcttggagcgccagaaatcattgtgcgcaatgaaaaaaggatgttgcaagaagccgtggatgtgctttttgataacggccgcagcactaatgcggttaaaggggctaacaaacgccctttaaaatcgctcagtgaaatcattaaaggcaagcaggggcgtttcaggcaaaaccttttaggtaagcgcgtggatttttcaggcagaagcgtgattgtggttgggcctaatctcaaaatggatgaatgcgggttgcctaaaaacatggcgttagaactcttcaaaccgcatttgttatccaagcttgaagagagaggctatgccaccacgctcaaacaggctaaacgcatgattgagcaaaaaagcaatgaagtatgggagtgcttgcaagaaatcacagaggggtatccggtgctactcaaccgcgctcctaccttgcacaagcaatccattcaagcgttccatccaaagctgattgacggcaaagcgatccaattgcacccgttagtgtgttcagcgttcaacgccgattttgacggggaccaaatggcggtgcatgtgcctttaagccaggaagcgatcgctgaatgcaaggtgctgatgctaagctctatgaatatccttttgcctgctagcggtaaggccgtagccattcctagccaagatatggttttagggctttattatctttctttagaaaagagcggggtcaagggcgagcataagcttttttctagcgtgaatgaaatcatcaccgccattgacacgaaagaattagacatccacgcaaagattagggttttagatcaagggaatattatcgctacgagtgcagggcgcatgatcattaagtccattttgcctgattttatccctacggatttgtggaacagacccatgaagaaaaaagatattggcgtgcttgtggattatgtgcataaagttggcggtatcggtattactgcaacctttttggataatttaaaaacgcttggctttaggtatgcgactaaggctggtatttctatctctatggaggatattatcacgccaaaagacaagcaaaaaatggtggaaaaagccaaagtagaggttaaaaaaatccagcaacaatacgatcaagggctgctcactgaccaagagcgttacaataagatcattgacacttggactgaagtcaatgacaaaatgagtaaagaaatgatgaccgctatcgcgcaagataaagagggctttaactctatttatatgatggcagatagcggcgcaaggggtagcgcggcgcaaatccgtcagctttcagcgatgaggggtcttatgacaaagccggacggcagtatcattgaaacgcccattatttctaactttaaagaggggttgaatgtcttagaatacttcaattccacgcatggcgctagaaagggcttagcggatacagcgctaaaaacagccaatgcggggtatttgaccagaaagctcattgatgtttcgcaaaatgtcaaggtggtgtctgatgattgcggcacgcatgaagggattgaaatcacggatattgcggtggggagtgagctgattgaacctttagaagagcgtatttttgggcgcgttttattagaagatgtgatcgatcccattacgaatgaaatcttgctttatgcggacactttgattgatgaagagggtgctaaaaaggtggttgaagccgggattaaatccattacgatccgcaccccagtaacttgtaaagcgccaaagggcgtgtgcgcgaaatgctatggcttgaatttgggcgaaggcaagatgagttatccgggtgaagcggtgggcgtggtagccgcgcaatctattggggagcctggaacgcagctcactttaaggactttccatgtgggcgggacagcgagcaggagtcaggatgagcgcgaaatcgtagcgagcaaagaaggttttgtgcgtttttacaaccttaggacttacacgaataaagagggtaaaaacattatcgctaaccgccgtaacgcttctattttagtggtagagcctaagattaaagcgccttttgatggggaattacgcattgaaacggtttatgaagaagtcgttgtgagcgtgaaaaatggcgatcaagaagctaaatttgttttaaggagaagcgatattgtcaagccaagcgaattagccggcgttggcggtaagattgaggggaaagtgtatttgccttatgctagtgggcataaggtgcataaggggggaagtatcgctgatattatccaagagggctggaatgtgcctaatcgcatcccttatgcgagcgaattgctagtcaaggataatgaccctattgcgcaagatgtgtatgccaaagaaaaaggcgtaatcaaatactatgttttagaggctaaccatttagagcgcacccatgggatcaaaaagggcgatatggtgagtgaaaaaggcttgtttgcggtgatagctgatgataatggtagggaagccgctcgccattatatcgctaggggttctgagatcttgattgatgataatagtgaagtgagcactaatagcgtgatttctaaacccacgactaacactttcaaaacgattgccacatgggatccttacaacacccctatcattgcggactttaaaggtaaggtgggttttgtggatgttatcgcaggggttacggtcgctgaaaaagaagacgaaaataccggtatcacaagcttagtggtgaatgattacattccaagcggatacaaaccaagcttgtttttagagggggctaatggcgaagagatgcgttatttcctagagccaaaaacctctatcgccattagcgatggctctagcgtggagcaagctgaagtgttagcgaaaatccctaaagcgaccgttaaatctagggatattaccgggggtctcccaagggtttcggaactctttgaagcgagaaaacccaagcctaaagatgtggcgatcctttctgaagttgatgggattgtgagttttggcaaacccattcgcaataaagaacacatcatcgtaacttctaaagatggccgttccatggattattttgtggataaaggcaagcaaattttagtgcatgccgatgaatttgtgcatgcgggagaagcgatgacggacggagtaatttcaagccatgatattttaaggatcagtggcgaaaaagagctttataaatacattgtgagcgaagtccagcaagtgtatcgcaggcagggggtgagcattgcggacaagcacattgaaatcattgtttctcaaatgctaagacaggtgcgtattttagacagcggggatagcaagtttattgaaggggatttagtcagtaaaaaacttttcaaagaagaaaacgctcgtgtgatcgctttaaaaggcgagccagcgattgctgaaccggtgcttttagggatcactagagcggctattgggagcgatagcatcatctcagcggcctctttccaagaaacgactaaagttttaacagaagccagtatcgctatgaaaaaagactttttagaggatttgaaagagaatgtggtgttggggaggatgatccctgtgggaacaggcatgtataagaataaaaaaatcgtgttaagagcgcttgaggataactctaaattttga

SEQ ID NO: 22724 - DNA, 378 bp, Helicobacter pylori
atggcaatttcaaaagaagaagtgttagagtatattggttcattgagcgttttagagctttctgaattggttaaaatgtttgagaaaaaatttggcgtgagcgcgactccaacggtcgtagcgggtgcggctgtagctggcggtgcagcggctgagagcgaagaaaaaaccgaatttaatgtgattttggctgatagcggtgctgaaaaaatcaaggtgattaaagtggttcgtgaaatcaccggacttggcctgaaagaagctaaagacgctaccgaaaaaacccctcatgtgcttaaagagggcgtgaataaagaagaagctgaaaccatcaagaagaaacttgaagaagtaggcgctaaggttgaagtcaagtaa

SEQ ID NO: 22725 - DNA, 495 bp, Helicobacter pylori
atgcaaaaacaacatcaaaggcagcataaagtagagctagtcgctaacttaaagtcgcaatttgcagatgccaaagcccttttaatttgcgattataagggtcttagcgtgagaaaattggaagctttaaggaataaggctcgcaatcaaggcattaaagtgcaagtgattaagaacactcttgctcatattgccatgaaagagaccggctattctgatttggatttgaaagaaaccaatgtgtttttgtggggcggtgatcaaatcgctctctctaaactcgtgtttgatttccaaaaagagcataaagatcactttgtgttgaaagcgggcttgtttgataaagaaagcgttagcgtagctcatgtggaagcggtttcaaaactcccgagcaaagaagagcttatgggaatgttgctttctgtttggacggctccagcacgctattttgtgaccggtttagacaatttgcgtaaagcgaaagaagaaaactaa

SEQ ID NO: 22726 - DNA, 705 bp, Helicobacter pylori
gtggcaaaaaaagtatttaaaagattggaaaaacttttttctaaaattcaaaacgataaagcgtatggcgtagagcagggtgtagaggtggttaaatctctcgcttcagccaaatttgatgaaaccgtggaagtagcgttaaggctaggggttgatccaaggcatgcggatcaaatggtacgcggtgcggtggtgcttcctcatggaacagggaaaaaagtaagagtggccgtttttgcaaaagacattaagcaagatgaagccaaaaacgctggggctgatgtcgttggcggagacgatttggctgaagaaatcaaaaatggtcgtattgattttgacatggtgatcgcaacgcctgatatgatggcggttgtcggtaaagtgggtaggattttaggccctaaaggtttgatgccaaaccctaaaaccggaaccgttacgatggatattgctaaagcggtcagtaacgctaaaagcggtcaagtgaatttcagggtggataaaaagggcaatgttcatgcccctattggtaaggcgagttttcctgaagaaaaaatcaaagaaaacatgcttgagttggttaaaacgatcaaccgcctaaaacccagtagcgcgaaaggcaagtatattagaaacgccgctctttcgctcaccatgtccccttcagtgagtttggacgcgcaagaattgatggatattaaatag

SEQ ID NO: 22727 - DNA, 426 bp, Helicobacter pylori
atggctaaaaaagtagtcggagaaatcaaacttcaaatccctgccggtaaggcaaacccttcacctcccgtagggccagcgttgggtcaaagaggggttaatatcatggaattttgtaaggcttttaatgagagaactaaagacatggggagttttaatatcccggtgattatcacggtttatcaagacaaaagttttacctttatcactaaaaagcctccggtaacggatttgatcaaaaaagcttctggggttgaaaaaggttctgacaacccgctcaaaaataaaattgcaaagctcacccacaagcaagtggaagagatcgcgcaattgaaaatggaagatttaaacacaagcaccatggaagcggccaaaaaaatcgttatgggcagcgctaggagcatgggcgtagaagttgtggattga

SEQ ID NO: 22728 - DNA, 531 bp, Helicobacter pylori
atgatggattggtatgccatacaaacttattcagggagcgagcagtccgttaagaaagcgattgagaatctagcgaacgaccataatataagagataggatacaagagatcattgtgcctactgaagatattatagaggtttctaaaaaaagcaagacgaaagtaacggaacgaagcctttatcctgggtatgtttttattaaggtggatttagatacggttttgtggcataagatacaatctttgccaagagtgagtcgttttattggagaaaacaaaaagccaaccccattgagtgaagcggatattgggcatattttagaaaaaatgaataaccgagcagcccccaagcccaaaatcttttttgagcaaggcgaagtggtgcgcgtggtggaaggcccttttgcaaactttaccgctacggtggaagagtatgatgtggaacatcgcaagctcaagctcaatgtttctatttttggtaggaacactccaatagagattttgcattcgcaagtggaaaaaattatataa

SEQ ID NO: 22729 - DNA, 159 bp, Helicobacter pylori
atgaaagttaaaatagggttgaagtgttctgattgtgaagatatcaattacagcacaaccaagaacgctaaaactaacactgaaaaactggagcttaagaagttctgcccaagggaaaataagcacactcttcataaagaaatcaaattgaagagctag

SEQ ID NO: 22730 - DNA, 1200 bp, Helicobacter pylori
atggcaaaagaaaagtttaacagaactaagccgcatgttaatattggaaccattgggcatgtagaccatggtaaaacgactttgagtgcagcgatttcagcggtgctttctttgaaaggtcttgcagaaatgaaagactatgataatattgataacgcccctgaagaaaaagaaagagggatcactatcgctacttctcacattgaatatgagactgaaaacagacactatgcgcatgtggattgcccaggacacgctgactatgtaaaaaacatgatcaccggtgcggcgcaaatggacggagcgattttggttgtttctgcagctgatggccctatgcctcaaactagggagcatatcttattgtctcgtcaagtaggcgtgcctcacatcgttgttttcttaaacaaacaagacatggtagatgaccaagaattgttagaacttgtagaaatggaagtgcgcgaattgttgagcgcgtatgaatttcctggcgatgacactcctatcgtagcgggttcagctttaagagctttagaagaagcaaaggctggtaatgtgggtgaatggggtgaaaaagtgcttaaacttatggctgaagtggatgcctatatccctactccagaaagagacactgaaaaaactttcttgatgccggttgaagatgtgttctctattgcgggtagagggactgtggttacaggtaggattgaaagaggcgtggtgaaagtaggcgatgaagtggaaatcgttggtatcagacctacacaaaaaacgactgtaaccggtgtagaaatgtttaggaaagagttggaaaaaggtgaagccggcgataatgtgggcgtgcttttgagaggaactaaaaaagaagaagtggaacgcggtatggttctatgcaaaccaggttctatcactccgcacaagaaatttgagggagaaatttatgtcctttctaaagaagaaggcgggagacacactccattcttcaccaattaccgcccgcaattctatgtgcgcacaactgatgtgactggctctatcacccttcctgaaggcgtagaaatggttatgcctggcgataatgtgaaaatcactgtagagttgattagccctgttgcgttagagttgggaactaaatttgcgattcgtgaaggcggtaggaccgttggtgctggtgttgtgagcaatattattgaataa

SEQ ID NO: 22731 - DNA, 516 bp, Helicobacter pylori
atgctggatttgtcttatagcctggagcgtgtcttgcaagaagacccggcagctaggaataagtgggaggttcttttgctttatccgggcattcatgcgctgctttgttaccgcctagcgcatgcgttgcacaagcggaggttttacttcattgcgcgcgcgctttctcagttagcgcgctttatcactgggatagaaatccaccctggcgctaagattgggagagggctttttattgatcatggcatgggtgtggtgattggcgagaccacagagattggagatgatgttaccatttatcatggcgtaactctaggaggcacgggtaagttcaagggcaagcgccaccctactttaggcaatcgtgtggtagtgggggcaggggctaaggtcttgggtgcgatttgcgtgggcgatgatgtgaagattggagctaatgcggtggtgctttcagatttgcccacgggttctacggctgtaggatctaaagccaaaaccatcacaaaggatcgttaa

SEQ ID NO: 22732 - DNA, 318 bp, Helicobacter pylori
atgaaatttttagcgttattttttctggctttagtgggcgtcgctttcgctcatgatggcggaatgggtgggatggatatgattaaatcttattctatcttaggggcgatgatcggtctagggattgccgcttttggtggggcgatcggcatggggaatgcggctgcagcgaccattacaggcacagcgagaaacccaggagtgggcggtaaattgctcactaccatgtttgtggccatggcgatgattgaagcgcaagtgatttatactctagtgtttgctattatcgctatttatagtaacccattcttaagttaa

SEQ ID NO: 22733 - DNA, 2067 bp, Helicobacter pylori
atggattttatcaccatcaattctagtaacaaaaccgaagagttcgctctcaaacaagtggccaaacaagccaccagctctcttttataccgattaggaaaaaccattattttagcgagcgtgtgcgtggaaagagagcctgtgagtgaagattttctgcctttagtggtgcagtttttagaaaaatcttatgcagccggaaagatcccgggcggttttgttaaaagagaaggcagggcgcaagattttgaaatcttaacctctaggctcatagacaggactttacgccctttattccctaaagactaccgctaccctacacagatcactttaatggttttaagccatgatattgaaaatgacttgcaggtttctgctttaaacgccgcttcagccgctctctttttggcccatatcgctcctattaaaagcgtgagcgcttgcaggatcgctaggatggataacgaatttatcattaaccctagcgcaagccttttgaatcaatccagtttggatttgttcgtgtctggaacgaaagagagtttgaacatgatagaaatgcgctctttggggcaaaaattgaacgctttagaagagcctttaatgttagaagctttagaattggctcaaaaaagtttggaagaaacttgcacgctttatgaagagattttcacgccccaccaaaacgagctgtttttcaaagagagccaaggaatagtctttaatgaaaggctgttagatttattgaaaaatcagtattttgatgaaatcatcaaaggcattgaaagttctgctttgagcgagcgagaaaatgttttcaatgaaattgccagaaaaatcagtgaagcccactcagaattcagtttagaagaaattgaattgtctttagaaaaagtgaaaaagactgagataagacgcatgatcattaaggataaaatccgcccggataagcgcgcgttagaagaagtgcggcccattttgatagagagcgatttgctccctatggcgcatagctccattttattcactagggggcaaactcaaagcttagtggtaggggttttaggcacggataatgacgctcaaacccatgagagtttggagcataaagctcccattaaagagcgcttcatgtttcattataatttccctcctttctgcgtgggcgaagcgagttctattggcgcggcttcaaggcgtgaattagggcatgggaatttggctaaaagagccttagaaacgagcattaaaaataaagagcaggtgatacgattggtttctgagattttagaaagcaatggttcaagctcaatggcgagcgtgtgcgcaggctctttagccctttatgcaagcggtgtggaaatttacgatttagtcgctggggtggctatgggcatggtgagcgaagggcaagatcacgctattttaagcgatattagcggcttagaagacgcagaaggcgatatggattttaagattgctgggaatttagaaggcattacggccatgcaaatggataccaaaatgagcggtatcaagctagaaattttataccaagccttactccaagccaaagaagcacggaaacatattttaaaaatcatgcatgaagcgaaagaaaagattgtgatcaatttttcccatttgcccacaacggagatttttaatgtcgcacccgataaaattgtagaaattatcggtcaaggggggcgtgtgattaaagagatagtagaaaagtttgaagttaaaattgatttgaacaaaccgagcggtgaagtgaaaatcatggggaataaagagcgcgttttaaagactaaggaatttattttaaactacttgcattctttagatcaagaattggagcaatacgctattgatgaggtattagaagctcaagtgaaacgaatcgtggattttggggcgtttttaagcttgcctaaggggggcgaaggcttgttaagaaagcaaaacatggacaagtgtcaagtggttttaaaagaaggcgatagcatcaggtgtagggtgattagcttcaataagggtaaaatcgctttagatttggcttaa

SEQ ID NO: 22734 - DNA, 687 bp, Helicobacter pylori
atgctagtagaaatagagaatttgactaaaacctatgggagtttaaaagcgttagacaatatcaatttgaaactacccaaacagcaatttatagggcttttaggccctaatggggcgggcaaaaccactctgttaaagattttagctggattgaatttgaactatcaaggggaagtgaaaattttaaatcaaaagatcggcatagagactaaaaaaagcgtggcgtttttaagcgatggcgattttttagatcctaaattaacgcctttaaaagcgatcgctttttacaaggattttttcagcgattttgattcatcaaaagccctagatttgctcaaacgcttcagcgtgcctttaaaaagagagtttaaagccctttcaaaaggcatgagggaaaaattacagctgatcttaaccctatcacgaaacgcttctttgtatctttttgatgaaccggtggctgggattgatcctatcgctagagaagagatttttgaactcatcgctaaggaatttagccaaaacgcaagtttgctagtctctacgcatttggtggtggatgtggaaaagtatttagacagcgcgatttttttaaaagaagctaaagtggtggcttttggtggtgtgggggaattaaaaaaagggtatagcagtttggaagcggcgtataaagaaaggttgaaataa

SEQ ID NO: 22735 - DNA, 705 bp, Helicobacter pylori
ttggacaacactctcaaacatcttgccattattatggatggtaatggcaggtgggctaaattaaagaataaagctagggcttatggccataaaaagggcgtaaaaacccttaaagatatcacgatctggtgcgctaaccataagctagaatgcttgactttatacgctttttctacggaaaattggaaacgccctaagagtgaagtggattttttaatgaaaatgcttaaaaaataccttaaagatgagcgatccacttatttaaataataacatacgcttcagggcgataggggatttagagggcttttctaaagaattacgagatacgattttgcagcttgaaaacgataccaggcattttaaggattttacgcaagttttagcccttaattacggatctaaaaacgaactttcaagggcgtttaaaagcttgctagaaagcccgcctagccatataaaccttttagaaagtttagaaaatgaaatttctaatcgtttagacacgcatgatttgccggaagtggatttgttgttacggacagggggggaaatgcgcttgtctaattttttattgtggcagtccagctatgcggaattgtttttcacgccgattttatggcctgatttcacccctaaagatttagaaaacatcattagcgatttttacaaaagagtgcgcaaattcggggaattaaaatgctag

SEQ ID NO: 22736 - DNA, 1218 bp, Helicobacter pylori
gtgttaatcgttcaaaaatacggcggcacgagcatgggcagcatagaaaggatccacaatgtcgctcaaagggttttagaaagcgttacattagggcatcaagtcgtggtggtggtttcagcgatgagcggcgaaaccgacaggcttttagaatttggcaagaattttagccataaccctaacaagcgagagatggacaggattgtaagcgtgggggaattggtttcaagtgcggctttgagcatggcgttagaaaggtatgggcatagagccatttccttgagcgggaaagaagcgggcattttaaccagctcgcattttcaaaacgccgtgatccaatccattgacaccaaacgcatcacagagcttttagaaaaaaactacattgtggtgatcgctgggtttcaaggcgctgatattcaaggtgaaacaacgactttagggcgtggggggagcgatttgagcgcggttgctttggccggggctttaaaagcgcatttgtgcgaaatctatacggatgtggatggcgtttataccaccgatccgcgcattgaagaaaaggctcaaaaaatcgcgcaaatcagctatgatgaaatgcttgaactggcttctatgggggctaaagttttattaaaccgctcggtggaattagccaaaaagctcagcgtgaagttagtgactcgcaattcgtttaaccatagcgaaggcacgctcattgtggctgaaaaagactttaaaggagaacgcatggaaacccctatagtgagtgggatcgcattggataaaaatcaggctcgtgtgagcatggagggcgtggaagatcggccaggcattgccgctgaaatctttggcgctttagcggagtatcgcattaacgtggatatgatcgtccaaacgatcggcagagacggcaaaaccgatttggattttacgatcgttaaaacccaaatagaagaaaccaagcaagccttaaagccttttttagcgcaaatggattccattgattatgatgaaaatatcgctaaagtctccatagtgggcgtgggcatgaagtcgcattctggggtggcgagtatcgcttttaaagccctagccaaagacaatatcaatatcatgatgatttctacaagcgagattaaaatttcggttttgattgacattaaatacgctgaattagctgttagaactttgcatgcggtgtatcaattagatcaatga

SEQ ID NO: 22737 - DNA, 1143 bp, Helicobacter pylori
atgattgtaaaacgccttaaccctgatgcgctcaaaaacgctctgcaaaaaataggcccagaaaagatcgcgcaagatcgcatgcaccaaaaaggcgttagctttgtttttgaaatccaacatctgcccttaagcgcaacgctcattttaaagcaagaggccataagcgttgggggcgattttgccacgccaagagattgtattttagccaaagagcctttttatgatggggtgttgattgcgagcgctaagcaattagaacgcctgattgttaagtgccactcccaaccctttgggcttaaacatttagcgcaagaattaaaaagccacctcaaagcccctaagcctaacaccccacagatcatggcagttttaaacttgactccggatagcttctatgaaaagagccggtttgatagcaaaaaagcgcttgaagaaatctatcaatggctagaaaagggtatcacgctcattgatataggcgcggccagttcaaggccagagagtgaaatcattgatccaaaaatagagcaagatcgcttaaaagaaattttattagaaatcaaatcccaaaaactctaccaatgcgccaaattcagcatagacacctaccatgccacaaccgcccaaatggctttggagcattatttttccatccttaatgatgtgagcggttttaatagcgctgaaatgctagaagtcgcaaaagattacaagcccacttgcattttaatgcacactcaaaaaacccccaaagacatgcaagaaaatgttttttaccacaatttatttgatgaaatggatcgcttctttaaggaaaaactagaagttttagaaaaatacgtgctccaagatattattttagatattgggtttggattcgctaaattaaaagagcataatttagccttaatcaagcatttaagccactttctcaaattcaaaaaacccttattggtgggcgcgagtcgtaaaaacacgatcgggcttatcactgggcgtgaagttcaagaccggctcgccggcactttgagtttgcatttaatggcgttgcaaaatggagcgagcgttttaagagtgcatgatattgatgagcatatagatttaatcaaagtgtttaagagtttggaagaaacggattga

SEQ ID NO: 22738 - DNA, 897 bp, Helicobacter pylori
atgcgtaataccattttatttggcgtttcaatgatactcttggcgaatttatgctttggaatcatgagcgcgtttgttaaaatcacagcggattatttttcccctatggaaaatgtgttttaccgctccattaccatgacgctcttactcttacttatttatcctttcaaaccctaccgcttaaaaagctacaaacaaggcggttttaaaaagctcgcttttagggtcgttgtagggggcttggccatgctagcgtttttttataatattgaaaaaatttcgctcgccacagcgacggctttctcgcaatgtgcgcctatttatacggtgcttctttcccctttgcttttgaaagaaaagctcaaaagaagcacattaatttctgcatgcatcgggatagtgggggtggtgttgatttcagatcctagcgtggaaaatgtggggccggttgaaatttttatgggcatattgagcgggatttttgtgtctttagcgtatatcactttaagggatttgagggaatattatgacaagcaagccgtgattttagcgttcgcctttggcatgagccttcttggattagtgggcatgtttattgatattccttttttatccacaggcattcatgttcccagaaaagaagacattttgtggatttctttaatagggattagcgggactttagggcagtatttcttaacttatgcttacatgaacgctcctgctgggatcattgccccgattgaatacacccgcattgtttgggggctgttgtttgggctgtatttaggcgatacatttttggatcttaaaagctctttaggggtggctttgatcttatgttcaggcttactcattgccttgccagctcttttaaaagaattaaaaaaaatttaa

SEQ ID NO: 22739 - DNA, 1128 bp, Helicobacter pylori
atggtctctctctatttagaaaacgggctttttttgcaagcgcaaagttttggggctagcggcacgcaagcgggcgagcttgtttttaacacttctatgagcggttatcaagaagtcattagcgaccctagctataaggggcaatttgtggtttttagcatgcctgagattggggttgtgggtgctaattctaaagatgatgaatcctttttttcatgcgcaggggttttagcgcgccattacaacgaatttttttctaactcaagggcggattttagcttgagcgcttatttgaaagagcgtggcgttttaggggtttgtggcgttgatactaggagtttgattaaaaccttacgccatcatgggtgcttaatgatggtcgcttccacgatagagcatgacaaaaacaagcttgaagaaattttaaaaaacgctcctaaaatttctcactcccccctagtgtctagcgtttctacgccaaaaataaccacgcaccagcgtgcgacttttgatttcaaaaccctagattacaagccttttgatgaaaaaacctctcataaaattatcgcggtgttagactttggggctaagggcaatattttaaacgagcttcaaaatgtggggttaaaagcccttatttacccgcaccacactaaagctagcgagctgattaaagcctatgaaaaaaaagaaattagcgggattttcctctctaacgggccgggcgatcctttaagcttgcagcaagaaattggcgaaatcaaacaactcattaacgctaaaatccccatgcttggcatttgcttagggcatcaattgctctctatcgctcaaggctaccctacttacaagctcaaatttggtcatcatgggagcaaccaccccgttaaaaacctaaaaacaaacgccgtagaaatcaccgcgcaaaaccacaactattgcgtccctgaagacattgaagaaatcgccattatcacgcaccgcaatctttttgacaacaccattgagggcgtgcgttataaaaacgctcccattatctctgtccagcaccacccagaaagtagcccaggtcctaaagagagccactatatttttaaagaatttgtggaattgttaaaggatttttag

SEQ ID NO: 22740 - DNA, 2544 bp, Helicobacter pylori
atggatattcgcaacgaatttttacaattttttcaaaataaagggcatgccgtttatcctagcatgcctttagtgcctaatgacgctaccttgctttttaccaatgccggcatggtgcaatttaaagatatttttaccgggattgtgccacgccctagcattcctagagcggcaagctcgcaattgtgcatgcgcgcaggcggcaagcataacgatttggaaaatgtcggttataccgcaaggcaccacacgctttttgaaatgctagggaatttctcttttggggattatttcaaagaagaagcgatcttgtttgcgtgggaatttgtaaccaagaatttagggtttaagcctaaagatttatacatcagcgtgcatgaaaaggacgatgaagccgttaaattatgggaaaagtttgtgcctgttgataggattaaaaaaatgggcgataaagataatttttggcaaatgggcgatagcgggccttgcgggccttgcagtgaaatttacattgatcagggcgaaaaacactttaaggggagcgaggattattttgggggcgagggcgataggtttttagaaatttggaatctggtgttcatgcaatacgaacgctctaatgatggcgttttatcccccttgccaaagcctagcattgatacaggcatgggattagaaagggtgcaagcgctattagaacataagctcaataattttgattcttcattatttgcgcccctaatggaagaaatcagcgagcttacaagcctagattatgcgagcgagttccagccaagctttagggtagtggccgatcacgcaagagcggtagcattcttgctcgctcaaggggtgcatttcaataaggaaggccgtggctatgttttaaggcgcattttaaggcgagccttaaggcatgggtatttaatgggcttgaaagaagcgtttttatacaaagtcgtgggcgtggtgtgcgagcaatttgctaacacgcatgcgtatttgaaagagtctaaagaaatggtggtaaaagaatgttttgaagaagaagagcactttttagagactttggaatcgggcatggaattgtttaacttgtctttaaagcatttgaatgaaaataaaatctttgatggcaagatcgctttcaagctttatgacacttttggtttccctttggatttaacaaacgacatgttaagaagtcatggggcgtgtgcggatatgcaaggctttgaattgtgcatgcaagagcaagtgaaacgctctaaagcttcatggaaaggcaaacaaaacaacgccgattttagcgctattttaaacgcttatgcacctaatgtttttgtggggtatgaaacgacagaatgttctgctaaagttttagggttttttgatagcgattttaaagaaataaccgatgcaaatcctaaccaagaagtctgggtgttgttagaaaaaacccctttttatgcagaaggtggaggggctataggcgataggggcgcgctttttaaagacaatggagaagtggctatcgtgttagatacaaaaaacttttttgggcttaatttttcactccttgaaatcaaaaaagcgctaaaaaaaggcgatcaagtgatcgcgcaagtgagcgatgagcgctttgaaatcgccaaacaccatagtgcgactcatttattgcagagcgctttaagagaagttttaggctcgcatgtgagtcaagcggggagtttagtggaatccaagcgattgcgctttgatttctcgcatgctaaagcgctcaatgatgaagagctagaaaaagtagaagatttagtcaacgctcaaattttcaagcacctaaatagccaggtggagcatatgcctttaaaccaagccaaagataagggagcgttagcgttattcagtgaaaaatacgctgaaaatgtgcgggtggtgagctttaaagaagcgtccattgaattgtgtgggggcattcatgtggaaaatactgggcttattggggggtttaggattgtaaaagaaagcggggtgagtagtggggtcagacgcattgaagcggtgtgcgggaaagccttttaccaactggctaaagaagaaaataaagagcttaaaaacgctaagactttattgaaaaataacgatgtgatcgccggtatcaataagcttaaagagagcgtgaaaaacagccaaaaagcccccgtttctatggatttaccggttgaaaaaatccatggcgtgaatttggtggtgggcgtagtggaacaaggcgacattaaagaaatgattgaccgattgaaaagtaagcatgaaagattgctcgctatggtgtttaaaaaagaaaatgagcgaatcactctcgcatgcggggtgaaaaacgcgcccataaaagcgaatgtgtgggctaatgaagtggcgcaaattttagggggcaaagggggcgggagaggtgattttgcgagcgctggaggcaaggatattgaaaatttgcaagccgcactcaatttagcgaaaaataccgctcttaaagctttagagggatag

SEQ ID NO: 22741 - DNA, 2202 bp, Helicobacter pylori
atgaaaaaacacatcctttcattagctttaggctcgcttttagtttccactttgagcgctgaagacgacggcttttacacaagcgtaggctatcagatcggtgaagccgctcaaatggtaacaaacaccaaaggcatccaacagctttcagacaattatgaaaatttgaacaaccttttaacgagatacagcaccctaaacacccttatcaaattgtccgctgatccgagcgcaattaatgcggtgcgggaaaatctgggcgcgagcgcgaagaatttgatcggcgataaagccaactcccccgcctatcaagccgtgcttttagcgatcaacgcggcggtagggttttggaatgtcgtgggctatgtgacgcaatgtgggggtaacgccaatggtcaagaaagcacctcttcaaccaccatcttcaacaacgagccagggtatcgatccacttccatcacttgttctttgaacgggcataagcctggatactatggccctatgagcattgagaattttaaaaagcttaacgaagcctatcagatcctccaaacggctttaaaaaacggcttacccgcgctcaaagaaaacaacgggaaggtcagtgtaacctatacctacacatgctcagggcaagggaataataactgctcgccaagtgtcaacggaaccaaaaccacaacccaaaccatagacggcaaaagcgtaaccaccacgatcagttcaaaagtggttggtagcatcgctagtggcaacacatcacatgtcatcaccaacaaattagacggtgtgcctgatagcgctcaagcgctcttagcgcaagcgagcacgctcatcaacaccatcaacgaagcatgcccgtatttccatgctactaatagtagtgaggctaacgccccaaaattctctactactactgggaaaatatgcggcgctttttcagaagaaatcagcgcgatccaaaagatgatcacggacgcgcaagagctagttaatcaaacgagcgtcattaacagcaacgaacaatcaactccggtaggcaataataatggcaagcctttcaaccctttcacggacgcaagttttgcgcaaggcatgctcgctaacgctagcgcgcaagctaaaatgctcaatttagcccatcaggtggggcaagccattaacccagagaatcttagcgagaattttaaaaattttgttacaggctttttagccacatgcaataacaaatcaacagctggcactggtggcacacaaggttcagctccaggcacagtgaccactcaaactttcgcttctggttgcgcgtatgtggagcaaaccctaacgaacttaggcaacagcatcgctcactttggcactcaagagcagcagatacagcaagccgaaaacatcgctgacactctagtgaatttcaaatctagatacagcgaattaggcaacacctataacagcatcaccaccgcgctctccaaagtccctaacgcgcaaagcttgcaaaacgtggtgagcaaaaagaataacccctatagccctcaaggcatagagaccaattactacctcaatcaaaattcttacaaccaaatccaaaccatcaaccaagaactagggcgtaacccctttaggaaagtgggcatcgtcaattctcaaaccaacaatggtgccatgaatgggatcggtattcaggtgggctataagcaattctttggccaaaaaagaaaatggggcgctaggtattacggcttttttgattacaaccatgcgttcatcaaatccagctttttcaactcggcttctgacgtgtggacttatggttttggagcggacgcgctttataacttcatcaacgataaagccaccaatttcttaggcaaaaacaacaagctttctttggggctttttggcgggattgcgttagcgggcacttcatggctcaattctgagtacgtgaatttagccaccgtgaataacgtctataacgctaaaatgaatgtggcgaatttccaattcttattcaatatgggagtgaggatgaatttagccagatccaagaaaaaaggcagcgatcatgcagctcagcatgggattgagttagggcttaaaatccccaccatcaacacgaactattattcctttatgggggctgaactcaaatacagaaggctctatagcgtgtatttgaactatgtgttcgcttactaa

SEQ ID NO: 22742 - DNA, 258 bp, Helicobacter pylori
atggaaagaaaacgctattcaaaacgctattgcaaatacactgaagctaaaatcagctttattgactataaagatttagacatgctcaagcacacgctatcagagcgctataaaatcatgccaaggagattgacaggcaatagcaaaaagtggcaagaaagggtggaagtagcgatcaaaagagcccgccacatggctttaatcccctacattgtggacaggaaaaaagtcgtggatagcccttttaaacagcactaa

SEQ ID NO: 22743 - DNA, 540 bp, Helicobacter pylori
atgtttaataaagtgattatggtagggcgtttgaccaggaatgtggagttgaaatatttgcctagcggttcggctgcggctacaataggtttagccacaagcaggcgttttaaaaaacaagacggcacgctaggcgaagaggtgtgctttatagatgcgcgtttgtttgggcgaacggctgaaatcgctaaccagtatttgagcaagggttcaagcgttttgatagaagggcgtttgacttatgagagttggatggatcaaacgggcaaaaaaaattcccgccacactatcacagcggactcgttgcaatttatggataaaaagtcagacaatccccaagcaaacgctatgcaagatagtataatgcatgagaattccaacaacgcttatcccgctaatcataacgctcccagccaagatccttttaaccaagcttatgcgcaaaacgcttacgctaaagagaatttacaagcacagccgtccaagtatcaaaacagcgtgcctgaaatcaatattgatgaagaagaaatccccttttaa

SEQ ID NO: 22744 - DNA, 429 bp, Helicobacter pylori
atgaggcattatgaaacgatgtttattctcaaacctactttagtagaagaagagattaaatccaagattgagttttataaagaagtgatcactaagcatcacggcgtgattgaaacgagcctggatatgggcatgcgtaatttagcttatgaaatcaaaaagcacaaaagaggctattattatgtggcgtatttcaaagcggagccgtcaatgattgtagagcttgaacgattgtatcgcatcaatgaagacgtgttgcgtttcattgtgatcaaatacgaaagcaagaaagaagtggaagcgtggcatgcgttggtggatagggctaataaaaagccatcgcacgccaaagaaaaacacgaaaaaaccgaacacacgcattctcaccacacagaggaagcagaaagcgtaggatctcatagcgaataa

SEQ ID NO: 22745 - DNA, 1023 bp, Helicobacter pylori
atgtatcgtaaagatttggaccattatttaaaacaacgcctccctaaagcggtgtttttgtatggggagtttgatttttttatccattattatattcaaacgattagcgcgctttttaaatgcgataaccctgacatagaaacttcgcttttttatgcgagcgattatgaaaaaagccagattgcgacccttttagagcaggattctttatttggagggagcagtttagtcgttttaaaactggattttgccctgcataagaaatttaaggaaaatgatatcaatctttttttaaaagctttagagcggcctagccataacaggcttatcatagggctttataatgctaaaagcgacaccacaaaatacaaatacactagcgatgctatcgttaaatttttccaaaaaagccccttgaaagatgaagccatttgcgcgcgcttttttatccctaaaacttgggagagtttgaaattcttgcaagaaagggctaattttttgcatttagacatcagcggccatcttttaaacgctctttttgaaattaataacgaagatttaggcgtttcgtttaacgatttagacaagctagcggttttaaacgcacccatcactttagaagacattcaagaattaagctccaatgcgggggatatggatttgcaaaagctcattttagggctttttttaaaaaaaagtgcgcttgatatttatgattatttgttaaaagagggcaaaaaagatgcggatattttaagggggttagagcgctatttttaccaactttttttatttttcgctcatattaaaacgaccggtttaatggacgctaaagaggttttaggctacgctccccctaaagaaattgccgaaaattacgctaaaaacgccttgcgtttgaaagaagccggctataagagggtttttgaaatttttaggttatggcacattcaaagcatgcaagggcaaaaggaattgggctttttgtatttgacctccattcaaaaaatcattaacccctaa

SEQ ID NO: 22746 - DNA, 792 bp, Helicobacter pylori
atgaaattaaaatcttttggggtttttggaaatcccattaagcattccaaatcgcccttaatccataacgcttgttttttaacttttcaaaaagaattaaggtttttggggcattaccaccccatattactccctttagaaagccacatcaaaagcgagtttttgcatttgggattgagtggggctaatgtaaccttaccctttaaagaaagggcgtttcaagtttgcgataaaatcaaaggtatcgcgcttgaatgcggagcggtcaatacgcttgttttagaaaatgatgagcttgtgggttacaataccgacgctttagggttttatctttctttaaagcaaaaaaactatcaaaacgctttgattttaggagctggggggagcgctaaagccctagcgtgtgaattgaaaaaacaaggcttacaagtgagcgtgttgaaccgctcttctaggggattggattttttccaacgcctgggctgtgattgttttatggagcctcctaaaagcgcttttgatttgattattaacgccacttcagcgagtttgcataacgaattgcctttgaataaagaggttttgaaagggtattttaaagagggcaagctcgcttatgatttggcgtatgggtttttaacgccctttttgtctttagccaaagagttaaaaaccccttttcaagacggaaaagacatgctcatctatcaagctgctttaagttttgaaaaattcagcgcttctcaaatcccttattcaaaagcgtttgaagtcatgcgaagtgttttttga

SEQ ID NO: 22747 - DNA, 1785 bp, Helicobacter pylori
gtggtctttaaaattttaggtttatggttaggggtgttttgtttccttgaggctacgccttatttatacttgggcgaagagcctaaatataaagacaatttcacgcattttgaatacgctaaccctaacgctaaaaagggcggtgttttaaggaatgacgccatagggacttttgatagccttaaccctttcgcgcttaaaggcactaaagctgaaggcttggatctgatttatgacactttaatggtgcaaagtttagacgaaccttttgccgaataccccttgatcgctaaagacgcagaagtggctaaggataacagctatgtgatttttacgatagataaaagagcgagatttagcaataacgctcccattttagcgagcgacgtgaagtttagttttgatacgatcatgaaattaggatcgcctatttataggcagtattaccaagatgttaaaaaggcggttgttttagacaaacaccatgttaaattcattttcaaaaccactgaaaataaagagttgcctctcattttagggcagttgcagatcttttccaaaaaagcgtttcaagaggattattttgaaaaaaaccccttactcattcctgtttctagcggcccttatgtgatcgcttcttttgatgtgggcaagaaaatcacctaccaaagaaaccctaattattgggcgaggaatttgcctagcagaaaggggcaattcaattttgatcaaatcaaatttgagtattacaaagacgaaaccatcgccttacaggcttttttaagtggggcgtatgattggcgtcttgaaagcacggctaaggtttgggctaggggctatgtggggaaagctatggacaataaagagattacgaaatatttgatagcccacaaaatgccaagcggcatgcaagggtttttcttcaacacgcgccgagaaattttcaaggataaaagggtgcgtgaagccttattttatgcgtttgattttgaatgggcgaataaaaatttgtttttttcgcaatacaagcgcaccaccagttttttcagtaactctatctatgcgtcccctcccctcccaagccctgaagaaaaagccttgctagccccttatgaaaagagtttggatgaaagggtttttaaagagccttatgtcgtgcctagaaccgatggagttgatgttttaggctataatttgagggaaaatttaaaatacgcccaaaagcttttagagagcacgggcttttcttacaaaaacatgcgtttggtggataagaataacaagcctttcagtttcactttgcttttaaatagcccggcatttgaaagactggccctagcttttgctaaaaacttaagggtgttagggattgaaatgaaaatccaaagagtggatttaagccagtatgtcaatcggatcaaaagctatgattttgacatgattgtaggagtgattggccaatcgtctttcccaggtaatgagcagcgcttttattttggttctttgagtgcgaaagaaaaaggcacaaggaattatgcgggaatctctagtaaagcggtagatgatttgattgaaaaaatcattaacgctaaagattacaaggaacaattggccgccattcaagcgatggatagggtattgttgtgggggttttatgtgataccgcatttttatttgcctaattacaggatcgcagcgtataattacattggcatgcctgaaatcagccctagctatggattttcgccgtatttgtggtggataaaagaaaaggatcttcaatga

SEQ ID NO: 22748 - DNA, 1020 bp, Helicobacter pylori
gtggttacaataacactaactaaaacaacgagaaacaacatgcataaaaaacgagtcttttcaggcatccaacctactgggcaaatccatttgggcaactatttaggagcgatcaagcattgggtagagatgcaagatgaatatgaaaaccttttttgcgtcgtcaattcgcatgcgatcaccctacccatagatcctgcatttttaaaatcccaaagctatgagctagtcaaattgcttttggcttgcgggattgatcctaagcaatcggggttattcattcaaagtgaagtggatgagcacccggctttagcatggctattaaattgtcaggtgtctatgggggaaatgcaaagaatgacgcaattcaaagacaagtctttaaaaaaccctaaaagcgtgaacgtggggcttttcaattaccctattttgatggcgtcagatattttgttataccaaagcgatttagtgccagtgggcgaagatcaaaaacagcatttagagctcacgcgaaacattgcagaaaaatttaacagggattttgggaactgctttaaagtgccagagcctttgatcgctaaagtgggggcaagggttatggggctagatgatccaaaagtgaagatgagtaaatcgcatcaaggggctaaccatgcgatttttcttctagatgagccagacattattgtaaaaaaaatcaaaaaagcggccactgattctatgggcgttattgcatttgatgaaaaaagagagggcatttttaaccttttaaatatctacatgcttttgagcaatgaaagcccagaaaacatagaagagcgttttaaaaataagggctatggggattttaaaaaggaattggctgaagtaatgattcaggctttaaaacccatccaagaaagatacaaagaaatcagcgatgatgaagtgaaagccattttaaatggcggagccgaaaaagccaggcctttagcgagagcgacttaccaaaaggctaaagaattgatggggttaatttga

SEQ ID NO: 22749 - DNA, 558 bp, Helicobacter pylori
atgttacaggccatttataacgaaaccaaagatctgatgcaaaaaagcattcaagctttaaacagggatttttccactctaaggagcgcgaaagtttcagtcaatattttagatcacatcaaagtggattattacggcacgcccacggcattaaatcaagtcggatccgtgatgagcttggatgcgaccacccttcaaatcagcccatgggaaaaaaacctgctcaaagaaattgaaagatccattcaagaagccaatattggtgtcaatcctaataacgacggcgaaacgatcaagctttttttcccgcccatgacaagtgagcaaagaaaactcatcgcaaaagacgccaaagcgatgggtgaaaaggctaaagtggctgtgaggaatatccgccaagatgctaacaaccaggtgaaaaaattagaaaaagacaaagaaatcagcgaagatgaaagcaaaaaagcccaagagcagatccaaaaaatcaccgatgaagccattaaaaaaattgatgaaagcgtgaaaaacaaagaagacgcgatcttaaaggtctaa

SEQ ID NO: 22750 - DNA, 606 bp, Helicobacter pylori
atggatattaaggcatgttatcaaaacgctaaagcgttattagaggggcatttcttgctcagcagtgggtttcattccaattattatttgcaatccgctaaagttttagaagatcccaaactagccgaacaattagcgctagaattagccaaacaaatccaagaagctcatttgaatattgaatgcgtgtgctcaccggctattggggggattttggctgggtatgagcttgcaagggctttgggcgtgcgttttatcttcaccgaaagggtggataataccatggcgttaaggcgtggctttgaagtcaaaaaaaacgaaaaaattttagtgtgtgaggacattatcactacgggaaaatccgctatggaatgcgctaaagttttagaagaaaagggtgctcaaatcgtggcttttggtgctttagctaatcggggcatttgcaagcgtgctcattctcatttaaaagcccaagagggagcgtgtttgcctagccatttgcccctttttgctttagaagattttgtttttgacatgcacaagcctagttcttgccctttatgcgctactagcgttgctataaagccaggaagtcgtggcaactaa

SEQ ID NO: 22751 - DNA, 2535 bp, Helicobacter pylori
atgatcacaatgaatatcaatggcaaaacgattgaatgccaagagggacaaagcgttttagaggctgctaggagcgctgggatctacatccctaccatttgctatttaagcggttgctcgcccacagtcgcatgcaaaatgtgcatggttgaaatggatggcaaacgggtttatagctgcaacacgaaagccaaaaacaacgccaccattctcactaacaccccaacgctcatggatgaaagaaaaagcatcatgcaaacttatgatgtcaaccaccccctagagtgtggcgtgtgcgataagagtggggagtgcgaattgcaagacatgacgcatttaaccggcgtagagcaccaaccctatgcggtggctgatgattttaaagcactggatttttgggcaaaagccttgtatgatcctaatttgtgcatcatgtgtgaaaggtgcgtaaccacttgtaaggacaatgtgggcgaaaacaaccttaaagccactaaagccgacttgcatgctccggataaatttaaagacagcatgtccaaagacgcttttagcgtgtggagtcgtaagcaaaaaggcattatttcttttgtgggcagcgtgccttgctatgattgcggggaatgcattgcagtatgccctgtgggcgctttgagctataaagatttcgcttacacggctaacgcatgggagttaaaaaagatccattctacttgttcgcattgctcggccgggtgtttgatttcttatgatgtgcgccattttgatactctaggcgaagaatctaaaatttttagagtgcttaatgatttttaccataaccctatttgtggggcaggccgtttcgcttttgatgtgagctctagccctaaaggcagtgctaatcttaaagaagcgcaaaacgccctcaaagaatgcgaagcggtgcgaataggtggggatattacgaatgaagaggcgtttttaatagagcgtttaagaaaagagcttgattttaaaatctacaatcaagaagcgtatcgtttccagcaattcttaaaagtattgggcgaaattaaacgccccagcgttgaagagattaaaacttctcatttagtcgttacgataggatcttctatcaaaacagaaaaccctttggtgcgctatgccatcaataacgctctcaaactcaataaagcttctttaatcgctatgcaccctattaaggataacgcgctagcgaatttgtgccgaagctctttttgcatcacccatgaagtgggggctgaagaaatccttttaggcatgcttttaaaaatgcttaacattgaaagcgcggccctaaaaagcttagaagattccaagcaaaatattgtagatgaagcggctcttaaagccttagaagaagagcgaaaaaaagctttagaacaagccgagcaagggtgcagtattggagaaaataaggcagaaaatcaagaagagaataaaacagaagcgactaccccaaaagaagaaaatcaagaagaaaacaagacagaggttaaagaagaaaaaattgaagtccctaccaaaaccacttatttgctgcttgaagaagcgggcatcaatttagaaacttatgaaaaaattctggctcttttgcaaaaatcaaataacaccctgctagtggttggcgaagaaatctatagccataagcaagcccacaatatcgctaaaatgttgcgtttgctagcccaaaaaagcgctattaaactcattcttatccccccaagcgccaacgctttaggcatcgcttctatttgtcaattgagcgaagaaatttttgaacatgaaaaaattgtaggcattcgcgctcaaggggatttcactatcaatagcgatgatagggtttttggaaaagacgctgccagcaaagtggattttattttacccagtctcaaccagctagaaggcacgatcaccaatattgaagggcgtgtgttgcccttaaaaccggctttgaggtttgagggctatgatttgagcgatattatgcaaggctttggctttgtggaagaaaacctcatagaatgcacccacaaactccctacagaagcgggctttaaagccatagaatttgattatttaaccaactatttcgctaacgacagagtcaaccacagaggctatctgctaggaacaagccattttgaaaagagcgctaaagaatgcgaaaccatagaatgcgagcctatcaagcctttaaaagaaaaaatcgctttcaacgcgtatttaaaatacccagaaacgcaattcaataacgctactaataaaagcgagaatttgcaattaaaagccggtgtctatgtgtctaaagctttcttaaagaaattgaataaagaagtggggcaaaacatcactttatctaaagaagaagaggaattaacaggcgttttgtatcttgatgagagcttggatcaggaagtgtttgttatctcgccttctcttttgaaaaaccattctggcttttttagagagggcgtgtttgatagcgtggatttaaaggagcaagcatga

SEQ ID NO: 22752 - DNA, 1839 bp, Helicobacter pylori
atgcaatattcttctttgctgtcagtggtgttgtttttgcctttaatcggtgcaatttatgcggggctgtttggggctaaagctaaagcgttgcatgtgggcgttttcaattctttgtgcgtgctggtttctttcattggcgctgtggttctttttattcaagcttggcatcatcaaagctatgaaaaatatttatttgactggatcgttgtagggaattttaaagtcggcttttccctcatgctggataatatcaatgcagtcatgattgtcgtggtaactttagtttctttcttagtgcatgtgtattctataggctatatggagcatgacgcagggtttaaccgctatttttcctatctcagcggctttgtgttttccatgctggtgttggtgttgagcgataattttttagggcttttcattggctgggaaggggtggggctatgctcttacttgctcattggcttttggtatcataagacaagcgcgaataacgcttctattgaagcctttgtgatgaatcgaatcacggatttaggcatgctcatggggattattttgatcttttggaattttggcaccctccagtataaagaagtctttagcatgctcaataacaccgattattccatgctcttttacattagcgtgtttcttttcattggcgctatggggaagagcgctcaattccccatgcacacatggttagccaacgctatggaggggcctacgccagtgtccgcactcatccatgcagcgacgatggtaaccgctggggtgtatctagtcatcagagccaatcccttgtatagcgcggtgtttgaagtgggttatttcatcgcatgtttaggggcgtttgtggctctttttggagcgagcatggccttagtcaataaggatttaaagcgcattgtggcttattccacgctttctcaattaggctatatgtttgtagcggccggtcttggggcttatgcgatcgcgcttttccatctcttcacgcatgcgtttttcaaatccctccttttcttgggctcagggaatgtcatgcatgcgatggaagacaatctggatattactaaaatgggcgctttatacaaacctatgaggatcacagctgtctttatgattatagggtcagtggctttgtgcgggatttaccctttcgcaggatacttttctaaagacaaaattttagaagtggcttttgggatgcaccaccatattttatggtttgcgcttctaattggggcgatctttaccgctttttatagcttcaggctcatcatgcttgtgttttttgcacccaaacagcacgaaatcaaccacccccacgaggctcaaaatttcatgcttttaagcatgttgccgttaggggttttagcggtcattgccggattttttgaagagccgttttttcatttcatttctcaagtgatccctagcgttggagagtatctagtcccgctcgctcttttaatcagtatcaccaccatagtggtgttattgagtatcgcctatgccatatttaaatataaaaatggtatcacttccaaaaaagaggggggctttttatacaagctcttgctcaaccaatactatatcccgcagctctatcaagggattgcaaaagtttttagcgccatcgcttcattcttgcaccaagtcgtggaattaaaaatcattgatgcgatagtggatgctataggaagaagcgtttttgttatagggcgtgtgtttaggatcagtcaagatgggaatttaacctccatgctgcgcttcatggtggctggggttttaatcttgttagcgtttgtagctttttttgggagataa

SEQ ID NO: 22753 - DNA, 2406 bp, Helicobacter pylori
ttgtggcttaagtcaaaaatctttcttttaatgggcttattctcccattctcttaacgccttaagtctcacgctcacgcaaggcaaggaagggggggaagatttttctgttttaaccttacgacacaacaaggcgttttcttgtttttatgctaatgaaaaaccgccaagcgggattgaagcgtctttatccattatacgcgctaaacgccccatagaatgcgtgatagactctattcctaaggagggctttacccctttagaaaacgcttttttcaatatcacctattctatgcaccaacaacaattcattttacacatcaaacccaaagtgatgcgaaggctcacccttttttcttttgacagggattataaaaaagcgatccccctttttgtggaaaacgatcctaaagccagaatgtggcaaatcataggctatgatcaaaatatcccttttttgagcaaaaaagacaacgctcaaaaaggcttgaatttccccattgtcattaaagacgctcaaacccctatcattcaagagctagatgtgaataacaaacccctactcaccacaaagggctatgacttaaacgcttatttagaggctaaaaaacaaatggattcgcaagcctattttgacgctttgcgaacgatcagccgcgcgtttaaaaactaccctcaaacgatgtttaaaaaagatttgtatttgttagaaattatcgcattaggacaattaggcattaaaaaatccttactcatagacattggcacccaatggattaaaaattacccgactgatcccaatatccctgaagcgttatactatgtcgccaaagctttagacgagaacaaccattacaaacaggccatgcgttattacaaacgcattcttttagaatacaagaactcgcgctacgctcctttagcccaaatgcgtttagccattgaagcggctgaaggctctgatttgagcaacgctaacatgctttttaaagaagctttttctaacgccaaagacaaagagagtgcgagtgaaatcgcgcttaattgggctgaagcagagataaactatcaaaattttaataacgctaaatacctcattgataaggtggtccaatccaaccctgattatatttctacgcatagcgaatcagccctagacttgctcaagttattgaaaaaaaaccagatgaatgcaagcgcgattgagatcgctcacttgctcctcaatcaagatgatgatctgaaagctaaagagcaagcgctttatgatttaggagcgttgtatgcaaggatcaaggactttaaaaacgcccacctttacaatctgcaatatttgcaggaccatgcggaactggataaagcttctgtcgttagggcgcgcgatgaaaaagcccttttttccatggaggggaacacgcaagaaaaaatcgcccactatgacaaaatcattcaaaatttccctaattctaatgaagccctaaaggctttagaattgaaagcccaactattgtttgaaaacaagcgttatgctgaagtgttaagcatgcaaaaaaatttgcctaaagattcccctttgatccaaaaaacgctcaatgtccttgctaaaaccccattagagaaccatcgttgtgaagaagccttaaaatatttatcccaaatcacaacctttgaattcagccccaaagaagaaatccaagcctttgattgcttgtatttcgcatcgctcaaagaaaaagcgcaaatcattgccctaaacgcttttaaaacggctaaagcccctagcgagaaattaatatggctttatcgtttggggcgcaattactaccgcttaggggattttaaaaattccactctggcctctaaagacgctttaattctcgctcaaagcttgaataaaaaagaattttatgatattgcttttgttttattttcagattacatgcaaaacaatgaaaaagaattggctctccatttgtatgcgtttttagaaaagcatttcaaaggcgataaacgcatggcgctagtttattttaaattgctagaaaatgaaaaagatcctaaaagcgtcaaaatttatgccacaagcttgctcaaactccaagacgcttataaggactattcttacacgccctttagcgaatttgctctcattgacgcttacagaaccaccaaagactatttaaaagcgttagaaacgctagacaaacttttaaaccgcaggctttctttagaagatcaccaaaaagccttatacttgcaatccagcttattggatctaacccatcaaaaagcaaaatctagagccagtttagaaaaatgcgttcagttaaaacaaaaagatcaaacaaacgcatggcaaaatttatgcgaacagggtttgaatttattcaaaaacaaggagtcataa

SEQ ID NO: 22754 - DNA, 1182 bp, Helicobacter pylori
atgaataaaaaagcgtattttggggagtttggagggagttttgtttcggagttgttagtgcctgcattaagagaattagaacaggcgtttgatgcgtgtttgaaagatgaaaaattccaaaaagaatattttcgtcttttaaaggattttgtgggccgtcctagccctttaaccttgtgtcaaaatatcgtttctaaccctaaagtcaagctttatttaaaacgagaggatttaatccatggcggggcgcataagactaatcaagccttagggcaagcccttttagcgaaaaaaatgggtaaaacaaggatcatcgctgaaacaggcgccggtcagcatggcgtggcgacggctatcgcttgcgcattattgaacttaaaatgcgtggtttttatgggatctaaagacatcaagcgccaggaaatgaatgtttttagaatgcacttattaggcgctgaagtgagagaggttaattcagggagcgcgacgcttaaagacgctgtgaatgaagccttaagagattgggcgagcagttacaaggacacgcattatttgctaggcacagccgccgggccacacccttaccccacaatggttaaaacctttcaaaaaatgataggcgatgaggttaaaagccagattttagaaaaagaaaaccgcttgcctgattatgtgatcgcatgcgttggaggggggtctaacgctatagggatattcagcgcatttttaaacgacaaagaagttaaactcataggcgtagagccggcgggtttagggctagaaaccaataagcatggggcgactttgaataaggggcgtgtggggattttgcatgggaataaaacctatcttttacaagatgatgaaggccagattgcagaaagccatagcattagcgccgggcttgattatccaggagtggggccagaacacagctatttaaaagaaagtgggcgtgcggtttatgaaagcgcaagcgatgctgaagcgctagaagccttcaagttgttgtgccaaaaagaaggcattatcccagcgctagaaagctcacacgccttagcgtatgccttaaagctcgctcaaaaatgcgaagaagaaagcatcatcgtagtgaatttaagcggcagaggggataaggatttaagcaccgtttataacgctttaaaaggaggtttaaaatga

SEQ ID NO: 22755 - DNA, 1359 bp, Helicobacter pylori
atgcctagcgtgttagaaaacatccttaaagacaagctcctagaagtctctgatcttaaaaaaaaccacgctttaccgataaacataaacccaagcgatagggattttaaaaaggcgttactagaaaaaaagaccagctttattttagaatgcaaaaaagcatcgccctctaaaggtttaatcagaaaagattttgatctgttaaaaataaccaagacttatgaaaaattcgcctcttgtatttcggttttagccgattctaaatattttttaggctcttatgaaaacattaagatcgtttcgcagcattccaccaagcccattttgtgtaaagattttatcattgacgcttttcagatcaaactcgctagaatgatgggggcgaatgcggtgcttttaatgttaagcgtgttagatgataaaaattatttagagcttttcaacctcgccaaatccttaaacatgagcgtgctgactgaagtttccaaccagcaagaaattgagcacttgctcaaactccaatacgacattataggcatcaataacagggatttacacaccttaaaaaccgatattaaccacacgctcaaattacgccccctgttgcctaaagatgcgctcattatcagtgagtccggtatttattcgcatgcacaaatcaaagccctagccccttatgtgaatggctttttagtgggtagctctttgatgaaagaaaaggatttgaaaaaagcgtgtattaaattgattttaggcgaaaataaagtgtgcgggcttacaaggattaaagacgctaaagccgtttataaaaaccattttatttatgggggtttgatttttgaaaaatcttcgccccgatacatcaagcctaaagaagccctaaaaatcacaaaagcggttaaaaaactggattttgtgggcgtgtttgtgaaagatagcattaaaaaaattcaaaaaatcgttaaaaaacttgatttaaaagcggtgcagctttatggctattcgcaaaaagaaatcgctcaattgaaaaaagcactccctaaaacttgcgcgatctggcaagtaataagcgtgatgagtgctaaagatttagtgcctaaaactaaagaggcctctctaatcttatacgacactaaaggggataaaatgggaggcaatggcgtgagttttgattgggaaattttagaaaatgtcaaaacgcctttcatgctagctggggggcttaatttggataatattcaaaaagccttgaaagttgaagcgttgggtttggatttcaattccggtttagaaataagccctgggattaaaaataaggataaaatcaagcgattagcccgaattttaagagagtattaa

SEQ ID NO: 22756 - DNA, 549 bp, Helicobacter pylori
atgaaaaaagcgttaatatccaccctttttggtgttagtttggcgtttgcaaaaccttatacgattgataaggcaaactctagcgtgtggtttgaggtcaaacacttcacgttcaatgaaacaagaggcgcgtttgataattttgatggcaaaattgatctagagcccaacactaaaatgctcagcgtttttgaaggcaatattgatgtgaaaagcgtcaatactagggatagaaaaagagataaccacttgaaaacagcggacttttttgatgtggtaaaataccccaaagggagctttaaaatgaccaaatacgaagatggtaaaatctatggggatttgactcttcgtggcgtaaccaagcctgtcgtattggaagccaaaatccaagcccccttacaaaaccccatgaataaaaaagaattcatggtgttacaagctgaaggcaaaatcaaccgcaaggattttggtatcggtaaaacctttagcgatgctgtcgttggagatgaggtaaagattgagctcaaactagaagcttacgcccaataa

SEQ ID NO: 22757 - DNA, 654 bp, Helicobacter pylori
atgcaagtttcacaatatctgtatcaaaatgtgcaatctatttggggggattgtatttcccatccgttcgttcaaggcatagggcgtgggactttagaaagagataaatttcgtttttatatcattcaggattatttgttccttttagaatacgctaaggtgtttgctttgggcgtagttaaagcttgtgatgaggcggtgatgagggagttttctaatgctatacaagatattttaaataacgagatgagtatccataaccattacattagaggacttcaaatcactcaaaaagaattgcaaaacgcgcgccccactctagcgaataaatcctatacaagctacatgctcgctgaagggtttaagggctctatcaaagaagttgcggcggctgttctatcctgtggttggagctatttagtgatcgcgcaaaatttaagccaaatccccaacgctttagaacatgccttttatgggcattggattaagggctatagttccaaagaatttcaagcgtgcgtaaattggaatattaatttgcttgattccctcactctcacttcttcaaaacaagaaattgaaaaattaaaggacatttttatcactacaagcgaatacgaatatctgttttgggatatggcgtatcaaagttga

SEQ ID NO: 22758 - DNA, 351 bp, Helicobacter pylori
atgagacacaaacacggataccgcaagcttgggagaaccagctcgcacagaaaggcgttattaaagaatttagcgatcgctttgattgagcataacaaaattgaaacagggatttataaggctaaggaattgcgcagttacattgagaaattgacgacagcggctcgtgtgggcgattttaatgcgcaccgccatgtttttgcatatttgcaaaacaaagaagccacccacaagcttgtaactgaaatcgcgcccaaatacgcgcaaaggaatggcggatacaccaggatccaacgcaccacttttagaagaggggacgcttccactctagccaccattgaatttgtatga

SEQ ID NO: 22759 - DNA, 1035 bp, Helicobacter pylori
atgaaagttatcaaaacagcacctttgatcccatcagaaattaaggtgctagagaaagagggcaatcgggttaagatttctctggctccatttgagtttggttacgctgttacgctcgctcatcctattagaaggctcttgcttttaagctctgtggggtatgctcctgtaggtttaaagattgaaggcgtccatcatgagtttgactctttaaggggggttactgaagacgtgtcgctttttatcatgaatttaaaaaatatccgctttatagccaaggcgttagtggggcaggatagctctttagaaaaccaatcggttgtggtggattattcttttaaagggcctatggagcttagggctagggatttgaattctgagcagatagaaatcgtcaatccggaaatgcccctagcgacaatcaatgaagacgctcaattgaatttttcgctcattatttataaaggaatggggtatgtcccaagcgaaaacacaagggaattgatgcctgagggctacatgccgctagacggctctttcacgccgattaaaaaggtcgtttatgagattgaaaacgttctggttgagggcgatcccaactatgaaaaaatcatttttgatattgaaacagacgggcagattgacccttataaagcgtttttatcagcggtgaaagtgatgagcaagcaattgggtgtttttggcgaaagacccattgctaacacggagtattcaggcgattacgctcaaagagatgacgctaaagacttgagcgctaagattgaaagcatgaatttgagcgctaggtgttttaattgcttggataaaatcggcatcaagtatgtgggcgaactcgtgttgatgagcgaagaagagcttaagggcgtgaaaaacatgggtaaaaaatcctatgatgaaatcgctgaaaaattgaatgatttgggctatccggtaggcacagaattaagccctgaacaaagagagagtttaaagaaaagattagaaaaattagaagataaaggaggtaacgactga

SEQ ID NO: 22760 - DNA, 627 bp, Helicobacter pylori
atggcaagatatagaggtgcagtagaaagactagaaaggcgttttggggtttctttagccttaaaaggtgaaaggcgattgagcgggaagagcgcgctagataaaagggcttatgggccaggccagcatgggcaaagacgcgctaagacttctgattacgggttgcaattgaaagaaaagcaaaaagctaaaatgatgtatggcatttctgaaaagcaattcaggagtattttcgtggaagccaatcgcttggacggcaatacgggtgaaaaccttatccgtttgattgaaagaagattggataatgtcgtctatcgcatggggtttgcgaccactagaagctctgctaggcaattggtaacgcatgggcatgtgcttgtggatggtaagcgtttggacattccctcttatttcgtgcgttcagggcaaaaaattgagatcaaagaaaaaaccaagagcaactctcaagtggtgcgcgcgatggaattgacagctcaaacagggattgtgccatggattgatgtggaaaaagataaaaaatacggcatcttcacccgctaccctgaaagagaagaagtggttgtccctattgaagaaagactcattgtagaattgtattctaagtaa

SEQ ID NO: 22761 - DNA, 396 bp, Helicobacter pylori
atggctaagagaaatgtaacggctaaaaagaaagtagtcaaaaagaatattgcgagaggggttgtttatatttcagcgacctttaacaacaccaacatcactatcactgatgaaatgggcaatgtgatttgctggagcacggcgggcggtttagggtttaaaggctctaaaaaatccaccccttatgcggcccaacaggctgtagaaagcgctctaagcaaggctaaagagcatggcgttaaagaagtgggcattaaggttcaagggccaggcagtgggcgtgagaccgccattaagagcgtgggcgcgacagagggcattaaagtgctttggattaaagacatcaccccgctccctcataatggttgcagaccccctaaaagaagaagagtgtaa

SEQ ID NO: 22762 - DNA, 363 bp, Helicobacter pylori
atggcaaggattgctggtgtagatttaccaaaaaagaagagagtggagtatgcccttacctatatttatgggattgggcttaagagttccagagagattttagaagcggtaggcatttcttttgacaagcgcgtgcatgaattgagcgaagatgaagtgtctagcatcgctaaaaaaatccaacaaagctacctagtagagggcgatttgcgtaaaaaagttcaaatggatattaaatctttaatggacttggggaattatcgtgggatcaggcatcgtaagggtcttcctgtgagaggtcaaaccactaaaaataacgctaggactcgtaagggtaagaaaaaaaccgtgggtagcaagtag

SEQ ID NO: 22763 - DNA, 114 bp, Helicobacter pylori
atgaaagtcaggccatcagtgaaaaagatgtgcgataactgcaaaatcattaaaagaaggggcgttattagagtgatctgcgctacccctaaacacaaacaaagacaaggataa

SEQ ID NO: 22764 - DNA, 219 bp, Helicobacter pylori
atggcaagagatgatgttatagaagtggatgggaaagtgattgaggcgttgcctaacgctacttttaaggtggagttagacaataagcatgtggtgttgtgccgtatttctggaaagatgcgcatgcactatattaggattgctttaggcgatagggttaagctagagcttacgccctatagcttagacaaaggtcggataacttttagatataaatga

SEQ ID NO: 22765 - DNA, 1263 bp, Helicobacter pylori
atgaataaagctattgctagtaagatactcatcactttgggttttttatttctctacagagtcttagcttatatccccattcctggcgtagatttagcagcgatcaaggctttttttgacagcaattccaacaacgctttggggttgtttaatatgtttagcgggaatgcggtttctcgcttgagcatcatctcgttgggtatcatgccctatatcacttcttcaattatcatggagcttttgagcgcgactttccctaacctggctaaaatgaaaaaagagcgggatggcatgcaaaaatacatgcaaatcgtgcgttatttgaccattttaatcaccctaatccaagcggtgagcgtttcagtaggcttaaggagcattagtggaggagccaatggggcgatcatgattgatatgcaagtttttatgatcgtttcagcgttttctatgcttacaggaacgatgctactcatgtggataggggagcaaatcacgcaaaggggcgtggggaatgggatcagtctcattatttttgccgggattgtttcagggatcccatcagctatttcaggcacattcaatttggtcaatacgggcgttattaatatcttaatgctcattggtattgtgctgattgttttagcgactatttttgcgattatctatgtggaattagctgagcgcaggatccctatttcttatgcgcgtaaagtggtgatgcaaaaccaaaacaagcgcatcatgaattacattcctattaagttgaatttaagtggggtgatcccccctattttcgcttcagctttgctcgtgttcccttctacgattttgcagcaagccacaagcaacaaaaccttgcaagcggttgcggattttttaagcccgcaagggtatgcgtataatattttgatgttcttgctcatcatcttttttgcttacttttattcttctattgtgttcaattctaaggatattgcggataatttgaggcgtaatggcgggtatattccagggcttaggcctggagaggggacttcatcgtttttaaattctgtagcgagtaagctcactttgtggggttcattgtatttagcgctcatttctaccgtgccttggattttggttaaggctatgggcgtgcctttttactttggaggcacagcggtgctgattgtggttcaagtcgctattgacaccatgaaaaagattgaagcgcaaatttatatgagcaagtataaaactttaagcgcggtaggcttttaa

SEQ ID NO: 22766 - DNA, 408 bp, Helicobacter pylori
atgataatgggattagaaaatttaaaaccggctaaaggtagcgttaagaaaatcaaacgagtgggccgtggtcaaggaagcggcatgggaaaaacggccacaagaggcggtaaaggccaaaccgcaaggacaggctataaggctaaaagaggctttgaaggagggcaacaacccttacaacgccgtttgcctaaaataggttttaggactaaagattctcatatctattctatcaatgtggaaaagaatgaagcgattaaaaatttagaagaaatcactttttcaagcttgcgtgctttacaccatttccccctttatattgaaggcgtgaagttgatcggtaaagacgctaaaaacttggcttctaagattaaagatgagagaatcaaaacaagcgggcagaagtaa

SEQ ID NO: 22767 - DNA, 462 bp, Helicobacter pylori
atgacagaaaggaaaggtatggaagagattaacagagaagagtttcaagaagtcgttgtgaatattggtcgtgtaaccaaagtggttaagggcggtaggcggtttcgttttaacgctctagtggttgtgggcaataaaaatgggcttgtaggctttggtttgggcaaggctaaggaagtccctgatgcgattaagaaagcggtagatgatgcgtttaaaaacctaatccatgtaaccattaaaggcacgactatcgctcatgatattgagcataaatacaacgcaagccgtattttactcaaaccggcaagtgagggaacgggagtgattgctgggggttcaacgcgccctatcgtggaattagcaggcattaaggatattctcaccaaatctttaggctccaacaacccctataatgtggtgcgcgcgacttttgacgctttagcgaaaatcaaggcgtag

SEQ ID NO: 22768 - DNA, 360 bp, Helicobacter pylori
gtgatgaacgcgaaagcattgtataaaaagaaagccttaagagatcgccgaaaattaaggatcaaaagcaagctcttgggcgatgcgttaaggcctagggtgagcgtttttcgttcgaatcgctatttctatgcgcaagcgattgatgatgttaaacaaagcaccataacgcatattgatggcaggaaaatgggctttaaaaacacgcaagaagacgctaaaaaattaggtgctctctttgctgaagaattgaaaaaagcagggattgagcgagcggtttatgacaggaatggttatctctatcatggcgtggtggcagcgtttgctgaaagcttgagagagaacgggatcgctctatga

SEQ ID NO: 22769 - DNA, 537 bp, Helicobacter pylori
atgtcaagaatcgggaaaagaatcattgaaatcccaagctctgtgcaagcgagcgttgaagggagcaagcttctttttaaaaacagcaaagaaaagcatgagctagaaactcacaaccgggtgaaaatcacgcttgaaaacaaccaattgagcttccagcctgtgggcgaagacgcgcagtctagggcttattgggggacctatggggcgttagccaacaacattgtaataggcttaagcaccggctttagtaagactttagaagtcaatggcgtgggctataaggtggctttgggcaataaaactttggatttgagtttgggttttagccacccggtgaaataccccattccagcagggattgaaatggtggtggaaaaaaacacgatcacgatcaaagggagcgataagcaaaaagtagggcaagtcgccgctgaaatcaggagcttcagacccccagagccatacaagggcaagggcgtgaaatacagcgatgaagtcattattagaaaagctggtaaaacagctaaaaaataa

SEQ ID NO: 22770 - DNA, 396 bp, Helicobacter pylori
atggtaaatgatataattgcagattcattaactcgtttgagaaacgcttctatgcgccgcttagaattcacacagctttattacgcaaagatcgtggtttctattttagagatttttaaagaaaagggtttcattaaagatttcaatgtcaaagataaagacaagaaacaatcggtttatgtgcaattggcttatgatgaaaaagggcattcaaaaatcagcgaagtgaagcgcctaagcaagcccggtcgtcgtgtgtataagcaaaaaaacgagttgaagcgctttaaaaatggctatggcgtgattgtggtaagcacttctaaaggggtgatcaccaacgaagaagcttacagacagaatgtcggtggcgaagtgctttgtagcatttggtaa

SEQ ID NO: 22771 - DNA, 186 bp, Helicobacter pylori
atggctaaaaaatcaatgatcgcaaaggctcaaaggaaaccaaaattccaagtaagggcttataccagatgccgcatttgtgggagacctcattcggtttatagggattttggactttgtagggtgtgcctgaggaaaatgggcagtgagggactcatcccaggcttgagaaaagccagttggtaa

SEQ ID NO: 22772 - DNA, 546 bp, Helicobacter pylori
atgtttggtttgaaacaattttatcaaagtgaagtgagaacaaaactcgctcaagaattagacatcaaaaaccccatgcttttacccaagctagaaaaaatcgttatcagcgtgggcgctggggctcatgcaaaagacatgaaaatcatgcaaaatatcgcacaaacgatttctttgattgcagggcaaaaagcggttatcactaaagcgaaaaaatccgttgcaggctttaagatcagagaaggcatggcggtaggggcgaaagttaccttaaggaataaacgcatgtataatttcttagaaaagctgattgtgatttcgttacccagagtgaaagactttagagggatttcacggaatggttttgatgggtgcgggaattacacctttgggatcaatgagcagttgatttttccggaagtggtttatgatgatattatggtcagtcatggcatgaacatcactatggtaacttctacggacaacgataaagaagcgttcaagttgttagaattgcttggattgccttttgcaaaagtgagataa

SEQ ID NO: 22773 - DNA, 222 bp, Helicobacter pylori
atgaaaagcgaaatcaaaaaaaatgacatagtaaaagtcattgcaggagacgataagggtaaggtcgctaaggttttagcggtgttgcctaagacttctcaagtggttgttgaagggtgtaaagtggtgaaaaaagcgattaaacctactgatgataaccctaaagggggctttatccataaagaaaagcccatgcacatttccaatgtgaagaaagcctaa

SEQ ID NO: 22774 - DNA, 369 bp, Helicobacter pylori
atgatacagagttttacaagattgaatgtcgctgacaatagcggcgctaaagaaatcatgtgcattaaggtgttaggaggcagccacaaacgctatgcgagcgtgggtagcgtgatcgtggcttccgtgaaaaaagctatccctaatggtaaggtgaagcgcggtcaagtcgtcaaagccgttgtggtgagaacgaaaaaagaaatccaaagaaaaaatggttctttggtgcgttttgatgacaatgcagcagtgatcttggacgctaaaaaagatccggttggcacaaggatttttgggccagtgagccgagaagtgcgttacgctaatttcatgaaaattatttctctagcaccggaggttgtataa

SEQ ID NO: 22775 - DNA, 261 bp, Helicobacter pylori
atgaatacaaaagagccgcataaaaggctggtgcaaggcaaggttatcagcaagtttgctgaaaaaagcgctgtgattcttgtggaaagaaaagtggtgcatgaaaaataccgcaagattgttaaaaaattcaaaaaatacaccatccatgatgaaaacaatcaggtgaaagtaggggattttgtgagcgcgattgagtgcagaccgctttctaaaaccaagtctttcacgcttaaagaaattttagtagtgggagtataa

SEQ ID NO: 22776 - DNA, 201 bp, Helicobacter pylori
atgaaatatactgaattgaaagataaaagtatcaaggaattagaagagttgttgcatgctaaaaaagcggagctttttgagttgcgcgttaagttaaaggctatgcaattgagtaatcctaacgagattaagaaagctagaagaaatatcgctcgcattaacacggccatcaatgcgcattattcttctagcgttgagtaa

SEQ ID NO: 22777 - DNA, 426 bp, Helicobacter pylori
atgttaatgccaaaaagaacaaaatacagaaagcaaatgaaagggcgcaatcgtgggaaagcccatcggggtaactccattgcgtttggggatattgcgattaaagccatagagcatgggaggattgattcacgccaaattgaatccgcaagggtggccatgacaaggcacattaaaagagcgggtaaggtgtggattagagtattccctgataagcctttgaccgctaaacccttagaaaccaggatgggtaaaggtaaaggctctgtggaaaaatgggtgatgaatatcaagccgggcagaatcgtttatgaaatgctaggcattgaagaaggattagcgagagaagctttagcgttagctcagagcaaacttccttttaaaaccaaaattgtaacttgtgagagcgaaaatgaaatatactga

SEQ ID NO: 22778 - DNA, 705 bp, Helicobacter pylori
atgggacaaaaagttaatccggtaggtttaagattaggtattaataggaattggacttccagatggttccctagtgctcgcaccgctccaagcaatattgatgaagacaataaaattaggaagttccttaaaaaagagctttattacgctggcgtgagcgagattgtgattgaaagagcggctaaaaaactgcgcgttacggttgtagcggctcgcccagggcttatcattggtaaaaaaggcgtggatattgaaaaagtcaaagatggcttaaaaacgctcatcaaaaaagaagtctccattaatattaaagaagtcaaacacccccaagctgacgcccaattagccgcagaaaatgtagccacccagctagaaaaaagggtcgctttccgccgtgcgatgaaaaaagtcatgcaagcggcgttaaaatccggcgctaaagggatcaaggtgtgcgtttctggccgtttagcaggggctgaaatcgctcgcaccgaatggtatatggaagggcgcgtgcctttacacaccttaagggctaagattgattatggctttgctgaagcgatgacggtatatggtattattggcgtgaaagtgtggattttcaaaggggaagttttgcaaaaaggtatccaatttgaaaaaaaagaagaggctaaagaagaaagagagcctagaagaagcagaagagggaggcaataa

SEQ ID NO: 22779 - DNA, 369 bp, Helicobacter pylori
atgagtaaagcgttattaagatttgtgcggttatctcctactaaagccagattgattgcaagacagattcaaggcatgaacgctgaattagcgatcgctagtttggaatttacgcccaataaagcggccagagtgctttcaaaagtggtggcttctgcggtcgctaacggctctttagacgccaagagtgctctgattgtttcttgcagagtggatgctggccctgtgcttagacgctccattccaagggctaaaggcagagccacagccattagaaagccaacatctcatgtattcgtagaagtagcagaagggaaagaaatgaaatcttctaaaagccataaaaaaaatcaagcagaaggtaagtag

SEQ ID NO: 22780 - DNA, 282 bp, Helicobacter pylori
atgtctaggtcaattaaaaagggtccttttatagacgaccacttgatgaaaaaaacgctcaaggcaaaagagggtaaggataaccgcccgattaaaacatggtctagaagaagcaccattttgcctgaaatgattggttttacttataatgtgcataacggaagggtttttatccctgtgtatatcacagaaaaccatgtgggttataagttaggggaattcgctcctacaagaacttttaaagggcacaaaggcagtgtccaaaaaaagattggcaagtaa

SEQ ID NO: 22781 - DNA, 831 bp, Helicobacter pylori
atggcgattaaaacttataagccctacaccccaagcagacgcttcatgtcggtgttggactctaaagacattaccgcaaaaagcagtgtcaaaggcttactcactaagcttaaagcaacagcagggagaaacaataacgggcgcatcaccagccgccacaaagagagaggggctaaaaaactctatcgcattattgatttcaagcgcaataaatacaatattgaagggaaagtggctgcgattgagtatgatccttacagaaatgcgcgcatcgctcttgtagtctatcctgatggggacaaacgctatattttacagccaagcggtttgaaagtgggcgatagcgttatcgctgctgaaggcggtttggatattaaagtgggctttgcgatgaagttaaaaaatatccccataggaacggtggtgcataatattgaaatgcatccaggggctggcgggcaattagccagaagcgcaggaatgagcgctcaaatcatgggtagagaaaataaatacaccattattaggatgccaagctctgaaatgcgctacattctaagcgaatgtatggcgagtgttggcgtggtagggaatgaggattttatcaatgtctctatcggtaaggcagggcgtaaccgccacagagggatccgcccacaaactcgtggtagcgcgatgaacccagtggatcacccgcatggtgggggtgagggtaaaacagggacaagcggtcatcctgtatcgccttggggcactccagctaagggctataaaacgagaaagaaaaaagctagcgacaagctcatcatttccagaaagaaacataaataa

SEQ ID NO: 22782 - DNA, 282 bp, Helicobacter pylori
atggcagacatcatggatataaagtcaattctttacactgaaaagtcattaggattgcaagaaaaaggtgttttagtggttcaaacggctcaaaatgtaaccaaaaaccagctcaaagaagtgtttaaaacttactttggctttgagcctttgaaaatcaattctttgaaacaagaaggtaaggtgaaacgctttagagggaagcttggacaaagaaagtcgtttaagaaattttatgtgaaagttccagagggcgctagcattgccgcccttggtgcttaa

SEQ ID NO: 22783 - DNA, 648 bp, Helicobacter pylori
atgagtaaggccatcgttttagacagccatttgaaagaaaagggtagcgtggagttacctaaaagatatgagagtatcaacagccataatctctatctttacgtgaaacattatttatcttctgcgcgcgctaataccgctaaaagtaaaaaccgcgctgaagtgagcgggggcggtaggaagccttgggcgcaaaaagggggcggaagggccagagcagggagcatcacttcgcctgtgtttgtgggtgggggtgtctctcatggggctacgaataaccgcaattacaaccttaaaatcaacaaaaaacaaaaacgcctggctttagaatacgctttagaagaaaaagcgcaagcgaataagctttttgtggtggaaaaaatcgctataaaaggcgtggttgaagacaataaaaggaagcatttgactaaagaagccaaccaaatgttccaggctttagagcaacgagacactttgtttgtgtgcatgaacatggacgaatacaccgagttagcctttagtaaccttaaaaaatgccttattgttgatgtgagcgagttaaacgcttatcttttggcggcgtttagctctgtggtgatggaagaagcggcgtttcagcatgtggtgcaagataagacagaggagtaa

SEQ ID NO: 22784 - DNA, 576 bp, Helicobacter pylori
atggaatttttagttcaaaagataggcatgagccgcaccattgacgctaacagcacgcctgtaaccttgcttaaagtcttgcaagcgaaagtgtgccagctagaaaacgggaaagctttagtggcctatgcgatgcataaaaaacacaataaggcgattgaaggccagcaaaagaaataccagctcagcaaagagttcaaccattttgctaccttaaaagcttcccaacaaaaagagcttggcgatttggatttgagcgctttagaaacgcttaaaagggttaaagcgagctttaaaacgaagggaagaggctttgcgggggtgatgaagcgttggaatttccaaggcgggcctgcagcgcatgggagccgtttccatcgccgtcctggttctattggtaacagagaatggccaggaagagtgcaaaagggtaggaaaatggcagggcattatggcaatgagctagttacttgccaaaacgaggtgctctcttttgataaagaaagtatggtgttagtgctaaagggttcagtggccggcttttctggggcttatggacgcattagagcggtataa

SEQ ID NO: 22785 - DNA, 315 bp, Helicobacter pylori
atggaaaaaatcaggttgaagctcaaagcttatgaccatagagtgttggatcgctctgttgtggctatcgtggaagccgtaaagcgctcaggttctgaaattagagggcctatccctttaccgactaagaataagcgttacaccgttttacgctccccgcatgtcaataaggattcaagagagcagtttgagattagggtttatagccgattgattgatattatctcggccaccccagaaaccgtggatagcttgatgaagttggatttagctcctgaagtggatgtagaagtaacctctatggaaacgaagtag

SEQ ID NO: 22786 - DNA, 630 bp, Helicobacter pylori
ttgggttgcgtatcaatgactctaggcattgatgaagcgggtagggggtgtttggccggttcgctttttgtggctggggtggcgtgtaatgaaaaaacagccttagaatttctaaaaatgggtttaaaagacagcaagaagctcagcctaaaaaagcgctttttcttagaatataagatcaaaacgcatggtgaggtggggtttttcgtggttaaaaaaagcgcaaatgaaattgatagcttgggcttaggggcgtgtttgaaactcgctgtgcaagaaattttagaaaatggttgctctttagttgatgaaataaaaatagacggcaacacggcgtttggcttgaacaaacgctacccccatatacaaaccatcatcaagggcgatgaaacaatcgctcaaatcgctatggcgtctgttttggcgaaagcttttaaggacagagaaatgctagagttgcacgctttgtttaaggaatacggctgggataagaattgcgggtatgggactaaacaacatatagaagcgatcattaagctaggggctacgccttttcatcggcatagcttcacgcttaaaaaccgcatcttaaatcccaaactcttagaggtggaacaacgccttatttaa

SEQ ID NO: 22787 - DNA, 1083 bp, Helicobacter pylori
atgaatggtttttgcgctagactacgagccataactcataatgaaagattaaaaatgaaaatagcggtattactcagtgggggggtggatagctcttatagcgcttatagcttaaaagagcaagggcatgaattagtggggatttatttaaaactccatgcgagtgaaaaaaagcatgatttatacatcaaaaacgctcaaaaagcatgcgagtttttaggcattcctttagaggtgttggattttcaaaaggattttaaaagcgcggtttatgatgaatttatcaacgcctatgaagaagggcaaaccccaaacccttgtgcgttgtgcaaccctttaatgaagtttgggctagctttggatcacgctttaaaattagggtgtgaaaagatcgctaccgggcattatgcgagagtcaaagaaattgacaaaataagttatattcaagaggctttggataaaactaaagatcagagctattttttatacgctttagagcatgaagtgatcgctaaattggtgttccctttaggggatttgctaaaaaaggatattaagcctttagccttgaatgcgatgccttttttaggcactttagagacttataaggaatctcaagaaatctgctttgtggaaaaaagctacattgacactttaaaaaagcatgttgaagtggaaaaagagggcgtggtgaaaaacctacaaggcgaagtcattggcacgcataaaggctatatgcaatacacgattggcaaacgcaaaggctttagtattaaaggcgcgttagagccgcattttgtggtggggattgacgctaaaaagaacgagctagtcgtgggcaaaaaagaagatctcgccacgcattcgcttaaggctaaaaacaaatctttaatgaaagattttaaagatggcgaatattttatcaaggctcgttacaggagcgtgcctgctaaagcgcatgtgagtttgaaagatgaggtgattgaagtggggtttaaagagcctttttatggcgtggctaaagggcaagctttggtcgtttataaagatgacatcttgcttggtgggggcgtgattgtttaa

SEQ ID NO: 22788 - DNA, 858 bp, Helicobacter pylori
atgaaaatttctccatctccacgcaagctcagtaaagtttcaacgagtgttagctttttaatctcttttgccctatacgctatagggtttggctattttttactgcgcgaagacgccccagagcctttagcgcaagccgggaccactaaggttaccatgagtttagccagcatcaacactaattccaatacaaagactaatgctgagtcggctaaacccaaagaagagcctaaagaaaaacccaagaaagaagagccaaaaaaagaagaacccaaaaaggaggttacaaagcctaaacctaagcctaaacccaagccaaagccaaaaccaaaacctaagcctgaacccaaacctgaaccaaaacccgagcctaagcctgagcctaaagttgaagaggttaaaaaagaagagcctaaagaagagcccaaaaaagaagaagctaaagaggaagctaaagaaaaaagcgctcctaaacaagtaacaactaaggatatagtcaaagaaaaagacaagcaagaagaatccaacaaaacctctgagggggccacttctgaagctcaagcttataacccaggggtgagcaacgaatttttaatgaagatccaaaccgctatttcttctaaaaaccgctaccctaaaatggcgcagattaggggtattgagggcgaagtgttggtgagctttacgatcaatgctgatgggagcgttacggacattaaagtggtcaaaagcaacaccacagatattttaaaccatgcggctttagaagccattaaaagcgcggcacatctattccctaaaccagaagaaaccgtgcatctaaaaatccctatcgcttatagcttgaaagaagactga

SEQ ID NO: 22789 - DNA, 1209 bp, Helicobacter pylori
atgttagctaaaatgtcgtttatgcaaaatgttaaaaacattcaagaagtggaagtgagccataaaagggtgcttattagagtggattttaatgtgcctttagatgaaaatttgaatattaccgatgatacgcgcattagagagagcttgcccaccatccaatattgtattgacaacaaggctaaagatattattttagtgagccacttgggccgccctaaaggggttgaagaaaaattgagtttaaagccctttttgaaacgccttgaaagactcttaaaccatgaagtggttttttctcaaaatattgtgcaactcaagcaggctttaaacgaaaacgcgcccacaaggatttttcttttagaaaatatccgctttttaagaggcgaagaagaaaatgatgaaaatctggctaaagatttagcgagcttgtgcgatgtgtttgtgaatgacgcttttggcacgagccacagaaagcatgccagcacttatggcaccgccaaattcgcccctattaaagtgagcgggtttttactcaaaaaagaaattgattcgttttatcaagcgtttaaccaccctttacgccctctattgttgattgtagggggggctaaggtcagctccaaactcaccctattaaaaaacattttagatctcattgacaagctcatcattgccggggcgatgagcaacaccttcttaaaagctttaggctatgatgtgcaagattcttctgtagaagacgctctaatcaatgacgccctagaattattgcaaagcgcgaaagaaaaaaaagtcaaagtctatttacccatagacgctgtaaccactgatgatattctcaaccccaaacacattaaaatttcacccgtccaagacattgagcctaagcacaagatcgctgatatagggcctgcgagcttgaaattattttctgaagtcatagagagtgcacccaccattttatggaatggccccttaggcgtgcatgaaaaacaagaattcgctagaggcacaacctttttagcccacaaaatcgctgacacttacgctttctcgctcattggtgggggcgataccattgatgcgatcaatcgcgcgggcgaaaaggataacatgagctttatctctaccggtgggggagcgagtttggaattgttagagggcaaaattttaccttgttttgaggttttggacaaacgccattaa

SEQ ID NO: 22790 - DNA, 993 bp, Helicobacter pylori
atgccaattagaatcgctatcaatgggactgggcgcatcggtttgtgcgctataagagtcgctagtcaaagaaaggatatagaaattgtcgctatcaattctaccgctgaattagaaactcttttgcatttgatccgccatgacagcgtgcatgggcattttgaagcccaattaaacgctgatagaaccctaaatatcgggcatagtaaaaacattttagtgttgagcgagcgagacatcaacaagcttgatttttctgccgctaacgcagaaatcatcatagaatgcaccgggaaattcaattccctagaagcttcaagcgctcatcttaaaaacagcgtgaaaaaagtcatcatctccgctcccgcacaaaatacgcccacctttgtctatggggtgaatcataagaattaccataatgaaagcgtgatttctaacgcttcttgcacgactaatgctagcgctcctttattaaaaatcttagatgaagcctttaaagtagaaaacgcgcttttaaccaccattcacagctacactaacgatcaaaaccttttagacaccaagcacaaagacatccgccgcgctagagcggctggtttaaaccttatccccacaagcaccggcgtgagcaaagccatttcgctagtcttaccgcatttaggccctaaagttacaggccttgcgattagagtgcctacccccaatgtgagcttagtggatctgtctttaaattttaaaaaatccgtgagtaaagcaagcgttcagcatgcgcttaaagacgcttgtaagcatgcctttaaaggggttgtaagcattgatgaagaaaggcttgtttcaagcgattttatttcttcgccttttagcgcgatcgtgattgatgatcaaatcatgacaataggcgaaaaaaatgctaaagtattggcatggtatgataatgagatgggttatagcgagcgcttgatagacatggcgcaatatatagcacaaaattaa

SEQ ID NO: 22791 - DNA, 723 bp, Helicobacter pylori
atgaagtcaaataaaaagtccaatcgtttaagagcgatttatagagctttagtgatcgctataggactagctgttatcatcgttttcaattactttaaccgcaaaaacaataacgcccgctccagccgtagggcttgttcgtgctttttttcccttaccggggttaatttagaaaaaataggcacttttgatacggacgctaaactcattgtcttaaaccaccaaagcttactagacatcatttatttagaagcctaccaccctagaaatatttgctggatcgctaaaaaagagctgggcgaaatccctttttatgggcatgccttaacggataccggaatgattttaattgacagagaggataaaaaggggattgtgagccttttgaaagcgtgtaaagaaaaattagaccaaaaccgccctttagtgattttccctgaaggcactagaggcaaaggaggagaaaaattcctccctttcaagcaaggggctaaaatcatcgccgaaaaattccagctcaaaatccaacccatggtgttaatcaattccattaaaatctttaattccaagcctctagaagcctataaagcgcgcacccgtttagtcatgctagaaagctatacgcctgattttaactcgcccacctggtatgaagaattacaagaacgcatgcaaaaagagtatttaaaacactatcatgaattaaaccctagcgaacaatga

SEQ ID NO: 22792 - DNA, 873 bp, Helicobacter pylori
atggactatcaaacctttaacgagatttttaatcgttttgtctttggaacatctaaagcgaaattacttgaaaatattgccgaaaatcctgaacgctatttggggatttttagacccactaagcctaaaacaaaattattacaaaatttattgacttcccatgagattaagtttggcgatgcgtttgaatacttaatagaacaatacttaaaagagcataacttttcacctttatctaaaaaaatcccttattacaataagaataaagaaaaaagggaatctttagaattagatcagttggctaaaaaagataacacctattattttatagaacaaaaaatgcgagacgaccatgacagcgccaaaaagagagggcaaatagataactttgaaaggaaattagaggctttaatccatcgttatggcgaaaacattcaaggctatttttactttatagatgagagtttgaacaaaaatcaaaattattataaagaagaattgcaaaaattatctgttggttatggcgtgcctttgagattgtgttatggtaaggagttgtttgaaaatcttaatatcttgcaagtttgggatgaggttttaaaccatttagcacgatggcgtgaaattttacctgatttgcccagtttgaattttgatgaaaatcctttagaaagctttagagaaatcaaagatttagcgccaagcgtttatagaaaacttttggataatgatgaaattttcaatcttgtgttaattttattcccagaacaaaaagctttaaaaatgttagcagagcattttaaacgacaaaataaaacgatttatcagcaattagcgtcaaagttagaagaaaagttattgtctttgcgatag

SEQ ID NO: 22793 - DNA, 2508 bp, Helicobacter pylori
atgctaaaagaatatttagaaagcattaaagatcttacgcctgaaaagaatgaactcacgcaccgcccttctttatacaacttgcttaatcagttaaaaaaccatttcaataaagagtttaagattgaacatgagcctgaaagaaagcaaggaagccagcctgattttcgcgtttcttatcaagggataaacatcggctatatagaaaataaaagagcagggaccaatcttagccagcttttaaaaagcgaaaaaagcgatcaaatccttaaatacttagaattaaaccctaacctcatgctcaccgattaccttaatttcatgtgggtagggaaagatgaaaataatgagcctttaatcaaaaaagaaatctctgtcgccagccttgatgaactctctaaacccctaaaacccaatccgcaaaccgagcgcgatttgattgaattgttcaaaagctttttcaaccacgaagcagcccctattactaacgctaaagattttgccacgcatttaagcccgcgcaccaagtatttaaaagacgctttaatcaaataccaagaaaaagcgcaagtttctagcatttttaacaactttaaagaatatctttatgaagaattgagctttgaagactttagcgatgcgctcgctcaaacgctcacctacagcctttttctagccaagctcaaccacccttctgaaaaaattaatttggataatgtgaggagtttgatccctaaaaatttcgctgtgatcagagaaatggcggattttttaaagaaacttgatgaaataaaagaaatccaatggcttttaaatgaaatcttaagctcgataaatcatgttgatatggattctatccttaaagatttgaatgacgataaagacccttatttgcacttttatgaaacctttttaagcacttatgaccctaaattacgagagagtaagggcgtgtattacactccagattctgtggtgaaattcatcattaacgctttggatagtttgcttaaaacgcatttcaaagacgctcccttaggcttaaaaagcgctttggataacgaaaacatcaagctcttagattttgccaccggcacaggcacttttttattagaagcgttcaggaaagccctagaaacgagaaagacaagcgatggaggcacctccactaaagaggacaaatatcaaaatctcttgaagcaattctatgggtttgaatacttaatcgctccttatgcgatcgctcatttgaacctcagccaagcctttaaggaggaatttaaaaagcctctcaaagaaaacgatgcgcttcaaatcattttaaccaacaccctcatacagcctagtgaaatcatcgcttatcgtgggttaagcccgatttttgaaaaagaactttcaaacgctcaagaaatcaaaaaaaatgaaaacatccttatcatcaccggtaatcccccttatagcggggcgagcgagaataagggcttgtttgaatgggaagtgaaagccacttacggcatagatcccaaatttcaaaccatagaaattgaaaaaaatgttaaacttgccgataaaatccaaacgcttttaagcagcgttcaaatccaaaagcaaagcggcagcaaaaacgatctaaagaaacttaaaagcctccattccaaatacaaactacaagatgagaaaaaccctaaatggctcctagacgattatgtgaaattcatgcgtttcgctcaaaacaagatcgaatcattagggcatggcctttttggctttatctctaacaacgcctttttagacaaccctacttttagggggttaaggcgctctcttttagaatgctacgatgagctttatatcctaaacttgcatggaaatgcgaggaaaaaggagaaaaccccacaaggcgcaaaagacgaaaatgttttcaatatcaaacaaggcgtgtccattaacctctttgtcaaaaacccgcaagtagtaaagcaaaaaatccactattatgatgtttatggccaaaggactgaaaaatacgcctttttagcccaaaacgatttgaatagcattgaatggcttgagattgccccaagagggcctttttacttgctgttgcctttagaaacgcccttgttagatgaatacgaacaagggtttagcgttcaagagatgtttcaaattggaagcaccggtatttgttcgcaacgagaccatgtcgttttccacaaggacaaagaaagcttgctaaagcttttaaaagatttttcaaccttagaacccagtgaattacgcagaatttataatattaaaaaagatggtagggattggcgtttagaatatgccattaaagatgttaaggcaaacgctaacaatttagaagaatacattgtttcgtgccaataccgcccctttgatttttactacacttattataccggtaaatcaaagtcttttatcgcttatccacgaggcgaagtttttaagcacatgttaccccccccccccaacaaaccctaa

SEQ ID NO: 22794 - DNA, 1467 bp, Helicobacter pylori
atggatcatttaaagcatttgcagcaattgcaaaacattgaaaggatcgtgctttcaggcattgtgttggccaatcataagattgaagaggtccatagcgttttagagcctagcgatttttactacccgcctaacggcttattttttgaaatcgctttaaaactgcatgaagaagattgccccattgatgagaattttatccgccaaaaaatgcctaaagacaagcagatcaaagaagaagatctagtcgctatttttgcggcaagccccatagataatattgaagcctatgtggaagagattaaaaacgcttccattaaacgaaaactttttggcttggctaacaccattagagagcaagccctagaaagcgcgcaaaaatccagcgatattttaggcgctgtggagcgagaagtctatgcgttattgaatggcagcaccatagaaggctttaggaatattaaagaagtgcttgaaagcgcaatggatctcattacagaaaaccaaagaaaggggagtttggaagttactggcataccgactggctttgtccaattggataactatacgagcggtttcaataaggggagtttagtcattataggggcaaggccgtctatgggtaaaactagtttgatgatgaacatggtcttaagcgcgctcaatgacgataggggggtagcggtttttagtttagaaatgtccgcagagcaactcgctttaagggcgttatcggatctcacctctattaacatgcatgatttagaaagcgggaggcttgatgatgatcaatgggaaaatttagccaaatgctttgatcacctttcgcaaaaaaaactctttttctacgataaaagttatgtgaggatagagcaaatccgcttgcaactacgaaagcttaaatcccaacacaaggaattgggtatcgcttttattgactatttgcagctcatgtcagggagtaaagccactaaagagcgccatgagcaaatcgctgaaatttcaagggagcttaaaactttagccagagaattagaaatccctatcatagcgttagtgcaactcaaccgcagcctagaaaaccgagacgataaacggcccattctttcggatatcaaagacagcggggggattgaacaagacgctgatattgttttatttttatatagaggctatatctatcaaatgagggctgaagacaacaaaatagacaaactcaaaaaagaaggtaaaattgaagaggcgcaagagttgtacttaaaagttaatgaagaaaggcgtatccacaagcaaaatggcagcattgaagaggctgaaatcattgtggctaaaaacaggaatggggctacaggaacggtttatacgcgctttaacgctcctttcacgcgctatgaagacatgcccatagattcccatttagaagaagggcaagaaactaaagtggattatgatatagttacaacttga

SEQ ID NO: 22795 - DNA, 1194 bp, Helicobacter pylori
ttggctatcgctttaacccactatgaaaaaaaatcccttaaactctttttagggatttatttaggctcttcgtttgtgttgatgctagtgattagcgttttagcgtttaactatgaaaaaaacgaaaaaatcaaaatgatacgcatggacatggacaaaatggcttctaagatcgctagcgaagtgattgccttgcacatgcaaacgcatggggattatcaaaacgctttaaacgctctcatttcacgctataaagacgcttccatagccctttttgatagtaaaaagcgtgttttgtattctaatatccctgaaagcgccaatttgattaaaaaccataaagaagcgggcttttttagttttaggggagagtattacctattgagcgatgaaactttcgctcacttaggcgtggctaaaatgctttttaaaaattctaaaccccttcatttttcttctttgtatcgtaacattgttttagtgtttgttgtagcgtttttatgcgtgataggggtttctgtgtttttggggcgtttgtttttaaagcccattaggaatgaaatcacccgcattgatcattttttaaaaaacaccacgcatgaattaaacacccccatgagcgctttagtcttgtctttaaaaaccttagaagacaaccaacaacaccgccgcattaaaatcgctatccagcgcatgagttttttataccgctcgctctcgtatttagtgatgcaagatattgagcgcgaatcttttgtgcttttagatttaaaagccctgattattaaagaaaacacgctttttagcgagatgatagactaccacaagctggaatttaaaagcgatttagtggaagtggaacttaaagctaaagagcaggatttcatttcgctttatagcaatttgctcatgaacgcgatcaaatacagcgtcatgaatgggtatatccacatagagctaacgcatgcgtttttgaaagtgaaaaatttagggtatgaaatccctaaagacaagatcacagaattaagcgttcgttatgtgcgtttcaattctggcgtgttgggttatggtatagggttaggtttggtgaaaaaagtgtgcgaaaagtataaaatgcgtttagaaattcatagcgaaccctctttaaagggatcgttttatgaaaattcgttttgcgttcaatttcaaggataa

SEQ ID NO: 22796 - DNA, 1044 bp, Helicobacter pylori
atgatttttagcaaattgatcggtttgttttcgcatgatattgccatagatttaggcacggctaacacgatcgtgttagtcaaagggcagggcattattatcaatgagccttctattgtggcggtgcgcatgggattgtttgattctaaagcttatgatattttggcagtggggagcgaggctaaagaaatgctaggcaaaacccctaacagcatcagagcgattcgccccatgaaagatggcgtgatcgccgattatgacattaccgctaaaatgatccgctactttattgaaaaagtgcacaaacgaaaaacatggatccgcccgcgcatcatggtgtgcgtgccctatggattaacaagcgtggaaaggaatgcggttaaagagagcactttaagcgcgggggctagagaagtctttttgattgaagagcctatggcagcagcgattggagcaggcttgccagtcaaagagcctcaagggagtttgatcgtggatattggcggaggcacgactgaaattggcgtgatcagtcttggggggctagtcatttctaaaagcattagagtggctggggataaattggatcaaagcatcgtggaatacatccgcaagaaattcaatctgttgataggcgagcgcaccggtgaagagattaagattgaaatcggttgcgcgatcaaattggatccgcctcttaccatggaagtgtcagggagggatcaagtgagtgggctgttgcacacgattgaattgagctctgatgatgtgtttgaagccattaaagatcaggtgagagaaatttctagcgctttaaggagcgtgcttgaagaagtgaagccggatttggctaaagacattgtgcaaaatggcgtggtgcttaccggcggtggggctttgattaaaggcttagacaagtatttgagcgatatggttaaactccctgtgtatgtgggcgatgagcctttattggccgtggccaaaggcacaggagaagccatacaagatttggatttactcagccgtgtgggttttagtgaataa

SEQ ID NO: 22797 - DNA, 1341 bp, Helicobacter pylori
atgaacgaaacgctttattgcagtttttgcaaaaaaccagaatcaagagatcccaaaaaacgccgcattatttttgcgagcaatctcaataaagatgtgtgcgtgtgcgaatattgtatagatgtgatgcatggggaattgcacaaatacgacaattctttattggcgctcaaaagagaccgattgagaagaatggaatctagcgcttatgaagaagagtttttactctcttacattccagcccctaaagagcttaaggcggttttagacaattatgtgatagggcaagagcaggctaaaaaggttttttccgtagccgtgtataaccattacaaacgcttatcttttaaagaaaaactcaaaaaacaagacaaccaagacagcaatgtggagttagagcatttagaagaagtggagttgagcaagtctaatattttactaatcggccctacaggatcaggcaaaactttaatggcgcaaactctggccaagcatttggatattcctatcgccattagcgatgcgactagcttgactgaagcgggctatgtgggcgaagacgtggaaaatattctcacaagattgttgcaagcgagcgactggaatgtccaaaaagcccaaaaaggcattgtgtttattgatgagattgataaaatcagccgtttgtcagaaaaccgctctatcactagagatgtttctggcgagggcgttcagcaagcgttgttgaaaatcgttgaaggttctttagtgaatatcccccccaaaggcggcagaaagcaccctgagggcaatttcattcaaattgacacgagcgatattttattcatttgtgctggagcgtttgatgggttagctgaaatcattaaaaaacgcaccacgcagaatgtgttgggtttcactcaagaaaagatgagcaaaaaagagcaagaagcgatcttgcatttagtccaaacccatgacctggttacttatgggcttatccctgagcttattggccgtttgccggttttaagcacgctagatagcatcagtttagaagcgatggtggatattttacaaaaacctaaaaacgctcttatcaagcaataccagcagcttttcaaaatggatgaggtggatttgatctttgaagaagaagccattaaagaaatcgctcaactcgcattagaaagaaaaaccggggctaggggcttaagggcgatcattgaagatttttgtttggatattatgtttgatttacccaagcttaaaggatcggaagtgcgtatcactaaagattgtgttttaaaacaggctgaacctttgatcattgctaaaacgcattctaaaattcttccttaa

SEQ ID NO: 22798 - DNA, 480 bp, Helicobacter pylori
atggaacaaagccatcaaaacttgcaatctcaattttttatagagcatatcttacaaattctacctcaccgctatcccatgcttttagtggatagaattatagagttacaagccaataaaaaaattgtcgcttataagaatatcacttttaatgaagacgtgtttaacgggcatttccctaataagcccattttcccgggcgttttgatcgtagagggcatggcgcaaacgggagggtttttagccttcactagcttgtgggggtttgaccctgaaatcgccaaaacaaaaatcgtgtatttcatgacgattgataaggttaaattccgcatccctgtaaccccaggcgacagattagaataccatttagaagtcttaaagcataagggcatgatctggcaagtgggtggcacggctcaagtggatggcaaagtggtcgctgaagccgaattgaaagccatgattgcagagagagattaa

SEQ ID NO: 22799 - DNA, 2508 bp, Helicobacter pylori
atgactgaagattttcctaaaattctgcctttattggtagaagaagacacctttttatacccctttatgatagcccctatttttttgcaaaataacgccagcattaaggcggtggcttacgctaaaaacaacaaatcgttagtctttattgcatgccaaaaagacaaattaaacgataatgaagccccttattatgatgtgggggtgataggttcggtgatgcgtgaagccaacatgcctaatgggcgcgtaaaattgctctttaatggcatcgctaaggggcgtattttagagcctgctaaagaaaacgagcaaggctttttagaagctcaaataagccccattgaatatttagaatacgataaagaaaacattcaagcgatcgtggaagtgttaaaagaaaaggtgatcactctagccaatgtcagctcactcttccccccggatttgatcaaggctttagaagacaatgacgatcctaaccgcatcgctgatttaatcgcagcggccttgcatttaaaaaaagatcaagcgtattctctttttgccaacaacaacaccgaacagcgtttgttggatttgattgatattgtgatagaagagactaaaacccaaaaactccaaaaagaaatcaaatccaaagtccatcaaaaaatggagcaaaccaataaggaatatttcttaaaagagcagctcaaacaaatccaaaaagagcttggcacagacaaacagcgagatgaagatttaaaccaatactaccaaaaactagaaagcatcaagccttttttaaaagaagaagcgtttaaggagattaaaaagcaaattgaccggctgagccgaacccatgcggacagctcggatagcgcgactttacaaaattatattgaaaccatgctggatgtgccttttgggcaatacgggaaaaaagcgcttgacattaagcatgtgagagaacaactagacaaggatcattattccttaaaaaggcctaaagagcgcattgtagaatactttgccaccatgcagcttttagaaatgcgccgcaagaaaaagccagaaaaaaaagacaaaactaaaggcacgattttatgcttttatgggcctcctggcgtgggtaaaacaagcttagctaattccatcgctaaagcgatagagcgccctttagttcggatcgctttagggggattagaagatgtgaatgaattaagagggcacagacgcacttatataggctcaatgcctgggcgcattgtccaagggcttattgaagctaaaaagatgaatccggtcatggttttagatgaaattgataaggtggataggagcgttaggggcgatccagcgagcgctttattagagatcttagaccctgagcaaaataccgcttttagggatcattatgcgaattttagcattgatttgtcgcaagtgatttttatcgctaccgctaacaatattgacagaatcccggcccctttaagagacagaatggaatttatcagcgtgtccagctacacgcctaatgaaaaagaagaaatcgctaaaaattatcttattccccaagaattagaaaagcacgccttaaagcctagcgaagttgagattagccatgagtgtttgaaactcattattgaaaaatacaccagagaagcgggcgttagggatttacgaagacagatcgcaacgattatgcgtaaagtggctttaaaatacctagaagataacccgcaccaaaaagggcgaaccaaaaaaggcaaaaatgaaaaaagcgaagatcaaaaaagcgaagatcaaaaaagcgaaaatcaaaaaagcgagaacaaagatttctgcgtctctatcacgcctaacaaccttaaagagtatttagagcgcatggtgtttgaaattgaccccatagatgaagaaaataaaatcggtatcgtcaatggtttggcatggactccagtgggcggtgatgtgcttaaaattgaagtgctcaagattagaggcaagggagaattgaaactcaccgggagtttaggcgatgtgatgaaagaatccgccattattgccttttctgttgtcaaagtcttattggataacgaaaccttaaaagtgcctaaaatccctagcgagaccgatgcagagggcaagaaaaagaaaaaagtgctgaaagtttataacgcttatgatttgcatttgcatgtccctgagggggctacgcctaaagacggcccgagcgctgggatcgctatggcaagcgtgatggcgagcattttgtgcgatagggctacaagaagcgaagtggcaatgacgggcgaattgactttgagcggggaagttttacccataggagggttgaaagaaaagttgatcgctgcttttaaagccggcattaaaaccgctctcattcctgtcaaaaattacgaaagggatttagacgagatccctgctgaagtgcgagaaaatttaaacatcgttgcggtgaaaaacatcgctgaagtgttagaaaaaactttgctttga

SEQ ID NO: 22800 - DNA, 483 bp, Helicobacter pylori
gtgtttttggcttcaggggtgatattggtcattcttaaagagatagctacaacaaatcaaggttttcaatcgctaataccattagaaaaaatcaataatgaatttttatactatttaattttaacactaaaaaataaattattaaagttggcaagtggtagcacttttttagaagttagcccaaacaaaattaaaaatttattaatccccctaccccctctaaacgaacaaatcgctatagctaacattttaagcgatttggatcgttatctttataatttagacgccctcattcttaaaaaagagagtgttaaaaaagctttaagctttgaactattgagccaaagaaaacgcttgaaaggcttcaatcaagcttggcaaagagtgagacttggggatattgccaactatttaatgaatccaagcaaaatcgcgcgatttttgggtgggtgtaaaaagcgtctaaattcttttgcaaggtag

SEQ ID NO: 22801 - DNA, 1308 bp, Helicobacter pylori
atgaaattttttcttttaaagaaattcagcgaatttttaaacgctcaaacgcattttagcctcaaacgcttgaacgcgtctagctttttattagagactttttctaaagaaaaacacgcctttgttgtagatttgagcgcaccttatatcggtttgtccaaaaaacccccagagagcgttttaaaaaacaccctagcgttagatttttgtttgaacaaattcactagaaacgccaaaattttacaagcaaacatcattgataacgatcggattttagaaatcaatggcgctaaagatttagcttataaaagtgaaaattttattttgcgtttagaaatgatccctaaaaaagccaaccttatgattttagataaagaaaaatgcgtgatagaagcctttcgttttaatgacagggtcgctaaaaacgatattttaggggcattgcctcctaatatttacgagcatcaagaagaggatttggattttaagggattgttagacatattagaaaaagattttttattttaccaacacaaagaattggaacacaaaaaaaatcaaatcatcaagcgattaaacgcccaaaaagaacgcttgaaagaaaaattagaaaaactagaagatcctaaaaatttacaattagaagcgaaagaattgcaaactcaagcctcattgttgctcacttaccagcatttaatccataagcatgaaagccgcgtggttttaaaggattttgaagataaagaacgcgcaattgaaattgataagagcatgcccttaaacgcttttatcaataaaaaattcactctcagtaaaaaaaagaaacaaaaatcgcaatttttgtatttagaagaagagaatttgaaagaaaaaatcgcttttaaagaaaatcaaatcaactatgttaaaggagcgcaagaagaaagcgttttagaaatgtttatgccctctaaaaattctaaaatcaaacgccctatgagcgggtatgaagtgctgtattataaggattttaaaatcggtttagggaaaaaccaaaaagaaaatatcaagcttttacaagacgcaagagcgaatgatttgtggatgcatgtaagaaatattcccggatcgcatttgatcgttttttgccaaaagaacgcacccaaagatgatgtcattatggaattagccaaaatgttgattaaaatgcaaaaagatgcgtttaatagttacgaaattgactatacgcaacgaaaatttgtcaaaatcatcaaaggagctaatgtcatttactcaaaataccgaactattagtctaaaggacacttaa

SEQ ID NO: 22802 - DNA, 855 bp, Helicobacter pylori
atgaaagattcacttcaaactatcggcgtgtttgtgcggcccacccattatcaaaaccctctttttgaaaagctagagcaggctaaagaatgggttttaaagcttttagaagatgaggggtttgaaagctttatgattgatagccttgatggggcaaaagatgcgcgattgatagaaaaagctgatgcgtttttatgtttagggggcgatggcacgattttaggggctttaagaatgacgcattcttacaataagccatgttttggggtgagaattgggaatttagggtttttgagcgcggttgaattgaatggtttgaaagatttcttacaagatttcaagcaagataggatcaaattagaagagcatctggctttagagggccgtatcgggaaaacctctttttatgcgatcaatgaaattgtgatcgccaaaaaaaaagctttaggggttttagacatcaaagcttatgcaggccatacgccctttaacacctataaaggcgatgggcttatcattgccacgcccttaggctcgaccgcttataatttgagtgctcatgggccgattgtgcatgctttaagccagagctatattttaacgcccttgtgcgatttttctttaacgcaacgccctttagtgttaggagcggaattttgtttgaatttttgcgctcatgaagacgctcttgtggtcattgatgggcaagccacctatgatttaaaggccaaccaacccctatacattcaaaaaagccccacgaccaccaagctcttacaaaaaaattcaagggattattttaaagtgcttaaagaaaagctcttatggggggaaagccctagcaaaaaaagataa

SEQ ID NO: 22803 - DNA, 1143 bp, Helicobacter pylori
atgactattgggctagttaaagaaagcatggatttagaatcccgagtggctttagtgcctgatgatgtggcactaatcgttcaaaagggcgtggaggttttagttcaaaatagcgccggcgctaatagcggttatagcaacgaagcgtatgagagcgttggggctaaaatcgtggattctaaaacggcgtgggggcaggatttggtggtcaaatgcaaagagcctttagagcatgaataccctttgctaaaagaaaaagccacgctgtttagttacttggatttagcgtatcaaaaaagcttgtgcgaaatgtttatagacaaaaaaatcacttctatttgcactgaaaccattgccgggcctaaaaatgattaccctattttagcgcctatgagcgtggtggctgggaggttagccgcgcatttagtccagcattatttactggctttagagcatgttaaggggtttatgggtaagggggtcatgctagggggtttatcgggtgcgcaaagggctaaaattgtcgtagttgggggcggtgtggttggcatggagagcgcgaaagtcttaagccaaatgggggctaaagtaacgattttagaattagactacgctaaattgcaaaaccacccttattatcatttgtatgatttagaagttttaagcgtgaatgaagccaatatcattcaagccttaaacggggcggtgggtctagtgggagcggtgttagttacagcgagccaaacccctaaagtgatcttaagaaagcatttaaaatacatgcaaaaacaaggggtagtcattgatgtggcttgcgatttaggggggtgcatagagaccatacaccagacaagccattctaacccggtgtatgtggaagaggatttgttgcattatggcgtgccgaacatgccagggattgttgctaaaacgagctctacggcttatagccatgcgagcgtgccgtatttgttgtattatttagagcatggcttgaagggttttttaacagccaacactaaaatcgtggcaaacacccttggaggcttgagcgcttataacggctatatcacccaagaaggcatcgctaaagcgttcaatctggcgttcaaatcgcctttagagattttaaaggagctttga

SEQ ID NO: 22804 - DNA, 2529 bp, Helicobacter pylori
gtgttgcataaaaaagttctattggctttgactgccagcttgatttgccaagagtctttgttcgctaaggaaaaagattacactttgggcaaggtttctactgccggcaaaaaggatagatctgattattctgggcaggtcaatttgggttatagcgggattaccgcgcctaagagttggcaagatgaagaagtgaaaaaatacacaggaagccgcacggtgatctctaataaagcgctcacccaacaagctaaccaaagcattgaagaagctttacagaatgtcccgggtctgcaaattaggaatgcgacaggtgtaggggctatgcctactatccaaatccgtggctttggagctgggggttcagggcatagcgatgcgacgctgatgttagtcaatggtattcctgtttatatggccccctacgctcacattgagctagacattttccccgttacctttcaagccattgatcgcattgatgtgatcaagggtggaggcagcgtgcaatacgggcctaacacttatgggggtattgtcaatatcatcactaagcctatccctaatcaatgggaaaaccaagcggctgaaaggatcacttattgggctaaggctagaaacgctgggtttgccgctcctcctgataaaaccggcgatccttctttcatcaagtctttaggcaacaacctcctctataacacttatgtgaggagtggagggatgatcaataagcatgtgggtatccaagcgcaagctaactgggttagaggacaaggctttagggacaatagcccctctaacatttcaaactattggctagatggagtctatgacatcaatgaaaacaatgggattaaagcctattaccaatactacgattttgctatcgctcaaccaggatcactcagcgagcaagattacaaaataaaccgcttcgctaatttgcgccccttaaaccaaaaaggcgggcgttcacaacgctttggggctgtgtatgaaaaccgcttcggggatttagacaaagtgggcgggacttttagcttcacttactatgggcagttgatgactagggattttcaagtgagctctagctacaatagcgctaacatggttacttgttttagcgaagcggcatgcagggcggcaggacttccggcagggtataacttggctgtgccttattatgccactaactacaatggctgggcagaagtagaaaaccctgtgcgctccattaacaacgcttttgagcctaaagtgaatttgatcgtcaataccgggaaagtcaagcaaacctttatcatgggcttgcgtttcatgaccaccacttttttacagcgccaatacttaaacaccaatgaatgcgccaccaaaacgagcggtgagggggcaggattcttgtgtgagggcgctaatgtgatgagcggttggaaacctcacatcaagcatggcgtttatagaaactggaataactggcgtaacaattacacagcggtttatttgagcgatcgcattgaagcttgggatgggcgctttttcatcgtgcctggtttgcgctacgcttttgtgcaatacaacaacgaaaatgcgtctaactggatgcaaatccctgagaaggatttaagaaaaatcaagcacatgaacaattggatgccctcaaccaacattggctttatccccgtgcaaggcgatcacaatgtgcttacctactttaactaccaacgctctttcgtcccgcctcaattagacgttttgagctatggaggagcggagtattttacccagcactttgacacggtggaagcaggagcgcgctacacctataaggataaattcagcttcaatgcggactacttcaggatttgggcgcgcgattttgccaccgggcagtattcagtctatacaagcggtcccatgaagggtaatgtgcgccccattaatggctattctcaaggcgtggagctggaattgtattacaggcctattagagggttgcaattccatgccgctttcaactacattgacactcgtgtaaccagccatggccctttaaccgacttgaacggggatgtgctaaaagggactagctataacaagcatttcccttttgtaagccctttccaattcattcttgacgctcgttacaattggcgtaaaaccaccatcggtatttctagctatttttacagccgtgcttatagcgggattagcaacagtgcagcaggaggctattatgggatgcaatattatagtggggggaacaactatgaaagcgttcttaatagcggttatcaatgcgaagcttggtgtatgacccaacatgaagggctcttgccttggtattgggtgtggaatatccaagtgagccaaattttctgggaaaacgggagacacagagttacaggaagcttgcaaatcaataatatcttcaacatgaagtattattttacagggattggctctagccctgcaggcttgcaacctgcgcctggaagatcggttacagcgtatttgaactacactttctaa

SEQ ID NO: 22805 - DNA, 849 bp, Helicobacter pylori
atgcaagagatttttttatgttctatttccaatgtgcgcagtggggattgcaaggaagattgcgcttattgcacgcaaagctcacaccatcaaggagcgatcaagcgctataaatttaaagatgaaaaagtggttttacaagaggctagagcgttaagacaattaggggctttagggttttgtctggttacttcagggcgcgaattagacgatgaaaaatgcgaatacatcgctaaattagctaaagccatcaatcaagaagaattgggcttgcatctaatcgcatgctgcgggcgcgcggatttggagcaattagaatttttaagagatgcgggcatccatagctataaccacaatttagagacttcgcaaaatttcttccctaagatttgttccacgcacacatgggaagaaaggtttatcacatgcgaaaacgctttaagggcggggttaggcttgtgcagtggggggatttttgggcttaatgagagctgggaagatcggattgaaatgcttagagcgctagcttcgctctctccgcacaccacgccgattaattttttcattaaaaacccggtattgcccattgatgcagagactttaagtgcagatgaagccctagaatgcgtgcttttggctaaggaatttttgcctaacgctaggcttatggtggctggggggcgtgaagtggtgtttaaagataatgacaaaaaggaagccaagctttttgaatacggcatcaatgcggtggtgctaggggactatttgaccaccaaaggcaaagcccctaaaaaagatatagaaaaactgctctcttatggcttgacaatggcgacaagctgtcattaa

SEQ ID NO: 22806 - DNA, 780 bp, Helicobacter pylori
atgctagaaaccaccattgatttttctcgttacagcagcgtgaaaatcggcacgcctttaaaagtgagcgttttagaaaacgatgatgaaatctctcaagaacaccagatcataggcttagcgaacaaccttttaatcgctcctagcgcgaaaaatctcgctttattaggaaaaaactacgattatatttgcgataagggcgaatgcgttgaaatagggggagcggccaatgcgtctaaaatttttaattattttagggcgaatgatttagagggtttggaatttttagggcaattgcctggcactttaggagcgttagttaaaatgaatgccggcatgaaagaatttgaaatcaaaaatgttttagaaagcgcttgcattaataatcaatggctagaaaaagaagctttggggctgggctatcgcagcagcgggtttagtggcgttgtcttaagagcgagatttaaaaaaacgcatggctttagagaaggggttttaaaagcgtgtcaaagcatgcgcaaaagccaccccaaattgcctaattttgggagttgtttcaaaaacccgcctaacgatcatgcgggcaggcttttagagggcgtgggcttaaggggttattgtctaaaaagagtgggctttgccaaagagcatgcgaattttttggtgaatttggggggcgcagaatttgaagaagccctagatctgatagagctcgctaaagctagagtgttacaagaatacggcattcatttggaagaagaagtgaagattttgagatag

SEQ ID NO: 22807 - DNA, 2763 bp, Helicobacter pylori
gtggaagaatacaaagacaccctaaacttaaacacaaccaccttttctatgaaggggaatttgagcgttaatgagcctaaaacttacgccaaatggcaagagcaacaagcgtttaaacgcatgcaagctaggaaagacaaccatggggatttcactttgcatgacgggccgccttatgcgaacgggcatttgcatttggggcatgccttaaataaaattttaaaagacattgtcgttaaaagagaatattttaaggggaagaaaatctattacacgcccggttgggattgccatggtttgcccattgagcagcaaattttagagcgattagaaaaagaaaaaacaagcctagaaaaccccacgctgtttagagaaaagtgccgagatcatgcgaagaaatttttagaaatccaaaagaatgaatttttgcaattgggtgttttgggggattttgaagatccttataaaaccatggattttaaatttgaagcgagcatttatagagccttagtggaagtggctaaaaaagggcttttgaaagagcgccacaagcctatttattggagttatgcatgcgagagcgctttagcggaagctgaagtggaatacaaaatgaaaaaatcgccctccattttcgtggcgtttggtttgaaaaaggagagtttagaaaaattaaaagtcaaaaaagcgagcttggtgatttggacgaccacgccttggactttgtatgcgaatgtagcgatcgctttgaaaaaagacgctgtttatgcgctcacccaaaaaggctatttagtcgctaaagccttgcatgaaaaattagccgctttaggggtggtggataatgagatcacacatgaattcaattccaatgatttagaatatttagtggctacaaacccgctcaatcaaagggattcgctggtggctttaggagagcatgtcggtttagaagatggcacaggagccgtgcataccgcacctgggcatggtgaagaggactattatttaggcttaagatataatttagaagtgttaatgtctgtagatgagaaaggttgctatgatgagggcattatccataaccaactattagatgaaagctatctgggcgagcatgtttttaaggctcaaaaacgcattatagagcaattgggcgattctttattgctagagcaagagattgagcattcttatccgcattgctggaggacgcacaagcctgtgatttacagagcgactacgcaatggtttattttaatggatgagccttttatccaaaatgatggctctcaaaaaaccttaagagaagtggctttagatgcgattgaaaaggtggaatttgtgccaagcagcgggaaaaaccgcctaaaaaccatgatagaaaaccgccctgattggtgcttgagccggcaaagaaaatggggcgtgccactggcctttttcatagacaaacgcacgaataagccttgttttgaaagcgaagttttagagcatgtggccaatctttttgagaaaaaaggctgtgatgtgtggtgggagtatagcgtgaaagatttattgccccctagctatcaagaggacgccaagcattatgagaaaatcatgcacattttagacgtgtggtttgatagtggtagcacctttaaggcggttttagaagactatcatggagaaaaagggcaaagccctagcgatgtgatcttagaagggagcgatcagcatagggggtggtttcaaagctcgcttctaatcggttgtgttttaaacaaccaagccccttttaaaaaggtcattacgcatggctttatcgtagatgaaaagggcgaaaaaatgagtaaatctaagggcaatgtggtgtctttggacaagctgctcaaaacgcatgggagcgatgtggtgcgtttgtgggtagcgtttaatgactatcaaaacgatttgagagtctctcaaacctttttcactcaaacagaacaacattataaaaaattccgcaacaccctgaaattcttactcgctaattttagcgatatggatctcaagaatttagaacgcccccataacttcagccctttagatcattttatgttagagactttagaaaccataagcgctggagtcaatagcgcgtttgaagagcatgattttgtgaaaggcttgaatattttaatggcgtttgttaccaatgaattgagcgggatttatttagacgcttgcaaggatagcttgtattgcgatagcaaaaacaatgaaaaacgccaagccattcaaatggttttactcgctacagctagtaagttgtgctactttttagccccgattttaacgcacacgattgaagaagttttagagcatagccaagcgcttcgcatttttttacaagccaaagatgtgtttgatttaaaagacattagcgtttcagaaaaactccacctcaaagagtttaaaaaaccagaaaattttgaagccgttttagccttgcgttctgcctttaatgaagagttagaccgattgaaaaaagaaggcgtcattaaaaattcgttagagtgcgctattgaagtaaaagaaaaagcgttggatgaaaatttagtagaagagttgctgatggtaagctttgtggggattgcaaaagaaaaattgagtgaaacgccagcattcacgctctttaaagcccccttttataaatgccccaggtgttggcgttttaaaagcgagctagaaaacaccccttgcaagcgttgcgaacaggttttaaaagagcgatga

SEQ ID NO: 22808 - DNA, 255 bp, Helicobacter pylori
atgcgaatagacaaatttttacaatcagtgggtttagtgaagcggcgcgttttagcgacagatatgtgtaatgtgggggcggtatggcttaatgggagttgcgctaaggctagtaaagaagtgaaagcgggcgatacgattagcttgcactatttaaaagggatagaagaatacacgattttacaaatccccgctttaaaaaatgtgccacgaaaagacacgcacctttatatcgctcctaaaacaaaagaataa

SEQ ID NO: 22809 - DNA, 183 bp, Helicobacter pylori
atggcacaccatgaagaacaacacggcgggcaccaccaccaccatcaccacacacaccaccaccactatcatggcggtgaacaccaccatcaccaccacagctctcatcatgaagaaggttgttgcagcactagcgacagtcatcatcaagaagaaggttgctgccacgggcatcacgagtaa

SEQ ID NO: 22810 - DNA, 2070 bp, Helicobacter pylori
atgacggataacaaccaaaacaatgaaaaccatgaaaacagcagtgaaaattcaaaagctgatgagatgcgagccggagcgtttgagcgcttcaccaaccgcaaaaagcgtttcagagaaaacgcgcaaaaaaacgcagagtattcaaaccatgaagcgtcttcgcaccataaaaaagagcatcgccctaacaaaaaaccaaacaaccaccacaaacaaaaacatgccaaaacacgaaattacgcccaagaagaattggatagcaacaaagtagagggcgttacggaaattttgcatgtgaatgagagagggactttaggctttcataaggagttaaaaaagggcgttgaagcgaataacaagatccaagtggagcatttaaacccgcattataagatgaacttaaactctaaagcgagcgttaaaatcacgcctttagggggcttgggtgagattggggggaacatgatggtcattgaaaccccaaaaagcgcgatcgtgattgatgcgggcatgagcttccctaaagaggggctctttggcgtggatattttaatcccggatttttcctacttgcaccaaatcaaggacaaaatcgctggcattatcatcacccatgcccatgaagatcacataggggccacgccttatttgtttaaagagctgcaattccccctttatggcacgcccttgagtttggggctgattgggagcaagtttgatgaacatggtttgaaaaaataccgctcgtattttaaaatcgtagaaaagcgctgtcccattagcgtgggcgaatttatcattgaatggatccacatcacgcattctatcattgacagcagcgctttagcgatccaaactaaagccggaacgatcatccacaccggcgattttaaaatcgatcacaccccggtggataatttgcccacggatttgtatcgtttagcgcactatggcgaaaagggggtgatgcttcttttaagcgattccaccaactcccataaatccgggactacgccgagtgaaagcaccatagcgccggcttttgataccctttttaaagaagcgcaagggagggtgattatgagcaccttctctagcaatatccaccgggtctatcaagccatacaatacggcattaaatacaaccgcaagatcgctgtgatcgggcgctctatggaaaaaaacctagacatcgctagagaattgggctatatccatttgccttatcaatcttttattgaagccaatgaagtcgccaaatacccggacaatgaaatcttaatcgtaacgaccggctcacaaggcgaaaccatgagcgcgctttatcgcatggcgactgatgaacaccgtcatatttctatcaaacccaacgatttagtcatcatttccgctaaagccattcctggcaatgaagcgagcgtttcagcggtgttgaatttcttgatcaaaaaagaagctaaagtggcttatcaagaatttgacaatatccatgtgagcgggcatgccgcccaagaagagcaaaagctcatgttaagactcattaagcctaagtttttcttacccgtgcatggggaatataaccatgtcgcgcgccacaaacaaaccgctatttcttgcggagtgcctgaaaaaaatatctatttaatggaggatggcgatcaggtggaggttggccctgcgttcatcaaaaaagtcggcacgattaaaagcgggaaaagctatgtggataaccaaagcaatttgagtattgatacaagcatcgtgcaacaaagagaagaagtcgctagcgccggggtgtttgtggctacgatttttgtgaataaaaacaagcaagcgcttttagaaagctctcaattttccagtttagggcttgtgggtttcaaagatgaaaagcctttgatcaaagaaattcaagggggcttagaggtgttattgaaatccagcaacgccgaaattttgaataaccctaaaaaattagaagatcacactcgtaatttcatcagaaaagcgctctttaaaaagtttagaaaatacccggctatcatttgtcatgcccattctttttga

SEQ ID NO: 22811 - DNA, 816 bp, Helicobacter pylori
atggtagtagctaaaaagtctttaggacagcattttttaacggacgagtcgtttttagacagaatcgttaatgctttgccccccttaaacccgttgaaattagttgaaattggcgtggggctaggggatttgactcttaagttgttggatcgctatcctttaaaaacttatgagatagacagccatttgtgcgagaaaatgcgatcaaagctaaaggcacaaaaaaagccttttaaattagaattagtggaaaaagacgctctttttttaaaagaagaagagccttattttttgatctctaatttgccttattatatcgctaccaggcttgttttaaacgcgttcaaagaccctaaatgcaggggcttattggtgatgacgcaaaaggaagtggcgctcaagttttgcgctaaagattcacagaacgctttaagcgttttagcacacacgatagggaacgctacccttttgtttgatgtgccacctagcgcgtttagcccgcctccaaaggtgttttctagcgtgtttgaagtgatcaaagagccgctgaaagaaaaggcgttggcttcattagcccaagcgccattttttgaagaagccctacaaaaagggtttgaaatgttagaagattttttgaaagcttgtttctcatctcccaggaagacgctttcaaacaatcttaaaaaaagcgtttcttatagagaaaagcttgataaggtgttagattttctagcgttagaaaaccaaccaacaagcgtgagagcgtctgagataaaagattatctcaagctcttaaattaccttttaaaaggctaa

SEQ ID NO: 22812 - DNA, 219 bp, Helicobacter pylori
atggcacaccatgaacaacaacagcaacaacaggctaacagccaacaccaccaccatcaccatgcgcaccaccaccattactacggtggcgaacaccatcaccataatgcgcaacaacacgccgaacaacaagcagagcaacaagctcagcaacagcaacaacaacaagcacaccaacaacaacaacaaaaagcgcaacaacaaaaccaacaatattga

SEQ ID NO: 22813 - DNA, 882 bp, Helicobacter pylori
atgttagaatttattttaaaaattcaagctagagactctaaaggcttggtgagcacgattagcaccactatcgctaacaagggctataacatcgtcaaaaacgatgaatttgttgatcccttaaaacagcgttttttcatgcggttaaaaatccaaaaagaaatcaagcccttgaatactgaaattaaagagcaagaagagcaatccttaaagaccgctctttttaaagccctagaaaactttaacgagttattgattgaagtcattttaacgcataaaaaaaacatcattctgctcgctactaaagagagccattgcttaggggatttgcttttaagggtgtatgggggggaattgaacgctcaaattttaggcgttatttccaaccacgagattttacgccctttagtggaaaaatttgacatcccttatttttatgcgccttgcgacaatcaagttttgcatgaaaaagaagttttagaaatcattaaaaacctggaattaaagcacaaagtgagtgcagacttgctcgttttagccaaatacatgcgcattttaagccatgattttacgaagcgctatgaaaaccagatcttaaatatccatcatagtttcttgcccgcattcattggggctaatccttaccagcaagcgtttgaaaggggcgtgaaagtcatcggggccacggcgcattttgtgaatgaaagccttgatgctgggccgattatcatacaagacactctgcccattaaccacaattacagcgtggaaaaaatgcgcctagcgggtaaggatatagaaaaactggttttagctagggctttaaaactcgttttagaagacagagtctttgtacatgaaaataaaacggtggtgttttga

SEQ ID NO: 22814 - DNA, 231 bp, Helicobacter pylori
atgctcatactcagccgcaaagttaatgaagggattgtcattgatgataacatccacattaaagtcatttccatagatagagggagtgtgcgtttagggtttgaagcgcctgaaagcacccttattttgcgtgctgaactcaaagaggccattgtgagcgaaaaccaaaaagcttctgtgtgcgtagatgaaagcttgttagaaaacatcaaaaaggtcattaagccttga

SEQ ID NO: 22815 - DNA, 459 bp, Helicobacter pylori
atgaaactcattgccagcaacaaaaaagcctattttgactatgaaattttggaaactttagaagcgggattagcgcttttaggctctgaagtgaaggctttgaggcaaactagggtgaatttaaaggataattttgttaaaataatcaagggagaagcttttttatttggtgttcatatatcatatttagatacaatccatgcgtattacaagcccaatgaaaggcgagagcgtaagttgcttttacacaaaaagcaattattgaaatggcagattgaagcgtctaaagaacgcttgagtatcgtaggattgaaattgtattttaaccaaagaaatagagctaaaatccaaattgctttagtgaaaggaaaaagattgcacgacaaaagacaaagtcttaaagaaaaagcactcaataaagaaattcttgctgatttaaaacaccactttaaaggataa

SEQ ID NO: 22816 - DNA, 135 bp, Helicobacter pylori
atgaaacgcacttaccaaccacacaacacaccaagaaagcgaacccatggctttcttgtgagaatgaaaaccaaaaacgggcgcaaggtgattaatgccagacgagctaagggcagaaaaaagctttccgtctaa

SEQ ID NO: 22817 - DNA, 486 bp, Helicobacter pylori
atgccagacgagctaagggcagaaaaaagctttccgtctaaaccctatgactctttaaaaaacaagagtgagtttgacagggtttatcaaaaggggtttaaaaaacataacccttttttttcgctctttgttttggatttgtcacaagagccgccaaaagaaaaagcgggctttaaagatccgctcttttgtaggcttaaagacaaaaaaacgctttatttattaggcttgagcgtgtccaaaaaagtcggcaacgccgtgaaacgaaaccttatcaaacgccgtttgcgttcgcttacattaaagcatgccgctctttgtcaagggcttgctttggtgtttgtgcctagaagcgattgttaccatttggatttttgggctttagaaaaacattttttagaaatgctaacttccattaaaaactatatgaacaaagccttaaaagacttgaaaaaaggaataactcatacctatgcgaaacaataa

SEQ ID NO: 22818 - DNA, 1644 bp, Helicobacter pylori
atggataaaaacaacaataatctccgcttgattttagcgatcgctctgtctttcttgtttatcgctctttatagctattttttccaaaaaccaaacaaaacaacaacccaaaccacaaagcaagaaacaaccaacaaccatacagcaacaagtcctaacgcgcccaacgcccaacattttagcaccactcaaacaaccccccaagagaatttgctaagcacgatttcttttgagcatgccaggattgaaattgattctttagggcgcatcaaacaggtttatctcaaggataaaaagtatctaacccctaaacaaaagggctttttagagcatgtgggccatctttttagctccaaagaaaacgcgcaaccccccctaaaagagctcccccttttagcagccgataaactcaagcctttagaagtgcgttttttagaccctacgctcaataacaaagcgttcaacaccccttatagcgcttcaaaaaccactcttgggcctaacgaacagcttgttttaacccaagatttaggcactcttagcatcattaaaaccctgactttctatgatgatttgcattatgatttaaaaatcgcattcaaatcgcccaataaccttatccctagctatgtgatcaccaatggttacaggccggtggctgatttggacagctacaccttttcaggcgtgcttttagaaaatagcgacaaaaaaattgaaaaaattgaagataaagacgctaaagaaatcaaacgcttttctaacaccctctttttatccagcgtggataggtatttcaccaccttgcttttcactaaagatcctcaaggttttgaagccttaattgattcagaaatcggcactaaaaaccccttagggttcatttcccttaaaaatgaagcgaatttgcatggctatattggccctaaggattaccgctctttgaaagcgatttcacccatgctcaccgatgtgatagagtatggcttaatcactttctttgcaaaaggcgtgtttgttttactggattatttgtatcaattcgtgggcaattggggttgggctatcattcttttaacgattatcgtgcgcatcatcctttatcctttaagctataagggcatggtgagcatgcaaaagctcaaagaattagcccctaaaatgaaagaactccaagaaaaatacaagggcgaaccccaaaaattgcaagcccacatgatgcagctttacaaaaaacatggggctaacccactagggggttgtctgcccttaatcttacaaatcccggtgttttttgccatttatagagtgctttataacgctgtggaattgaaaagctcagagtggatcttatggattcatgatttatccatcatggatccgtattttattttaccgcttcttatgggagcgtctatgtattggcaccaaagcgttacgccaaacaccatgaccgatcccatgcaagcaaagatttttaaactcttacccctattattcacaatctttttaatcactttcccggcagggttagtcttgtattggaccacgaacaacatcctttcggtgttgcaacaactcatcatcaataaagtcttagagaataaaaaacgcatgcatgcgcaaaacaaaaaggaacattga

SEQ ID NO: 22819 - DNA, 1386 bp, Helicobacter pylori
atgaaaaatacatcgtcatcaacgactttaacaatgaatgacaccattgccgctatcgctacccctttaggcaagggagcgattagcatcattaaaatcagcggccataacgctctaaatatcctcaaacaactcacccaaaaacaagacttcacccccagatacgcttatgtgcacgatattttttctaatggtgttttattggacaaagcgttagtcatttatttcaaagccccttatagtttcactggcgaagatgtgtgcgaaatccaatgccatggaagcccccttttagcgcaaaatatcttacaagcttgtttgaatttaggggctaggcttgctaaagcgggggaatttagtaaaaaagcctttttaaaccataaaatggatttgagcgagattgaagcgagcgttcaactcatcctttgtgaagatgagagcgttttaaacgctctagccaggcagcttaaaggcgagttaaaaatttttattgaagaagctagaggtaatcttttaaagcttttggccagctcagaagttttgattgattatagcgaagaagacattcctagcgattttttagatggagtatctcttaatttagaaaaacaaatcgcctcttttaaagacttattggatttttctaatgctcaaaaacaaaggaataaagggcatgccttaagcattgttggcaaacccaatgctggcaaaagttctttattaaacgccatgcttttagaagaaagggctttagtgagcgatattaaaggcacaacaagagacaccatagaagaagtcattgaactaaaagggcataaggtgcgcttgattgatacggctggcattagagagagcgcggataaaatagagcgtttagggattgaaaaaagccttaaaagtttagaaaattgcgacattattttaggcgtgttcgatctttctaaacccctagaaaaagaagattttaaccttattgacacccttaatcgcgctaaaaagccttgcattgttgttttgaataaaaacgatttagccccaaaactggagcttgaaattttaaaatcttatcttaaaatcccttatactttactagagaccaacaccctaaattccaaggcttgtttgaaagatttgagccaaaaaatcagcgcctttttccccaaactagacactcaaaacaagctcttactcacttccctagcccaaaaaattgccctagaaaacgccattactgaattgcaaaacgctaaaaaccatttagaaactttagagcttttttcttatcacattttaagcgcgatagaaaacttgaacttgctcacccgcccttatgaaaccagccaaatgctagacagcatgttcagcgaattttgcttaggcaaatga

SEQ ID NO: 22820 - DNA, 789 bp, Helicobacter pylori
gtggagggatttagcttgaggatcaaccagtttttagcccattacaccaagcactccagaagagaggctgaaaaattggttttagaagggcgggtgaaaatcaaccatgagcatgccaaactcgctagcgtggttaaagaaaacgacagggtgtttttagacaaacgactcatcaagcccttaaaaaacaaaaaattcagcgtgctggtctatcacaagccaaagggcgaattggtgagtaaagccgatcccttaaaacggcgcgtgatttatgaaagcttggagaaaaaatacgcccattttgcgccggtggggcgtttggattttgcgagtgaaggggtgttattattgagcgatagtaaggcggtagtgagcgctttaatgcatgcggatttagaaaaagagtatctcattaaaattcaaggctttgttacaagagagatggaaaacgcgatgcaagagggcttgaaattagaaaacgctactaagggagcgcaccaaaaaactcccattaaaagcatggaatttgccccctttattggttatgaaatcatcaaaaaccatgccaaatactccaaactgagagtcattatcaatgaggggaaaaacagagaattgaggcgtttttttgcgttttttaacgctggagtgttggatttaaggcgcgttcgttatggttttgtgaatttgaatgccttgccggtagggaaaatgcgttttctaaaccgccaagaatacaatgagttgcatgcgtttatggctaatgcggctaatgttaaaggggattag

SEQ ID NO: 22821 - DNA, 3636 bp, Helicobacter pylori
atgaaagagaataaagcttttacgcatttgcacttgcacacagaatattcgcttttagacggggcgaacaagattaaaattctagccaaacgcgttaaagaattgggcatgaaaagcgtgagcgtaactgatcatgggaacatgtttggagcgattgatttttatacgagcatgaaaaaagaaggcattaagcctatcatcggcatggaagcgtatatccataatgatgacaacctttctagcaaagaaaccaagcagcgtttccatttatgcttgttcgctaaaaaccaagagggctatgaaaatttgatgttcttaagctctatggcgtatttagaggggttttattatttcccacgcatcaataaaaagcttctaaaagagcattctaaaggcattatcgcttctagcgcatgcttgcaaggggaagtcaattaccatttgaataccaataatgagagaaaccgcaagtatggggctaaaggctatgatgaagctaaaaaaatcgcttgcgaataccaagagatttttgaagacgatttttatttagagatcatgcgccatggcattttagatcagcgattcattgatgagcaagtcattaaaatgtctttagaaacagggttaaaaatcattgccaccaacgacacccactacaccatgcctaatgacgccaaggctcaagaagtggcgatgtgcgtagcgatgggtaaaaccctaaacgataaggggcgcttgaaacactccgtgcatgagttttacattaaatcccccgaagaaatggcaaagctctttgcagatattccagaagctttagaaaacacccaagaaatcgctgataaatgcgttttagagattgatttaaaagacgataaaaagaaccccccaacccccccaagcttcaaattcactaaagcttacgctcaaaatgaggggctgaattttgaagatgacgcttcttattttgcctataaggctagagaaggcttgaaagagcgcttagttttagtaccaaaagaaaagcatgatcaatataaagagcgcctagaaaaagaaattgaagtcattacgaacatgaaattcccagggtatatgctgattgtgtgggattttatccgttatgctaaggaaatgggcattcctgtagggcctggtagggggagtgcggccgggagcttggtggcttttgctttaaaaatcacggatattgaccctttgaaatacgatttgctctttgaaaggtttttaaaccccgaaagaatcagcatgcctgatattgatacggatttttgccagcgccggcgtaaggaaatcatagaatacatgattgaaaaatacggcaaatacaatgtggcacaagtcatcacttttaataagatgttggctaaaggcgtgatcagagatgtcgcaagggttttggacatgccctataaagaagccgatgattttgccaaactcatacccaaccgcttaggcatcacgcttaagggctatgaaaaaaatggcgagtttatcgagggagcgtgggaattagagcctaaaatcaaggaattagtagagagtaatgaattagccaaacaagtgtgggagtattcgctcaatttagagaatttaaaccgcaacgcaggcgtgcatgccgcagccttagtggtggatagccaaaaagagttgtggcacaaaacccctttgtttgcctctgaaaagaccggcggtatcgttacgcaatattccatgaagtatttggagccggtggatttgatcaagtttgactttttggggcttaaaaccttgaccgtgattgatgatgcgcttaaaatcattaaaacacaacacaaaattagcgtggattttttatcgttggatatggacgatccgaaagtgtataaaacgatccaaagcggggatacggtggggatcttccagattgaatccgggatgtttcaagggcttaacaagcgcttaaggccttcaagctttgaagacattatcgccattatcgcgctaggcagaccagggcctatggaatcaggcatggtagatgattttgtgaacagaaagcatggcgttgagcctatcgcttatgcgtttaaagaattagagccgattttaaagcccacttacggcacgatcgtctatcaagagcaggtgatgcaaatcgtgcaaactatcggcggtttcagtttgggtgaagcggatctcatccgccgcgctatggggaaaaaagacgctcagatcatggcggacaataaggctaagtttgtagaaggcgctaaaaatttagggcatgatggccaaaaggcggctaatttgtgggatttgatcgttaaatttgccggctatggtttcaacaaatcgcattcggccgcttatgcgatgatcactttccaaacggcgtatttaaagacttattacaagcatgagttcatggcagcgatgctcactagcgaatccaataagattgaatccgtggcgcgctatattgatgaggtcagggctttagaaattgaagtgatgcctccgcatatcaattcttctatgcaagatttcagcgtggcggagtttaaaaatcaaaagggcgagttagaaaagaaaatcgtgtttggtttgggagcgattaaaggagttgggggtgagccgattaaaaacatcattgaagaaagggctaaaggggattataagagtttggaagattttatttcacgggtggatttttctaaactcactaaaaaatctttagagccattagtgaaatcagggagcttggataatttaggctacactagaaaaaccatgctcgctaacttggatctgatctgtgatgccgggcgcgctaaagacaaggctaatgaaatgatgcaagggggtaattctctttttggagccatggagggcggaaccaaagagcaggttgttttggacatgattgatttgggcgaacatgacgctaaaacgcttttagaatgcgaatacgaaactttaggcatccatgtttcaggcaaccctttagacgagtttaaagaagaaattaagggttttaaaaatttagtcaaaagcattgatattgaagagttagaaatcggctcgcaagcttatttgctcggtaaaatcatggaagttaaaaagaaaattggcaaacgaagcggtaagccttatggcatagcggacattttggatcgatacggcaagtttgaactcatgctttttgaaaagcaattaaacgccttagaagagttggacattaataagcctttagtgttcaaatgcaagattgaagagcaagaagaagtggtgcgattgaggctttttgaaatcttggatctagagagcgctagagaggttaaaatccctaaagcccgttataaagaccctgaaaagcaaaaagaagaggtgcgcgaaatcccccccatggaaatgcttgcctctagttcttgctctttagcgatcgtgttagaaaacgatgtgaaaaaagagtttttaagacaaatcaaagagagcgctttaaaacaccagggcaaacgccccttgtatttgatcatcaaagataaggataagcaattcaaaatccaaagcgatttaatggtaaatgaaaagattaaggacgattttaaagggttagagtggagggatttagcttga

SEQ ID NO: 22822 - DNA, 1023 bp, Helicobacter pylori
atggcaaatttagaaaatttagactggaaaaatttaggctttagctacattaaaacggattttcgcttcatcgccacttataaaaacggctcttggtcgcaaggcggattggtgagcgaaaacatgttacaactcagcgaaggctcgccggtcttgcactacgggcaggcttgttttgaaggcttgaaggcttaccgctctcaaaaggggaaagctttactctttcgccctttagaaaacgccaaacgcttgcaaacttcatgcgaaagactgctcatgcccaaagtgagcgaagagctgtttttaagggcatgcgctgaagtggtgaaagcgaatcaaaaatggctcgctccttataaaagcggggcgagtttgtatttgcgcccttttgtcataggcgtaggggataatttgggggtgaagccggctaatgaatacctttttatcgtgttttgtgcgcctgtgggggcgtattttaaggggggtatagaaaaagggggggctaggtttatcactacgatttttgatagggccgcgcctaaaggcaccggtggggtgaaagtgggagggaattacgctgcaagcctgttagcccataaaatggccacagagcaaggctatgatgattgcatttatttagaccctactacgcacactaaaattgaagaagtgggggcggcgaatttttttggcatcacgcatgatgatgcctttatcaccccgcattcgccaagcattctgccaagcattaccaaaaaaagcttgatggttttggctaaagaatatttgaacctcaaagtagaagagagggaaatcctaatggatgagttggatgcgtttaaagaagctggagcgtgcgggacagctgcgatcattacgcccattaaagaaatcgtgcacaacaacaagtcttatttttttgaagcgccgggccatattactaaacgactctatgatttgcttttatccatccaacaaggcgaacaagaagcccccaaagattggatttttgaagttggctaa

SEQ ID NO: 22823 - DNA, 2679 bp, Helicobacter pylori
atgatggagcagccagtcattaaagaagggactttagctttaattgatacttttgcgtatttgtttagaagctattacatgagcgctaaaaataagcctttaaccaacgataagggctttcctacagggcttttaacggggcttgtgggcatggttaaaaaattttataaagacagaaaaaacatgccttttatcgtgttcgctttagaaagccagactaaaactaaaagagccgaaaaattaggcgaatacaaacaaaatcgtaaagacgcccccaaagagatgcttttacaaatccctatcgccttagaatggttgcaaaaaatgggttttgtttgcgtggaggtgaatgggtttgaagctgatgatgttatcgcaagcctagccacgctaagcccttataaaacccgtatttattctaaagataaggattttaaccagcttttgagcgataaaatcgcgctttttgatggcaaaacggagtttttggcgaaagattgcgtggaaaaatacgggattttgccgagtcaattcacggattatcaaggcattgtgggggatagcagcgataattacaagggggttaaaggcattgggagcaagaacgctaaggaattgttgcagcgattagggagcttggaaaaaatctatgaaaatttagacttggcgaaaaatttactcagccctaaaatgtatcgagccctgatacacgacaaagcaagcgcgtttttaagcaaagaattagccactttagaaagaggatgcattaaagaatttgattttttaagttgcgcttttcctagcgaaaaccccttattgaaaattaaagatgaattgaaagaatatggtttcatttctactttaagggatttagagaattcccctacgcctttaattttagacaacgcccccctattagacaacacgcccgccttagacaacacccctaaaaaatcatgcatgatcgttttggaaagcgccgcacctttgagcgcgtttttagaaaaactagaaaaaactaacgcaagggtttttgcgcgtttggtgctggataaagaaaaaaaagttctggccctagcgtttttatatgaagatcaaggctattttttacctttagaagaggcgttattttcgcccttttctttagagtttttgcaaaacgctttttttaaaatgttacagcatgcgcaaatcattgggcatgatttaaaacccttgttgagctttttaaaagccaaataccaggtgcctttagaaaacattcgcatccaagacactcaaattttagcgtttttaaaaaatccggaaaaagtggggtttgatgaagttttaaaggaatatttaaaagaagaattgattccgcatgaaaaaatcaaagattttaagactaaagcggagaaattggaacttttaagcgtggaattaaacgctttaaagcgtttgtgtgaatattttgaaaaggggggattggaagaaaacttgctttctttggccagagaaattgaaacgccctttatgaaagttttaatgggcatggagtttcaaggctttaagattgatgcgccttatttcaagcgcttagagcaggagtttaagaatgaattgcatgttttagagcgccaaattttggaactaattggcgtggattttaacctcaattcgcccaagcaacttagcgaagtcttgtatgataaattagggcttcctaaaaacaaaagccattctaccgatgaaaaaagcctgttaaaaatcctagacaagcatccaagcatcgctttgattttagaatacagagaattgaacaagctttttaacacttataccacccccttattgcgcctaaaagacaaagacgataaaatccataccacttttatccaaaccggcacagctaccgggcgtttaagctcgcattcgcctaatttgcaaaatatcccagtgcgatcgcctaagggcttactcattcgtaaaggctttatcgccagctctaaagagtattgtttgctaggggtggattattcgcagattgaattgcgcttattagcccatttcagccaggataaggatttaatggaggcgtttttaaaggggcgagacatccatttagaaacttctaaggcgttgtttggagaatatttggctaaagaaaaacgatccatcgctaaaagcattaattttgggctggtgtatggcatggggagtaagaaattgagcgaaactttaaacatctctttaaatgaggctaaaagctacatagaagcgtatttcaaacgattccctagtattaaagattatttaaaccgcatgaaagaagagattttaaaaacttctaaagccttcactttgcttgggcgttatcgggtgtttgattttaccggcgcaaatgactatgttaagggcaattatttgcgagagggcgtgaatgcgatttttcaagggagcgctagcgatttattgaaattaggcatgctcaaagtgagcgagcgtttcaaaaataacccttcagttaggctgcttttgcaagtgcatgacgaattgatttttgagattgaagaaaaaaacgccccagagttgcagcaagaaatccaacgcattctcaatgatgaagtgtatcctttgagggtgccgttagaaacgagcgcgtttatcgctaagcgttggaatgaattaaaaggttag

SEQ ID NO: 22824 - DNA, 576 bp, Helicobacter pylori
atgtatgtggtgttagaaggcgttgatggcgcgggcaaaagcactcaagtagaattattaaaagaccggtttaaaaacgccctttttaccaaagagccaggggggacgagaatgggcgagagtttaaggcgtatcgctttgaatgaaaacattagcgaattggctagagcgtttttattcttaagcgatagggctgagcatacagaaagcgtgataaaaccggcattgaaagaaaaaaagctcatcattagcgacaggagcttgatctctggcatggcttatagccaattttcaagcttagaattaaacctgcttgccacccaaagcgtcttgcctgcaaaaatcattcttttactcatagacaaagagggcttaaaacagcgcttaagccttaaaagtttagataaaatagaaaaccaaggcatagaaaaattacttcatatccagcaaaagctcaaaacccacgcttatgcgttacaagaaaaatttgggtgcgaagttttggaattagacgctaaagaaagcgttaaaaacttgcacgaaaaaatcgccgcttttataaaatgcgctgtttaa

SEQ ID NO: 22825 - DNA, 2049 bp, Helicobacter pylori
atgatggattttgaaaaaagcattttagaccatttaaacggagcgcaaaaaatcgctgcaagccacattcaagggccattgctcattttagcgggagctgggagcggtaagactaagactttaacgagccgtttagcgtatttgattggcgtttgtggcgtgcctagcgagaacactttaacgctcactttcaccaataaagcgagtaaagaaatgcaagaaagggctttgaaattgttgaaaaaccaagcccttatcccccccttgctttgcactttccatcgttttggtttgctgtttttaaggcaacacatgaatcttttaaaaagggcatgcgatttttcggtattagatagcgatgaagtcaaaacgctgtgcaaacagctcaaaatttcaaactttagagccagtatttctcaaatcaaaaacggcatgatggatttgagcatgcaagatagcgaatgctataaagcgtatgagctttatcaaaacgcgctcaaaaaagacaatttagtggattttgacgatttgctttttttaagccttaagattttacaagataatgaaaccatcgccaaagagactagcgagcgctaccactacattatggtagatgagtatcaagacacgaacgccttgcaattggagtttttaaaaaaattgagtttcacgcaccataatttgtgcgtggtgggcgatgacgatcagagcatttatgggtttaggggggctgatatttctaacattttaaatttttccaagcattttaaaggggctaaaatagtgaaattagagaccaactaccgctctagcgctgaaattttagcgtgcgctaattctctcatcagccacaaccaacaccgccatattaaaacgcttcaaagtttcaaaggctcgcataaaagcgtggtttgtaaagaatatttgacgcaaaaagaagagagcctggatgtggcttatcaaatcaaagcccttttaaagaagggcgagaatttagaaaatatcgctattttgtatcgcttaaacgggcttagccgcagcattgaagagagcttgaacgctttgaatatcccttataggctcattggggcgctgagtttctatgaaagagccgagattaaagacgctttggcgttcatgcatttagtggctaaaaaagacgatcgcttttttattaagcgcgttttaaacaagcccccaagaggtcttggcaagatcactcaagaatggattttttctcttttagatgaagagggtttgaatttagaagaggcgctaaaacttggggcgtttaaagacaaattaaaccctaaaaacgaatacgctttgaaacaatttatcgctatgatagggcgtttgagggaggcttttgaaatttcagtagaggagttttgctctcggtttttagaagagactaaccttttaaaaagctatgaaaaagaagacaattacgaagaaagagagggctttgttaaagagcttttaaccttagtgaaagaatattttaaaactaaccccacgcattctttactggattttttgaatgaaagcgtgctggatgcccataatacagaaaacgcgcaaaaagtgagttgcatgagcgtgcatatgagtaagggattagagtttaagcatgtgtttgtgatcgggttagaagaagggtttttcccgcatagggggttcaatcaggaaagcgatttagaagaagaaaggcgcttggcttacgtagcgatcactagggctaaagaagaattgcagctctcttatgtgaaagagcgttcgtattttgggaggaaaatttcttgctcgccctctgtgtttttagaggaagcccagttgctcaatcaagacaacccccctaaacaggatcatcaaaaagacgcgcccattaaagtgggggacttgattaggcataagatttttggcactgggagggttttaggcgtagaaaaaggcttgagcggtttgtgcttgaaaatcaattgcggagggaatgtctatgataaaatctcagaaaaatttgtagaaaaagtggataacgggttttga

SEQ ID NO: 22826 - DNA, 1248 bp, Helicobacter pylori
atgattgatagaaaacttttattgcaagattttgacaaggtggctctttctttaaaaaagcgtaataatgcgatggatgatgaattagagcgtttgcgcgaagtcatcacgcattataaaaagcgactcattgaattagaaggcttgcaagcctttcaaaacaaggtttctaaagaatttggtattaagatggctcaaaaagtggatacaagcgatctcaaaaaagagctagaaaacaataaaatcaaattgaatgagctttccaaaagcgtgggcgaattggagcaacaaattgatttgaagctttccataatccccaatctagtggatgaaaaaacccctttaggcacgaatgaagaagacaacatagaaattaaaaaaatcttaaccccaagggttttcactttcaaacccaaagagcattttgaactcgctcaacaaaacggctggattgattttgaaagcggcgtgaaactcgccaaaagccgtttttcggtcatcaggggttttggggctaaaatttatcgcgcgctcattcatttaatgctggattttaatgaaaaaaatggctttgaaatcatctacacgccggcgttagtgaatgaaaaaatgctttttgggaccgggcaattacccaaattcaaagaagatgttttcaaaatagaaaatgaaaatttgtatctgatccccaccgctgaagtaacgctcactaatctctacaacgacacgatcattagcgttgaaaacctccccattaaaatgaccgcgcacacgccttgtttcaggagcgaagcagggagcgcgggcaaggacacaagggggatgataagacagcaccaatttgataaagtagaattagtggctatcacgcaccctaaagaaagcgatgttatgcaagagcatatgctagagagcgcgagcgaaattttaaaggctttggaattgccgcaccggtttgtgcaattgtgcagtggggatttaggttttagcgcaagcaacacgatagatattgaagtgtggctgcccgggcaaaattgctacagagaaatcagctcggtgtccaacacgagggattttcaagccaggcgcgccaaaatccgcttcaaagaaaatcaaaaaaaccaattagcgcacaccttaaacggctcttctttggcggtaggcaggacgatggtcgctttaatggaaaaccaccagcaagcggatgggagcatccacattcctaaggcattagaaaaatacctttaa

SEQ ID NO: 22827 - DNA, 741 bp, Helicobacter pylori
atgaaaaaagaaaagcatctcaagcaagaaaaaatcatcaacatgtttgatgatatagccagctcttacgatcaagccaaccgcttgatgagttttggcttagacgttaaatggcgagaaagggcttgcgagcatgcgtttttatttttagaaaacaagaaagcgttaaggcttgtggatgtggcatgcgggacgggggatatgcttgtggcttggcaaaaaagcgctctcaattgcggtatagagtttaaggaatgtttggggattgacccctctaataacatgcttgaattagccatcaaaaaatgtgaagagcttgaaaacaaagcttctttcatccaagctcaagccaaagatttaaaaggcgttgaaaataacagcgtggatatcctctctattgcgtatggcttgcgtaatgtcgtggaaagacaagaggccttaaaagagttttttagggtgttaaaacccaggggcgttttagtgattttagaatttttaaaaaaagacaaccccacatggctggataaaatctcagggttttacacgaataaggttttgcctttagtgggaggggctatcagtaagaattatggtgcttattcttatttaccgcaatccattgaggggtttttgagtttagagggtttgaagcatgaattaagaaacgcagggtttgagattttaaggactgaagattctatcgctcaaatttcaacgaccatgcttgttaaaaaaaactaa

SEQ ID NO: 22828 - DNA, 1350 bp, Helicobacter pylori
atggggaggaatcaaggagcttatttggatccgtctgaatcgattttgatgttgatggttgcttttttattggtgctgttgaacgctttttttgtgctttcagagtttgcccttgtgaaagtgcgtaaaacccgcttagaagagctggttaaaatcggtaattccaacgctaaactcgctttaaagatgagtcaaagactagacacttatttgagcgcgacgcagttaggcatcaccctttcttcattagctttaggctgggtgggtgagcccgctatcgcaaaattgttagccgcgctgtttgagtctatggatttgagagaaaatcctatttttatccattcaatgagcgtggtcatagcgtttttaagcatcacttttttgcatgtcgtgttgggcgagattgtgcctaaatctttagcgatcgctaaatctgaaaaagccaccctttttgccgcacgccctttgcatgtgttttgggtggtgttttatccggtggtgcgtttgtttgatgtgatcgctcatttttttttgaaaaagatgggcatcaatcctaaagagcatgacggcacgcattctgaagaagagttaaaaatcattgtgggcgagagtttgagagagggcattattgattcagtggagggcgaaatcattaaaaacgcagmggatttttctgacacgagcgctaaagaaatcatgaccccacgaaaagacatggtgtgtttggatgaagaaaacagctatgaagaaaatatagacattgttttaaaaggccatttcacgcgctacccttattgcaagggttctaaggataacattatcggcatggtgcatattagggatttgctttcgcgctctatttttacccccaaaatgcatgatttcaatcaaatcgttaggaaaatgatcatcgtccccgaaagcgcttccatttctcaaatccttattaaaatgaaaaaagagcaaatccataccgctttggtgattgatgaatacggcggcacagccgggttgctcactatggaagacatcattgaagagatcatgggcgagattagcgacgaatacgacttaaaacaagagggcataaacaagcttgaagagggcgtgtttgaattagagggcatgctggatttagagagcgtagaagaagcgcttcacattgaatttgataaagaatgcgagcaggtaacgcttgggggctatgtttttagcttgttagagcgcatgcctatggagggagatacaatcgtttcgcatgggtattcttttgaagtcttaagcgtggatggggctaggataaaacgcttaaaagcggttaaacaagatcagggagaaaatgaagcatga

SEQ ID NO: 22829 - DNA, 1602 bp, Helicobacter pylori
atggaaattaaaaacatcaaagagtttgaaaaagcttccaaaaaactccaaaaagacactttaaagatcgctctcgctcttttgtttctcatcggtgccgctttactcgctctcatttttgggcaggctaattctaagggattgttgcttatttttgcggccgtgattggggggtatatggcgatgaatattggcgcgaatgatgtgtctaataatgtcggccctgccgtaggctctaaagccattagcatgggcggggcgattttgatcgctgcgatttgcgaaatgcttggagcgatcattgctgggggggaagtggtttctacgattaagggccgtatcgtttcgcctgaatttattaatgatgcgcacattttcattaatgtcatgttggctagcttactcagtggggcgttgtggttgcatgtagcgactttaattggcgctcccgtttccacttcacactctgtggtgggggggattatgggggctggaatggcagcagctggaatggtagctgtcaattggcattttttatccggtattgtggccagttgggtaatttcgcctttaatgggggctttgatagccatgttttttttaatgctcattaaaaagactatcgcttataaagaagataaaaagagtgcggctttaaaggtcgtgccttatttggtagcgttgatgagcttaacattcagctggtatttgattgttaaggttttaaaacgcctctatgcattgaattttgaaatccagttggcttgtggctgtatccttgcgcttttaatctttatcctttttaaaagatttgtgttaaagaaagccccgcaattagaaaacagccatgaaagcattaatgagcttttcaatgtccctttgatttttgccgctgcacttttaagctttgcgcatggggctaatgatgtggctaacgctataggccccttagccgcaatcagtcaaactttagaagatgcaaatagccctatagggaatactttaagctctgtgccgttgtggattatggtagtaggggcggctgggattgctttaggcttgagtttgtatgggccaaagctcattaaaacggtggggtcagaaatcacagaattagacaagatgcaagctttttgcatcgcgctttcagcagtcatcaccgtgcttttagcctctcaattaggcttgcccgtaagctctacgcatattgtggtgggcgcggtgtttggggtgggctttttaagggagcgcttaagagagcaatcaagaaggcgttttgctagaatcagagacaacattgtagccgcgcactttggggaagatttagaagaaattgaaggctttttagagcgctttgataaagccaatttgaaagaaaaatcgctcatgctagagagcttaaaaaaaagcaagaacaccgccatcgctttggaattgaaaaagaaagaaaaaaagtcgcttaaaaaagtgtataaagaagaagtgatcaaacgctccattttaaaaaagattgttaccgcttggttggtaaccgtgccggtttctgcgcttttgggggcgcttctgtttgtggctcttggttttatagaaaagtatttctag

SEQ ID NO: 22830 - DNA, 1344 bp, Helicobacter pylori
atgaaacttaaaaaaaccctgacttatcaaaaccacacctattcttttttgagcgataacacgcatgaagttttagaaaaccctaaagaaatcctttttgtcaaaacgcctttaaatgaaaaatactctcacttaattgcagaaaaaaacctggctattttagatttcaacgagcttaaaaactactttgattttaagattaaaattgtagggattacaggcactaatggcaaaacgaccacagcgagcttgatgtattccttgctcttagatttgaataaaaagaccgctcttttaggcacaagagggttttttatcaacaatgaacgaatcaaagaaaagggcttgaccacgcccacccttttagagctttatagcgatttagaagaagcggtgcgtttaaaatgcgaatactttatcatggaagtgagctcccatgcgattgtccaaaagcgcattgccgggcttgattttgcccttaaaatcttaaccaatatcacaagcgatcatttagatttccatcaaagcatagaaaattacagagacgctaaaaacagcttttttaaagatgagggcttgaaagtcatcaacagagatgaaacaaacgccctttttaaccccgttaatgcgcacacttacgcgctggataaaaaagcgcatttaaacgttcaagccttttcactcaacccctccattagcgcgtctttatgctaccaacaagatttaagagatcccaatttcaaagaaatcgcccttatgcattccccccttttagggcgttacaacctttataatatcttagcgggcgttttaggggtcaaattactcactcaattaccgctagaaacgattgtgccgttattagaaaacttttatggggttaaggggcgtttggaaattgtgcattctaaacctttagtggttgtggattttgcccacaccatagacggcatgcaacaagtctttgaaagctttaaaaaccaaaaaatcaccgctctttttggagcagggggcgatagggataaaaccaagcgccctgaaatgggagcaatagcgagttattacgcgcataaaattatcttaacttcagacaaccccagaagcgaaaacgaagaagacattatcaaggatattttaaaaggcatcaatgattcttctaaagtcattgtagaaaaagaccgaaagaaagccattttaaacgctttagaaaatttaaaagacgatgaggtgttgttgattttaggcaagggcgatgaaaacattcaaatctttaaagacaaaacgattttttttagcgaccaagaggtcgttaaaagctattaccaacatttaaaacaaggataa

SEQ ID NO: 22831 - DNA, 951 bp, Helicobacter pylori
atgcaagaattcagtttgtggtgcgattttatagaaagggattttttagaaaacgactttttaaagctcattaataagggggctatttgcggggcaacgagtaaccctagtttgttttgcgaagcgatcacaaaaagcgcgttttataaagatgaaatcgctaaactcaaaggcaaaaaagctaaagaaatttatgaaactctggcgttaaaggatattttacaagcttctagcgcgttgatgcctttatatgaaaaagaccctaacaatggctacattagcctagaaattgacccttttttagaagatgatgccgctaaaagcattgatgaagccaagcggttgttcaaaacattaaaccgccctaatgtgatgattaaagtcccagcgagtgaaagcgggattgaagtggttagcgctttaactcaagcctctattcctgttaatgtaactttagtcttttcgcctaaaattgccggtgaaatcgctcaaatcttagccaaagaagcgcaaaaaagagcggtcattagcgtgtttgtctcacgatttgacaaagaaatagaccctttagtgccaaaaaatttgcaagctcaaagcgggattatcaacgctaccgagtgctattatcaaattaatcagcatgccaataagctaacaagcaccctttttgcatccacaggcgttaaatccaattctttagctaaagattactacattaaagcgctgtgttttaaaaactctatcaatacagcccctctagaggctttaaacgcttatttgcttgacccaaacaccgagtgtcaaacccctttaaagactacagaaattgaagcgtttaaaaaagaattaaaagtgcacaacattgatttagaaaacaccgctcaaaaactccttaaagaaggcttgatagcgttcaaacaatcctttgaaaagcttttaagcagtttttga

SEQ ID NO: 22832 - DNA, 537 bp, Helicobacter pylori
atgttagaaggcgttattagagagagtattactaaagctaacgctaaagctttaaaaaaagatggctatctaatcgcaaatgtttatggaaagggcattgaaaatgtgaatggcgcgttcaaattaaaccctttcattaaataccttaaggaaaaaaagcatttgatttttccggtgaaattaggggataagacttttgaagtcgtggttcaagaataccaaaaaaaccctgttactaacgagcttatccatgtggatttactcgctgttactaaaggcgtgaagtctaagtttaaagtccccattaaacaccaaggcactccagtgggcttgaaaaacaaagggattttaatgctctctaaaaagcgtatcagcgtggaatgcgctccagagcatttgcccgatcactatttagtggatgtagcccctttagatgtgaatgagtctattttggtgcgcgatttagaaaaacacgagaatgtgaagatcttagatcatgattctatcgctgtgatcggtgtgattaaagcgaagtga

SEQ ID NO: 22833 - DNA, 1035 bp, Helicobacter pylori
atgagactttatgagagtttattagaaatgtgcttgaataaggcatgggagcatcaaaccctagccttagaaaacccaagcgtagcttgcatggtgttggataaaaaccatgagatcttgagtttagaaacccacaaaaaagccaaaaccccgcatgcagaagtcttagccgcccaatcagcgctaaagattttacgccccagtttgaaaaacgatttagaaaagttagaagaccctaaaactttaagcgattttttaaaaacgcaccacgataacgcttttacagactgcgtttttttaatcaccttagagccatgcaattcttatggcaaaaccccggcttgtagcgaattgttagaaattttaaagcctaaaagagtggtcattgccacagaagaaaacgaagctaaaaaagggggtttagcaaggctacaaaaggctcgtattgaaacaataatttgccacaatttagaaaacaaagctaaagacttgctcttgccttttagggtaatggaacaaaaggggcgttttaatttgttcaaactcgctttaagaatgaatggggattaccatcatggcaagatcaccgggcaaaaaagcgttattttcacgcacaaccagcgagcaatatgcgacacgcttattgtttctgggaaaaccataagaacggacaaccccttattggacgctcgcttttgcgacagcttttatcaaaataaaaaccccaatatcgctattttatccaagcgctcaattgaccctaattcaaaagttttttctgcgcctaatcgtttagttaacactttccatgaccccaaagatttacccctagagaaggggtttaatttcattgaaggggggtgggaattgtttgagagcttgagggataaaatagacgcgttgcttttgcattcgcatgcgtctatgattggcgaagcgtttaaggcactcgctctaaaaaccccttttaaaggacggttgttgcatgcgcaaatcttagaaaatgaagcccttttatggatagaaaactcttaa

SEQ ID NO: 22834 - DNA, 789 bp, Helicobacter pylori
atggctagaagtttcaagcattctcaatatcctaaaatttttaagccactataccctaacaacttaacgctttcacttaaaaagcaacatgttataatgatcgctattttatttgaaagggtatttatggaaagcgttttaaatttcctaaccaatatcaatgtgattttcacccttttgggctatttgattggggggattccttttggctatgcgttaatgaaaatcttttacggcatggatattactaaaatcggatcggggggcattggcgcaacgaatgtcttgcgtgctttacaaagtaagggcgtgagtaacgctaaacaaatggccctattagttttaatcttggatctcttcaaaggcatgtttgcagtatttttgagcaaattgtttgggttggattatagtttgcaatggatggtcgctatcgctagcattttagggcattgctattcgccttttttgaatttcaatggaggtaagggcgtttctacgatcatgggctctgtggtgttgctcatccctattgaaagtctcatcggcttaacggtgtggttttttgtgggtaaggtgcttaaaatctcttcactcgctagcattctaggggtaggcacagcgactgttcttatcttttttgtgccttatatgcatatcccagacagcgtcaatatccttaaagaagtcggcacgcaaacgccgatggtgcttatttttattttcacccttatcaagcatgcgggtaatatttttaatttattggccggcaaggaaaagaaagtcttatga

SEQ ID NO: 22835 - DNA, 1188 bp, Helicobacter pylori
atggaaaaaatcagcgatcttatagaatgcattgcgtatgaaaaaaatttgcctaaagagatgatttcaaaagtgattcaaggctgtttgttaaaaatggcgcaaaatgagttagaccccctagcacgctacttggtggttgaagaaaacaagcagctccagcttatccagttggtagaagttttagaagatggtgatgaaagattggttaacgacccttctaaatacatcagcctgtctaaagccaaagaaatggatccaagcgttaagattaaagacgaattgtcctatagcttgagtttggagagcatgaaacaaggagcgatcaaccgcctttttaaagatttgcaataccagttagaaaaagcgttagaagacagccactttgaagcgtttcaaaagcgtcttaacagcgttttaatggggcaagtgattttagtggatcacaaccaaaacacctttattgagattgagcagcaatttcagggcgttctttccatgcgccatcgcatcaagggcgagagttttaaagtgggcgatagcattaaagcggttttaacgcaagtcaaacgcacgaaaaaaggcttattattagagctgagccgcaccacccctaaaatgcttgaagctttgttggaattggaagtccctgaaattaaagacaaagaaattgaaatcatccattgtgcgcgaatcccaggcaacagagcgaaagtgagctttttttcccataacgctaggattgaccccataggcgcggctgtgggggttaagggcgtgcgcattaatgcgatcagtaacgaattgaataaagaaaacattgattgcatagaatattctaatgtgcctgaaatttacatcactctcgcactcgctccagccaaaattttaagcgttgaaatcaaaaaaatccctatagaagaattgaatgctgaagaaaaagaatccattcaagagcgttttatcgtcaataaccatttgcaaaaggctaaagtgcgtttattggacattgaaaaatctaaggctatcggtaagggcggggtgaatgtgtgcttagcgtccatgcttacaggctatcacatagagtttgaaaccattcctagcgtgaaagaaaacgcagaaaatgaaagcgaaaaagaaacgccaaaagtgggggtagaagctttagagtctttgtttaagaattaa

SEQ ID NO: 22836 - DNA, 2904 bp, Helicobacter pylori
gtgaaaatcaaattcaaacgattggactatcaggagcaatgccgggaccaaattttaggggtgtttaaggggattgatttgaaagagccagaaaatgacgctcaaaggatttctaaccctgtttttgaaataggagcgatcaaagatcttttattagaaaatattgagaatttgcgatcgaaacaaaaaataacccaggggagcgtggggattgacaagtcgttaaactgcgatattttaatggaaacaggcaccgggaagaccttttgctttttggaatgtgtttatgccttgcacaaaaaccaccatttgtcaaaattcatcgttttaacgccaagcaacgccattaaattaggggttttaaagagcgttgaaatcaccagagaattttttaaaagcgagtattctaacacgcatttagaaagctatgaagatatagaaagatttattctagcgagcaaccataaatgttgtgtgttggtgatgactttttctgccttcaataaagagaaaaacactattaataaatcatgcctagaaaacacgaatctattcaatggtgcaacaagttacatgcaagctttagtgagtatgcgccccatcgtcatcatggacgaaccgcaccgatttttaggcgataaaacaaaaaaatatttggaacaattaaacgctttactcacgctcaggtttggggcgacttttaaagatgattataataatctgatttatacgctagatagcaaaaaagcgtttgattgtgccctagtgaaaagcattagcgtggcgtctgtgggggagagtaacgagtgttttttagagcttaaagggattgaaaaaaaagaagctgcaattaactacacggatttagaaaataaaactcaaagcgtcaaagtcaaagagcatgataatttaggggtggtaactcaaatcagcgctttagaagattacattgtagaaaaaatcactaaaactgagattcgttttctcaatggctttaatttgttactggatcaaaaagagcctttttctcatcttttagagggcgagcaagaagtgatgctgaaagaagcgataaaaagccattttgaaagagaagaagggctttttaaaaaggggattaaagccttgtgcatggtgtttattagcggggtgaatagctatttaagcgagaatgaaaagccggctaaattggcccttttatttgaaaaactctaccagcaaaagcttgaagaagtcttaaaaaagcctttagatgaaaattatagagcgtatttagagtgcactagagaagatattaaaaaagtgcatggagggtatttcgctaaaagcaaaaaagagggcgatgaaactaaaacgatcgaactcattttaaaagaaaaggaaaaattgctgagttttgattccgatctcaggtttattttttcgcaatgggcgttgcaagaggggtgggataaccctaacgtgatgacgatttgcaaattagcccccagccattccaatatcactaaattgcaacaaatcggtagggggttaaggctcgctgtgaatgataagggcgaacgcatcactaaagagcatgctgattttgattttgtcaatgaattggtggtgatcgtgccgcaagtggagggggattttgtgggagcgatccagcaagagataagcgaacacagcttgattaaacaagaatttagcgcagaagagttagaaaaaagcggcgttgttaaaaaagggcgttacgggtttttattggaaacattagagggtttgggttttggagaaaaaacaggtgatgaaaactttaaactcactctcaatcaaaacgaatttttagaaaaagagccagaacttgaaaaattaaaagatgaaaaatacctggattttgaaaaattaaaagattttttaaaagatcgcttgattggtaattccagagtgagggacaaaaacgagcgaaagagtgaaaaaatcaaaatcaataaagaaaattttaaaaaatttgaaaccttatgggaaagtttgaatcatcaagcccggatcgcttatgccattgatagcgagagcttgattgatgagattgtcaaaaatattaattcttcttttaatgtcagttcaaaaatcgtttcggttacgacgcataaaaaagtagaaactatgggaaataacgccaaaacagagatttttgagcgagaaaacgcatgcgtgtggagtttgcatgaatttatcagcgccttgtccaataaggtgaaattgagttttaaaagcgtggctaaagtgttggaaaacattgatgaaaacaagtttaatgaaattaaaaaaaacgaacaagagggattaaggcgcttagaagagctgtttttggaaatcatttatcaaaatattaaagataaaatttcctatcaaatgcgcgaaacgaccattaaaaacagaaaaaacgatgcgttttatgatgaaaagggagagattagagagtttttagacgggagtttgggggcggataaatatgagattaaaaattcaagcgtgcgagaaaaatgcctgtatgaaaatttcatgcaagtggatagcgagattgaaaaagacacgattgaagaatctaacgacactaaaatcattgtttttggtaagctccctagggttaaaatcccgatagggttaaatcaaacttatagccctgattttgggtatgtggttgaaaacaacgataaaaaagtgttattagtggtagaaactaagggggttgataaaaaaagcgaattacgccctgaagaagagcggaaaatttcaaccgctaagaaattttttgaagctttaaaaaagcaaggcgtgaatattgaatacaaaaccaaaatggaaaaagatcaattaagcgcgttgattaatgaagttttaaatcgtaaagattag

SEQ ID NO: 22837 - DNA, 1374 bp, Helicobacter pylori
atggataccaacaacaatattgaaaaagaaatcttggcgctagtcaaacaaaatcctaaagttagtctcatagagtatgaaaattactttagccaactcaaatacaaccctaacgcaagcaagagcgatattgcctttttttatgcccccaaccaagtcttatgcaccacgattacagctaaatacggcgcgttgcttaaagaaattttaagccagaataaagtcggcatgcatttagcccacagcgtggatgtgcgtattgaagtagcgcctaaaatccaaattaacgcccaatctaatatcaattacaaagccataaaaacgagcgtcaaagactcttacacttttgaaaattttgtcgtaggctcatgcaataacaccgtttatgaaatcgctaaaaaagtcgcccaaagcgatacccccccttataacccggtgcttttttatggcggcacagggttaggcaaaacgcacattttaaacgctatcggcaaccatgccctagaaaagcataaaaaagtcgtgttagtcacttcagaagactttttgacagactttttaaagcatttagacaacaaaaccatggattcttttaaagcaaaataccgccattgcgactttttcttgttagatgacgctcaatttttgcaaggaaaacccaagctagaagaagaatttttccacacctttaacgaattgcacgccaacagcaaacaaatcgtattgatttcagaccgatcgcctaaaaacatcgccggcttagaagatcgcttaaaatcgcgctttgaatgggggataaccgctaaagtcatgccccctgatttagaaaccaaactttccattgtcaaacaaaaatgccagctcaatcaaatcactttgcctgaagaggtgatggaatacatcgcccaacacatcagcgacaatatccgccaaatggaaggcgcgatcattaaaatcagcgtgaacgcgaacttgatgaacgcttccattgatttgaacctcgctaaaaccgttttagaagatttgcaaaaagatcatgctgaaggttcaagcttggaaaatatcctactcgctgtcgcgcaaagcctgaatctcaaatccagcgaaatcaaagtctcttcgcgccaaaaaaatgtcgctttggcgaggaaattagtcgtgtatttcgccaggctttatacccctaaccccacgctctcgctcgctcaatttttggatttaaaggatcattcaagcatttctaaaatgtattctggcgttaaaaaaatgcttgaagaagaaaaaagcccttttgtcttaagccttagagaagaaatcaaaaaccgcttgaacgaattgaacgacaaaaaaaccgctttcaattcaagtgaatga

SEQ ID NO: 22838 - DNA, 1794 bp, Helicobacter pylori
atgtgtgggattgtaggttatataggggatagcgagaaaaaatccgttcttttagagggattaaaggaattggaatacagaggttatgacagcgcgggtttagccgtattgagtaatgatcgtttggaagtgtttaaaactcaagggaaattagaaaaccttaaactagagcttaaaaataaagagtttttggattttggcgtgagtatcgctcacaccagatgggccacgcacggcaagccaagcagcgcgaacgcccacccgcattttacagaaaatttagccttagtgcataatggtatcattgaaaattacgcgagtttgaaaaaagaattggaaaacaaagggcatgcatttttgagccaaacggacacggaagtcattgcacatttattagaagaaacgcttaaaagcgagagcgatttattgaaagcttttgaaaaaagcatcagccttttaaaagggagttatgcgattttaatgctccataaaagggctaaagagagcctcttttacgctaaatcttcttcgcctttagttgtgggtaagggcaaagaaggggtgttttttgcgtccagtttgagcgtgctagcccctaaagtggatcaatttgtcattttagaagaaaacagcgtggggcggatttctttagaaaattttaaagatttaaacaatattgaaaacatgaaagattacgcttttgaggataaggattattctaaaggcaattttaggaattatttagaaaaagagatttatgagcagcacagcagtttgttggagtgtttagaggggcgcttggaagccttgagtgtgtattgcgagatcgatcctgagtttttgaaaaatgtgagcgaaatcacgctgtgttcttgcgggagcagttaccatgcgagtttagcgagcgtgtatttgtttgaaagattagccaaaataagagcgagagccattttagcgagtgaataccgctacgcccattttaaaagcaaccctaacgagctttttatagcgatttctcaaagcggcgaaaccgctgacactttagaggcgttaaaattagccaaagcccaagggcttaaaaccattagcttatgtaacgctccctttagcatgatgagccgcattagcgatcacacgcttttgattagagcgggggtggaaaggagcgtggcatccactaaggcgttttcttcgcaagtgatgcttttatggcttttgagcgtgtatctaggcaaacagctagggactatctctaaagaagaagaaagaatccaggctaaaaacatgctcaatagcgtgaatgcgatgaaagtagagcctaaattgcatgaaaaaatcaagcgcttatccaaacgctacttgcatgggcatggctttttttatatcgggcgcgatgtgttttacccgctcgctttagaaggggcgttaaagcttaaagaaatcagctacttgcacgctgaggggtatgcgagcgcagagatgaagcatgggcctattgcgttagtggattctaatctttttaccattgctttattgtctaagcacttgttatttgataaaaccaaaagcaatattgaagaattgagcgctagggattctacgatttgcgtgttaagctctgaaattttagagatcgctgatgattttatccaattagaagagagcgaaagctacatggaagaatttttccgcatgaatttagcggtgcagcttttagccttagaaatcgctatgcgtttgaatcacgatgtggatcacccaagaaacttggctaaaagcgttaccgtggaataa

SEQ ID NO: 22839 - DNA, 1284 bp, Helicobacter pylori; identical to SEQ ID NO: 22665

SEQ ID NO: 22840 - DNA, 3000 bp, Helicobacter pylori
atgatccaatccagcctttatagagccttaaacaaaggctttgattaccaaatactcgcttgtaaggattttaaagaatccgagctcgctaaagaagtcataagctattttaagccaaataccaaagccattcttttcccggagtttagggctaaaaaaaacgacgatttgcgttcgttttttgaagaatttttacagcttttagggggtttaagggagttttatcaagccttagaaaacaagcaagaaactatcatcattgccccgattagcgcgttattgcaccctttacctaaaaaagaacttttagaaagctttaaaatcactcttttagaaaaatataaccttaaggatttgaaagacaagctcttttattatggctatgaaattttagacttagtggaagtggaaggcgaagcgagctttaggggggatattgtggatatttatgcgccaaattctaaagcgtatcgcttgagtttttttgacaccgagtgtgagagcattaaggaatttgatcccattactcaaatgagccttaaagaagatttgttagaaattgaaatcccccccacgctttttagtttggacgaatcatcttataaggatctaaaaacaaaagtggaacaaagccccttaaatagcttttctaaagatttaaccagttttggtttgtggtttttaggagaaaaagcacaagacttactaatcgtttataaaagcattataagtcctagagctttagaagaaattcaagaattagcgagcttaaacgaattggattgtgagcgtttcaaatttttaaaggttttagaaaacgcgcaaggctatgaagatttagaaatccatgcgcatgccctagaaggctttatcgctttgcattcaaatcataaaatcacgctcctagcccccaataaaacgattttagacaacgcgataagcgcgcttgatgcaggcaacatggaatgcgtcatcgccccctttgtgttaaactttaaaacccctgatgggatttttatttcgctcaattcttttgaaaggaagaaaaaacgccaaaaatccaagctcgctttgaatgagttgaatccgggcgaatgggtggtgcatgatgattatggggtgggcgtgttttctcaattagtccagcacagcgttttagggagcaagagggattttttagaaatcgcttatttgggcgaagacaaactgctgttaccggtagaaaacttgcatctcatcgctcgctatgtggcgcaaagcgatagcgtgccagctaaagaccggctagggaaagggagctttcttaaattaaaagctaaagtcaggactaagcttttagagattgctagcaagatcattgaattagcggctgaacgcaatttgatcttgggtaaaaagatggatgtgcatttagcggagttggaagtctttaaatcgcatgcggggtttgaatacaccagcgatcaagaaaaggctatcgctgaaatttcaaaggatttaagctctcacagggtgatggatagattattgagtggggatgtgggttttgggaaaacagaagtggcgatgcatgcgattttttgcgcgtttttgaacggctttcaaagcgctttagttgtgcctaccactttattagcgcaccagcattttgagactttaagggcgcgttttgaaaattttggcgttaaagtggctcgtttggacaggtatgcgagcgaaaaaaacaagcttttaaaggcggtggaattagggcaagttgatgcgctaataggcacgcatgcgattttaggcgcgaaattcaaaaacctgggcttggtggtggtggatgaagagcataaatttggcgtgaaacaaaaagaagctttaaaagaattgagtaagagcgtgcattttttaagcatgtccgctacgcctatcccgcgcactctaaacatggcgctctctcaaattaagggcattagttctttaaaaaccccgcccacagacagaaagcccagccgcacttttttgaaagaaaagaatgacgaactcttaaaagagattatttacagagaattacgccgtaacgggcaaattttttacatccataaccacatcgctagcattttaaaagtcaaaaccaagctagaagatttaatccctaaactcaaaatcgctattttgcattcccagattaacgctaatgagagcgaagaaatcatgctagagtttgccaagggaaattatcaggttttattatgcacttctattgtggaatcagggattcatttgcctaacgctaacacgatcattatagataatgcgcaaaatttcgggctggctgatttgcaccaattgagagggcgtgtggggagaggtaaaaaagaaggcttttgttatttcctcatagaagatcaaaaaagtttgaatgaacaggctttaaaacgcttgctcgctttggaaaaaaattcatatttaggcagcggggagagtgtcgcttatcatgatttagaaatcagggggggcgggaatttgctcgggcaagatcagagcgggcatattaaaaacattggttatgcactctatacgcgcatgcttgaagacgcgatttatgaattgagtggggggaagaaaaggcttgaaaagagcgtagaaatccaacttggcgtgagcgcttttttaaaccctgaactcattgcaagcgatagtttgagattggatttataccgccgtttgagtttgtgtgaaaatacagatgaggtggggcaaatccatgaagaaatagaagacaggtttggcaaaatagacgatttgagcgctcaatttttgcaaatcattacgcttaaaattctagccaaccagcttggcatcatcaaactttctaatttcaatcaaaacatcaccatcacttatagcgatgaaaagaaagaaagcctgaaagccccaagcaaagacgataacgatattttagaaacccttttgaaacatttgcgcgctcaaatttctttaaagcggcgttaa

SEQ ID NO: 22841 - DNA, 939 bp, Helicobacter pylori
gtgtttttagacaggcgtttgattgtgatggttacggactctaaagggagtcgttatattaatgttcatatcttattccgtcaaattggcctgtatgcgcttttgagcgttgtgggatctttattgtttttaggcatttcactattggttttaaatcaagagattaaaaacattgacaagcagcatgctctaatcactaaagaatttgagaaaaaaaaagagacgaatgaaaagctttccttgcaaatggatgaatttttagacgatttgcagctttcaggggaacgcatcaacgatttagaagaagtggtgggagtgaataggcctgaagaagaaaaagaagagggcaatttttccagtcgtttggatgtcgctgggattaccgggcttcaaaaaagctttatcatgcgccttatccctaatgactacccgctagaatcctatcggcgcgtttcagccgcctttaataaaagaatccaccctattttgcatgtgctgcacaaccataccgggcttgatttaagcaccgctattaacacccctgtgtatgcgagcgcgagcggggtagtagggttagcgagcaaggggtggaatggggggtatgggaatttgattaaagttttccacccttttggttttaaaacctactacgcccatttgaataaaatcgtcgtaaaaacgggcgaatttgtcaaaaaagggcagttgattgggtatagtggtaatacagggatgagcacagggccgcatttgcattatgaagtgcgttttttagatcaacccataaaccccatgagtttcaccaaatggaacatgaaagattttgaagaagttttcaataaagaaaggagcatcagatggcaatctttgataacaataataaatcggctaatgcaaaaacaggaccagcgactatcatcgctcaaggcacaaaaataa

SEQ ID NO: 22842 - DNA, 927 bp, Helicobacter pylori
atgccgcaaaaccagcttgtgatcaccatcattgatgaatcaggctctaaacagctcaaattttctaaaaatttaaaacgcaacctcatcatttctgttgtcatttttttgttgatcgtggggcttggcgtgggttttttaaagtttttaatcgctaaaatggatacgatgacagcagaaaggaatgcggttttaagggattttagggatttgtatcaaaaaaattacactttaacaaaagagatcaaaaacaagcgagaagagctctttattgtggggcaaaagattcgcacgatagaatccttgattgaagtcaaaagaggggctaatgggggcgtgcatctttatgatgaagtggatttagacaatttgaatctggctcaaaaacatttagcgctcatgctcattcctaacggcatgcccataaaaacttatagcgctatcaaacccaccaaagaaaggaaccaccccattaaaaaaattaagggcgttgaatccgggattgattttatcgcgccattaaacacgcctgtttatgcgagcgctgatgggattgtggattttgtgaagaccaattctaatgtggggtatgggaacttggtgcgcattgaacatgcgtttggttttagctccatttacacgcacttagatcatgtcaatgtgcagcccaaaagcttcatccaaaaagggcagttgattggctatagcgggaagagcggtaatagcggcggcgaaaaattgcattatgaagtgcgctttttgggtaaaattttagacgcgcaaaaatttctggcatgggatttggatcattttcaaagcgctttagaagaaaataaatttattgaatggaagaatttgttttgggttttagaagacattgtccagctccaagagcatgtggataaagacgcactcataagccagtaa

SEQ ID NO: 22843 - DNA, 2421 bp, Helicobacter pylori
atggattttatcaatatagaaaaaaaatggcaagaattttggtggaaaaataagagttttgagcctaaagacgattttaacctccctaaaaaatacattctaagcatgctgccttatcctagtggggaaatccacatggggcatgtgcgcaactacaccattggcgatgctttagcgcgttattatcgtttgcaccattataatgtgttacaccctatggggtttgattcttttgggatgcctgcagaaaatgcagccattaagcatggtatccaccctaaaacctggacttatgaaaacattgaaaacatgcaaaaagagtttgaagctttagggttttctttttctaaaaacagggaatttgccacttcagatccggattacacgaaatttgaacagcgatttttcattgatttgtgggaaaaggggttaatttatcgcaagaaagccatgctcaattggtgccctaacgacaagaccgttttagctaatgagcaagtcattgatgggaggtgttggcgttgcgatacggaagttattcaaaaagaactctatcaatattatttgaagatcacaaattacgctgaagaattgctaaaagacttagaggctttagaagatcattggccttctcaagtcctaatcatgcaaaaaaactggataggaaaatctagcgggttgcaatttggttttaaaatcgctgatgagtgcttgaaagcttgcaatggcattcaagaaattgaagtttttaccacaagagcggacaccatttatggcgtaacttacatcgctatcgccccagaacaccctttagtagagcatgccattaagcaagtgagtcaagaagtttcaaagatgattaaagcgattttaaacacgactcaaagagaaagagctttagagaaaaaaggggcgtttttaggcatttacgctatccaccctttaacgaagcaaaaaatccctgtttgggtggctaatttcgccctagctaattatggttctggggcgttaatgggcgtgccagcctgcgatgaaagggactttgaatttgctaatctgtatcatatccctattaaagtgatcactcaaagccctcaaaatttgccccacactaaagaagaggttttaaaaaatagcggggagtggagcgatctttctagctcagtggccagagaacaaatcatcgcttattttgaaaaagaaaacctcggtaaaagggtgatcaactaccgcttgcaagattggggagtgagccgtcaaaggtattggggagcgcccattcctatgattcattgcaaccattgcgggattgtgcctgaaacccaactaccagtaactttacctgaagacattgtgattgatggggagggcaatccgttagaaaagcatgcgagttggaaattcactcaatgccctaaatgccacaaaaacgctttaagagaaacagacaccatggacactttcatccaatctagttggtatttcttgcgctacaccacgcccaaaaatcagcgtgaaaatcaagcgtttgatcaaaattacttgaagtatttcatgccagtggatacttatattggcggcattgaacatgcgattttgcacttgttatacgcgcgctttttcactaaggctttaagggatttgggctatcttcatttagatgagccttttaaacagcttatcactcaaggcatggttttaaaaaatggcgctaagatgagcaagtctaaaggcaatgtcgttagccctaaagagatacttaaaaaatacggggccgatgcggcgaggctttttatcctttttgctgccccaccggctaaagagttagaatggaatgacagcgctttagaaggtgcgcaccggtttatcaagcgcttatacgacaaagcgaatgccattaaccctaccacttctaagcctgaatttaaagaagtcagcctgaatgaagcgcaaaaactagggcgtaaaaaagtctatgaagcgttaaaaaaatcgcatgaaattttcaataaggctgaaagcgcttactcgtttaacactttgatcgcaagttgcatggaggctttaaacgctttgagtgcgcaaaataatgagcggattttatgcgagggttattttgtgttgttgcaaattttagagcctattatcccacacaccgcatgggagttgagcgagaggctttttaaaagagagaatttcaagcctatagcgatcgatgaagacgctttgatggaagactttatgactttagggcttaccattaatggcaaaaggcgtgcagaattgaaagtcaatattaacgccagtaaagaagaaattattgttttggctaaaaaagaattagagaaatatttagagaatgcgagcgttaaaaaagaaatttatgtgcctaataagcttgttaattttgttatcgcatga

SEQ ID NO: 22844 - DNA, 795 bp, Helicobacter pylori
atggtaaccatgaaagatttattagaatgcggtgtgcattttggacaccaaacaaggcgttggaaccctaaaaccaaaaaattcatttttggcgttaggaaaaatatccatattattgatttgcaaaaaaccttgcgctattttagatacacctataatatcgtgcgcgatgcgagcgctcaaggcaagagcatcatgtttgtaggcactaaaaaacaagccaatgagactttgaaagaatttgctgaaagcattcaagtcccttatgtcaattaccgctggcttggcggcatgctgactaattttagcaccattagaaaatcggttaggaaattagaaatcattgaagaaatggaaaatagcggtcaaattgatttattgactaaaaaagaaaagctcatgattttgaggaaaaaagaaaagctggataaatatcttggtggggtgcgccacatgaaaaaaatccctgatatgatttttgtgattgatgtggctaaagaaaaaatcgctgtcgctgaagcaagaaaactccatatccctatcgtggctcccttagacactaactgcgatcctgatttagtggattaccccattcctggaaatgacgatgcgatccgctctattaggctattttgtaaagaaatgagcgaagcgattttagaggggcgagaactcatgcaagaagaaatcgtccatgcgaatgaaaatagcgaagagatagaatatgtgagccatgaagaaaaagaagaaatgctcgctgaaatccaaaaagaaatcactcaaggagccgaataa

SEQ ID NO: 22845 - DNA, 1068 bp, Helicobacter pylori
atgtcaggaattagcgctcaattagtcaaaaaattaagggacttaaccgatgcgggcatgatggattgcaaaaaagcccttgtagaagtggctggggatttgcaaaaggctattgatttcttgcgcgaaaaaggcttgagtaaagccgctaaaaaagccgataggatcgctgctgagggcgttgtcgctttagaagtagcgcctgattttaaaagcgcaatgatagtagaaatcaatagcgaaacggattttgtggctaaaaatgagggctttaaggaattggtgaaaaaaactttagaaacgatcaaagcccacaatatccataccacagaagaactgcttaaaagcccgttagacaacaagccttttgaagaatatttgcactctcaaatcgctgtgattggtgaaaacattttagtgagaaaaatcgctcatttaaaagcccccagctctcatatcatcaatggttatgcgcattctaacgctagagtgggcgtgttaatcggtataaaatacgataatgaaaaaaacgctccaaaagtggtggaactggcccgaaacatcgctatgcatgccgcagcgatgaaacctcaagtgctagattgcaaagactttagccttgattttgtcaaaaaagaaactttagccttgatcgctgaaattgaaaaagacaatgaggaagctaaacgcttgggcaaacctttaaaaaacatccccacttttgggagccgcattgaattgagcgatgaagttttagcccatcaaaagaaagcctttgaagacgaattaaaagcacaaggcaagcctgaaaaaatctgggataaaatcgttcctggaaaaatggaaagatttatcgctgataacacccttattgatcaacgcctgactcttttagggcaattctatgtcatggacgataaaaaaactatcgctcaagtggttgctgattgttccaaagaatggaatgatgatttaaaaatcactgagtatgtgcgttttgaattgggcgaaggcattgagaaaaaggcagagaatttcgctgaagaagtggctttgcaaatgaagtga

SEQ ID NO: 22846 - DNA, 1848 bp, Helicobacter pylori
atggataataggaatattgatccttacttcaacccagagcaatttttagaaacccaaaaatacaaaggcacggttacagcattaatctttttattgcttttttttatttttttaatggtggcttttaaaaaagctttttttgcccaagccaacatgcctaatctagtgatgagcaaacaagacactgcggctagggggactatctatagtcaagacaactacagcctagccacttcacaaacccttttcaaactgggctttgatacaaggtttttaaacccggataaagaagattttttcattgatttcctttctatttatagcaatatccctaaaaagtccttaaaagacgccatcaatacaaaaggctatatcattctagcctatgatctcacgcccaatatggctgctaatattagagacttaaataagaaatttttagcctttggggtttttcaaaatttcaaagacgcgcacgataaggtgtggcaaaagcaagggctaaacattgaagtgagcggcgtttctaggcattacccttatcaaaatagcctagagccaatcattggctatgtgcaaaaacaagaagaagacaagctcactttaactaccggtaaaaaaggcgttgaaaaatctcaagatcacttgcttaaagcccaacaaaatggcataagaacaggcaaaagagacgtgagttttaactttatccaaaaccactcttatacagaggttgaacgccttgatggctatgaggtgtatttgagcgttcctttaaaactccaaagagaaattgaaaccctattggataaaactaaagacaaactcaaggctaaagaaatcctagtgggtatcattaaccctaaaagcggggaaattttatcgctagcttcaagcaagcgcttcaatcctaatgcgattaaaaccagcgattatgaaagcttgaatttgagcgttgctgaaaaggtttttgagccaggcagcacgatcaaacccattgtttattccttgctgttagacaagaatttgatcaaccccaaagaacgcattgatttaaaccatggctattaccaattaggaaaatacaccattaaagacgactttatccccagtaaaaaagccgttgtggaagacattttgatccaatctagcaatgtgggcatgataaaaatcagtaaaaacttaaacccaaaggatttctataatgggcttttaggctatggattttctcaaaaaaccggcattgatttatctctagaagccacaggaaagatccctcctttgtccgctttcaagcgtgaagtgttaaaggggagcgtttcttatggctatgggctgaacgcgacttttttgcagcttttaagggcttatgcggtgttttctaatgaaggcaaattgactaccccctatttagtgcaacgagaaaccgcccctaatggcgatatttacatccctagccccaaacccacctttcaagtcattagcccaaaaagcgctaggaaaatgaaagaaaccttaatcaaagtagtgcgttatggcacaggcaaaaacgctcaatttgaagggctatacatagggggcaaaaccggcacggctagggtcgctaaaaacgggagttatagcgcgcagtcctacaacagctctttttttgggtttgctgaagatgaaaggcaggtttttactatcggcgtggttatcttaggttcgcatggcaaggaagaatattacgccagcaagattgcagcccccatttttaaagaaatcaccgaaattttagtgcgttacaattatctatcgccctctattgcgattcaaaacgcgctcgagaaaaaccgctttaagataaaataa

SEQ ID NO: 22847 - DNA, 1167 bp, Helicobacter pylori
atgactacagacagaaatttgtttttttgcgcttcgctattgatttttttgggggtattgatgagctattcgctctcaacttacaccacagtggtgctgtatcattatggggagttccattttttcatacgccagcttgtgagcgcgatcatagggattgttatcatgtgggggttgtctagggttgatcctagcaagtggtttagccgtttggggttttttcttctttttgtcccaccattactcattattggcatgttttttttgccagaaagcctttctagcagtgctgggggggcgaagcgatggattcgtttggggtttttttctctagcgcctttggagtttttgaagattggtttcaccttttttcttgcgtggagtttgtctcgcacttttgtggcaaaagaaaaggctaatgttaaagaagaactcatcacttttgtgccttattcagtggtgtttgtagccttagcgattggggtgggggttttgcaaaacgatttggggcagattgttcttttgggggcggttttagcggtgttgttggttttttctggggggagcgtgcatttgtttggcttgattatttcaggggcgtttgcgatcagcgttttagcgattgttacaagcgagcataggattttgcgcctgaaattgtggtggtctaatttgcaaaattcgcttttcacgctcttgccggatagattagcgaacgctcttagaataagcgacttgcccgaatcctatcaggtctttcatgcaggcaatgccatgcataatggggggttgtttgggcaagggcttgggcttgggcaaatcaagcttgggtttttgagcgaagtgcatacggacatggtcttagctgggatcgccgaagaatgggggtttttggggctatgcgtttgttttattttgttttctgttttgattgttttgatttttaggatcgctaaccgcttgaaagagccaaaatattcgctattttgcgtgggcgtggtgctgcttattagtttttctttggtgatcaacgcctttggggtgggcgggattcttccggttaaaggtctagcggtgccgtttttgagctatggagggagttcgcttctagcgaattgtatcgctatagggcttgttctaakcctagcgcgatacacgaaaggctaa

SEQ ID NO: 22848 - DNA, 1008 bp, Helicobacter pylori
atgttagttactcgctttaaaaaagctttcatttcttattctttaggcgtgcttgtcgcttcattatggttgaacgtgtgcaacgcttcagcgcaagaagtcaaagtcaaggattatttcggggagcaaaccatcaagcttcctgtttctaaaatagcctatatagggagctatgtagaagtgcctgccatgcttaatgtttggaatagggttgtaggcgtttcggattacgcttttaaagacgatattgtcaaagccactctcaaaggcgaagatcttaaacgcgtcaaacacatgagcactgatcatacagccgcgctaaatgtagagcttttaaaaaagcttagccctgatcttgtggtaacctttgtgggcaaccctaaagcggtagagcatgcgaaaaaatttggtatatcatttctttcttttcaagagacaacgattgcagaggccatgcaggccatgcaagctcaagccacggttttagagattgacgcttccaaaaaattcgccaaaatgcaagaaactttggattttattgctgagcgtttgaaaaatgtcaaaaagaaaaagggggtggagcttttccataaagccaataaaatcagcggccatcaagccattagctcagacattttagaaaaagggggcatagacaattttggcttgaaatatgtcaaatttgggcgtgctgacattagcgtggaaaaaatcgttaaagaaaaccctgagattatctttatttggtggataagcccactcacgcctgaagatgtgttaaacaaccccaaatttgctaccatcaaagccattaaaaacaagcaggtttataaactccccacaatggatattggcgggcctagagccccactcataagtctttttatcgctctaaaagcccaccctgaagcctttaagggcgtggatattaatgcgatggttaaagactactataaagtggtttttgatttgaatgatgcagaggttgagccctttttatggcattaa

SEQ ID NO: 22849 - DNA, 597 bp, Helicobacter pylori
atgttagttacaaaacttgccccagactttaaagcacctgccgttttaggaaacaatgaggttgatgaacactttgagctttctaaaaatttgggtaagaacggtgcgattcttttcttctggccaaaagattttacttttgtatgccctacagaaatcattgcgtttgacaaaagagtgaaagacttccaagaaaaaggctttaatgtgattggcgtgtctattgacagcgaacaagtgcattttgcatggaaaaacacccctgtagaaaaaggcggtattggtcaagtaactttccctatggtggctgatattaccaaaagcatttctagagactatgatgtgttgtttgaagaagcgatcgctttgagaggagcttttttgattgacaaaaacatgaaagtaaggcatgcggtgatcaatgacttaccattaggcagaaatgcagatgaaatgcttcgcatggtggacgctctcttacactttgaagaacatggtgaagtttgcccagcaggttggagaaaaggcgataaaggcatgaaagcaactcaccaaggcgttgcagagtatctcaaagaaaattccattaagctttaa

SEQ ID NO: 22850 - DNA, 816 bp, Helicobacter pylori
atgaatgcattcaagcgtattattagtgtgggggtaattgctttaggtttgtttaaccttttagacgccaaacaccacaaagagaaaaaagaaaaccacaaaatcactcgtgagcttaaagtgggcgctaaccccgttccgcatgcgcaaatcttgcaatcagtcgtggacgatttgaaagagaaagggatcaaattagtgatcgtatcttttacggattatgtgttgcctaatttagcgctcaatgacggctctttggatgcgaattacttccagcaccgcccttatttggatcggtttaatttggacaggaaaatgcaccttgttggtttggccaatatccatgtggagcctttaagattttattctcaaaaaatcacagatattaaaaatcttaaaaagggttcagtgattgctgtgccaaatgatccggccaatcaaggtagggcgttgattttactccataaacaaggccttatcgccctcaaagacccaagcaatctatacgctacggagtttgatattgtcaaaaatccttacaatatcaaaatcaagcctttagaagccgcgttattgcctaaggttttaggggatgtggatggggctatcataacagggaattatgccttgcaagcaaaactcaccggagctttattttcagaagataaggactcgccttatgccaatctaatagccgctcgtgaggataacgcgcaagatgaagccataaaaacattgattgaagccttacaaagtgaaaagaccaggaaattcattttggatacctataagggggcgattatcccggctttttaa

SEQ ID NO: 22851 - DNA, 765 bp, Helicobacter pylori
atgtttatagacacgcattgccatttggatcacaaggactatgaaaacgatttagaagaagtgttaaaagaaagcctagaaaaaggcgttactcaatgcgtgattcctggcgcggacatgaaggatttgaatagagcaatagaaattagcgaaaaatttgaaggcgtgttttttgccataggcgctcacccttatgatgtggagagttttgatgaaagcctgtttgaaaagttcgttgggcatcaaaaatgcgtggcgataggcgaatgcggactggattactaccgcttgcctgaattgaatgaaagagagaattataaaagcaagcaaaaagaaattttcaccaaacagattgaattttctatccaacacaacaagcccttgattatccatattagagaggcgagttttgatagtttgaatcttttaaaaaactatcctaaggcttttggggtgttgcattgctttaacgctgatggcatgcttttggaattaagcgatcgtttttactatgggataggaggggttagcacttttaaaaacgctaaaagactggtagagatcctccctaaaatccctaaaaacaggcttcttttagaaacggattcgccttatttgaccccacacccttttagaggtactaggaatagccctacttatatccctttaatcgctcaaaaaattgctgaaatcatcaacatagagactgaagaactcgcttctttaagcacgcataacgctcaaatgctctttagtttcccctaa

SEQ ID NO: 22852 - DNA, 621 bp, Helicobacter pylori
atgttcagcggtctaatccatcaaatagctaaagtgaaaagtttccacaacaatattttaaacatagagagtgatctcaatcccaagcttggcgatagcattgcgattaatggggcatgtttgaccgccatagaaagttcaaaaacgcattttagcgtggaattgagccaaaaaacccaaaacagcgtagcgttagaaaattacaaggatttagtccatattgagccagccctaaaagctgatgcgagtttggatgggcattttgtgcaagggcatattgacgctataggggtcattgaaaaaatcattcacaacgctaatcaagtggattttttcatcagcgcttctgaagaaacgcttttattgtgcgttgagcaaggctctattgcagttgatggggtgagtttgactttaagcaaggtagaagaaaaggggttttggctaacgattatcccttacactttagaaaacaccctttttaaggcttataaactcaaacggcgcgtgaatattgaaacggacatgttagtccgcagcgttgcgtctattttgaaaaaaacaaaagggtttgaaaaaaatttctcttggaatgaggctgacgctttgactttagggtattag

SEQ ID NO: 22853 - DNA, 648 bp, Helicobacter pylori
atgatttctcaaatgctcattcaagccacgctagaaacgctttatatggtgtttgtggcgagctttttggcggttgtttttggcttgcctttgggggttttattgttagtgagtaaaaaagggcatttgttaaacaagccccttttgcataaaattttagacacttccatcaacatgactcgctctttcccttttatcattctcattattttgctcctgcctttatcgcgctttttgattggcacaagcattggctctagcgcgagcattatcccgctagccatttcagccattccttttgtcgcaaagctttttgaaaattctttaatggaagtagagcatggcaagattgaaaccactttaagcttaggagcgtctcacttggaagtcattaaaatgatgcttttagagagcctgccctctttagtgaacaatatcaccatcaccttaatttctttaataggctattcggctatggcaggagcgttaggggctggaggtttgggggatttagccattaggattggctatcaaagttataggggcgatgtgcttttttatgcggtggttgtgattattgttttggtgcaaatcattcaaagcgtaggggattatgtggtgaaacgcctgagaaagcataagtattag

SEQ ID NO: 22854 - DNA, 1011 bp, Helicobacter pylori
gtgttgtgggtgctatattttttaaccagtttatttatttgctctttgattgttctgtggtctaaaaaatccatgctttttgtggataacgctaataaaatccaaggctttcatcatgcaagaaccccacgagccggggggcttgggatctttctttcttttgtgttagcttatctttttgagccttttgaagcaccttttaaggggttttttgtttttttggggttgttgttagtctttttaagcggttttttagaagacattaacctttcattaagccccaaaatacgccttattttgcaagccgtaggggttgtttgcatcatttcatcaatgcctttagtggtgagcgatttttcgcccctttttagcttgccttattttatcgcttttttattcgctatctttatgctggtgggtatcagtaacgctattaatatcattgacgggtttaacgggcttgcatcagggatttgcgcgattactcttttagtcattcattatatagagcctagcagtttggcgtgcctattagcttacatggtgcttgggtttatggtgttaaatttccctttaggaaagatttttttaggcgatggaggggcgtattttttgggtttggtgtgcgggatttcccttttacatttgagtttggagcaaaaaatcagcgtgttttttgggctcaatttaatgctttatccggtcatagaggtgctttttagtatccttaggcgcaaaataaaacgccagaaagccaccatgccggataacttgcatttgcacacccttttattcaaatacttgcaacagcgttctttcaattaccctaaccctttatgcgcatttatccttattctgtgcaacctgccttttattttaatcagcgtctttttccgcttaaatccttacgcgctcattgccattagcctagtctttatcgcatgctatttaatgggctatgcttatttgaacaggcaagtttgtgctttagaaaagcgagcgtttcaatga

SEQ ID NO: 22855 - DNA, 1023 bp, Helicobacter pylori
atgattttaagcattgaaagttcttgcgatgacagctctttagcccttacaagaatagaggacgctcaactcatcgctcattttaaaatctctcaagaaaagcaccatagttcttatgggggcgttgtgcctgagcttgcatcacgtttgcatgctgagaatttgccgcttttattagaacgcattaaaataagcttgaataaggatttttccaaaattaaagccatcgctatcactaatcagccaggtttgagcgttactttaatagaaggtttgatgatggcaaaagccttgagcttgtctttgaatttgcccttgattttagaagatcatttgagagggcatgtgtattcgctctttatcaatgaaaaacaaacctgcatgcctttaagcgtgctcttagtctctggggggcattctttgattttagaggctagagattatgagaatattaaaatcgttgccacgagtttagacgatagctttggggagagttttgataaggtttccaaaatgcttgatttaggctatccaggaggccctatagtggaaaaattagcccttgattataggcacccaaacgagcctttaatgttccctatccctttaaaaaacagcccgaatctggcttttagtttttcaggtttaaaaaatgcggtgcgtttggaggttgaaaaaaacgcccccaacttgaatgaagcgatcaaacaaaagattggctatcattttcaaagtgcagcgattgagcatttaatccagcagactaaacgctattttaaaatcaaacgccctaaaatttttggcattgtggggggagcgagccaaaatttggctttaagaaaggcgtttgaaaatttgtgcgatgcgtttgattgcaagcttgttttagcccctttagaattttgcagcgacaatgccgccatgatagggcgatccagcctagaagcttatcaaaaaaagcgctttgtccctttagaaaaggctaacatttcgccaagaacgctgttaaaaagttttgagtga

SEQ ID NO: 22856 - DNA, 2008 bp, Helicobacter pylori
atgaaaaaaacccttttactctctctctctcgcttcatcgcttttaaacgctgaagacaacggcttttttatcagcgcgggctatcaaatcggtgaagccgctcaaatggtgaaaaacaccggcgaattgaaaaaactttcagacacttatgagaatttgagcaaccttttaaccaattttaacaacctcaatcaggcggtaacgaacgcgagcagcccttcagaaatcaatgctgcgatcgataatttaaaagcaaacacgcaagggctaattggcgaaaaaaccaattccccggcgtatcaagcggtgtatttggcgctcaatgcggcggtagggctgtggaatgtcatcgcctataatgtccaatgcggtcctggtaacagtggacaacaaagcgtaacctttgagggccaaccaggacataattcaagttccattaattgcaatttaaccggttataacaacggggttagcggccctttatccattgagaattttaaaaagcttaatcaggcttatcaaactatccaacaagctttaaaacaagatagcggatttcctgttttggatagtgcaggaaaacaagtaactataacaataacaacgcaaactaatggagctaataaaagtgaaactactactactactactactactaatgacgctcaaacccttttgcaagaagccagtaaaatgataagcgtcctcactacaaactgcccatgggtcaatcacaatcaaggacaaaacgggggcgcgccgtggggtttagatacggcagggaatgtgtgtcaggtttttgccacggaatttagcgccgttactagcatgatcaaaaacgcccaagaaatcgtaacgcaagctcaaagccttaaccagcaaaacaatcaaaacgcgccgcaagatttcaatccttacacctctgctgatagggctttcgctcaaaacatgctcaatcacgcgcaagcgcaagccaagatacttgagctagccgatcaaatgaaaaaagaccttaacactatcccaagccaatttatcacaaattacttggcagcttgccacaatgggggtgggacattacctgatgcgggggttactaacaacacttggggggccggttgcgcgtatgtggaagagacgataacggctttaaacaacagccttgcgcattttggcactcaagctgagcaaatcaagcaatctgagttgttggcgcgcaccatacttgattttagaggcagccttagtaatttaaacaacacttataacagcatcaccacgaccgcttcaaacacgcctaattccccattccttaaaaatttgataagccaatccactaaccctaataaccccgggggcttacaggccgtttatcaagtcaaccaaagcgcttattcgcaattattaagcgccacgcaagaattagggcataaccctttcagacgcgttggattaatcagctctcaaaccaacaatggtgccatgaatgggatcggtgtgcaagtgggctacaaacaattttttggtgaaaagagaaggtgggggttaaggtattacggcttttttgactataaccatgcttatatcaaatctagctttttcaattcggcttctgatgtgttcacttatggggtagggacagatgtcctctataactttatcaatgataaaaccaccaaaaacagcaagatttcttttggggtgtttggggggattgcgttagctggcacttcatggctgaattcccagtatgtgaatttagcgaccttcaataatttctatagcgctaaaatgaatgtggcgaatttccaattcttgttcaatttaggcttgagaatgaacctcgctaagaataagaaaaaagcgagcgatcatgcggctcagcatggcgtggaattaggcgtgaagatccccacgatcaacacgaattactattctttgctaggcactcaactccaataccgaagattgtatagcgtgtatttgaattatgtgttcgcttactaa

SEQ ID NO: 22857 - DNA, 1773 bp, Helicobacter pylori
atgaaagcgataaaaatacttcttataatgacactcagtttaaacgctatcagcgtgaatagggcgttgtttgatttaaaagattcgcaattaaaaggggaattaacgccaaaaatagtggattttgggggttataaaagcaacaccacagagtggggagctacggctttaaactatatcaatgcggctaatggcgatgcgaaaaaattcagcgcgttagtggaaaaaatgcgttttaactctggtatcttggggaattttagagcgcatgcacatttgaggcaagccctaaaattgcaaaagaatttgaaatattgccttaaaatcatcgctagggattctttttatagttaccgcaccggtatttatatccccttaggcatttctttaaaagatcaaaaaacggctcaaaaaatgctcgctgatttgagcgtggtaggggcgtatcttaaaaagcaacaggagaatgaaaaggctcaaagcccttattacaggagcaacaactattacaactcctactatagcccttattatggcatgtatggcatgtatggaatgggcatgtatggaatgtatggcatgggcatgtatgatttttatgacttttatgatggcatgtatgggttctaccctaacatgtttttcatgatgcaagttcaagactacttgatgttagaaaattacatgtatgcactcgatcaagaagagattttagaccatgacgcttccatcaaccaacttgatacgcctactgatgatgacagagacgataaagacgataaatcttcgcaaccagcgaatctcatgagcttttatcgtgatcccaaattcagcaaagacattcaaaccaaccgcttgaatagcgccttagtcaatttagacaacagccacatgctcaaagacaattcgctcttccacactaaagccatgcccactaaaagcgtggatgcgatcacttctcaagctaaagagcttaaccatttggtggggcaaatcaaagagatgaagcaagacggggcgagtcctaataagattgattcagtggtcaataaagctatggaggttagggacaaattagacaacaacctcaaccaactagacaatgacttaaaagatcaaaaagggctttcaagcgagcagcaagcccaagtggataaagccttagacagcgtgcaacaattaagccatagcagcgatgtggtagggaattatttagacgggagtttgaaaattgatggcgatgacagagacgatttgaatgatgcgatcaataaccctatgcaacaacctgcgcaacaaacgcctattaacaacatggacaacacccatgcaaatgacagcaaagatcaagggggtaacgcgctcataaaccctaacaacgccaccaacgatgatcacaacgatgatcacatggacactaacaccactgacactagcaacgcaaacgacacccccactgatgataaagatgctagcggcaacaataccggcgatatgaataacaccgacaccggcaatacggacactggcaacaccgacaccggtaacactgatgatatgagcaacatgaacaacggcaacgatgatacgggtaacactaacgacgacatgggtaatagcaacgacatgggcgatgacatgaataacgcgaacgacatgaacgacgacatgggtaacagcaacgatgacatgggcgatatgggggacatgaacgatgacatgggtggcgatatgggagacatgggggatatgggtggcgatatggggaattga

SEQ ID NO: 22858 - DNA, 8709 bp, Helicobacter pylori
atgaaacaatttaaaaagaaaccaaaaaagataaaacgatcgcatcaaaatcaaaaaacaatcttaaagcgtcctttatggcttatgcctttactgattggcgggtttgctagtggggtgtatgcggatggaacagacattttggggcttagttggggggaaaaaagccaaaaggtatgcgtgcatcgtccatggtatgctatatggagttgcgataaatgggaggaaaaaacacaacaatttacaggaaaccaactcatcacaaaaacttgggcagggggtaatgcggctaactactaccactctcaaaacaaccaagacatcacagccaatttaaaaaatgataacggcacttattttttaagcggtctgtataactacaccggaggggaatataatggggggaatttagacattgaattaggcagtaacgctacttttaatctaggtgcgagtagtgggaatagcttcacttcttggtatcctaatgggcatactgatgttacttttagcgctgggactatcaatgtgaataacagcgtagaagtgggcaatcgtgtgggatcgggagctggcacgcacaccggcacagccactttaaacttgaacgctaataaggttactatcaattccaatatcagcgcgtataaaacttcgcaagtgaatgtaggcaatgctaacagcgttattaccattaattcggtttctttaaatggggatacttgcagttctttagctagggtgggcgtaggggctaattgctccacttctgggcctagctattcttttaaagggacgactaacgctactaacacgacttttagcaattcaagcggcagtttcacttttgaagagaacgccacttttagcggggcgaaattaaatgggggggcattcactttcaataaaaagtttaacgctaccaataataccgcttttaatagcggtagttttacttttaaaggcacaagctcttttaatggtgcgaattttagtaacgcttcctatacttttaataatcaagccactttccaaaacagctcctttaatggggggacttttacttttaatgaccagaccaatcaaagcacccagcacccccaaattcaaaacagctcttttagcggcagtgctaccactcttaagggttttgcgacttttgagcaagcctttaacaattcaaaccaccaactaacgatacaaaacgcttcctttaataacgctactttcaacaataccggtaaaatcactatagaaaaagatgcgagctttaataacacttcgttcaacactcctgttgatacaaacaacatgactattagtggtggcgttactttaagcggtaaaaatgacttgaaaaatggtgcaacccttgattttgggagttctaaaatcactctcactcaagggacgactttcaacctcacaagtttaggcagtgagaagagcgtaacgattttaaattctagaggtgggatcacttacaatcatcttttaaaccatgcgatcaatagcttgacaaacgccctaaaaacgaacgaaagctcttcaaaaccgcaaagtttcgctcaaggtttgtgggatatgatcacttacaatggggttaccgggcagcttttgaatgaaaacgctgcaacatctaaacccactgactcttcgccctctaaatcctctacaaactctacgcaagtctatcaagtgggttacaaaataggggatactatctacaaactgcaagaaactttcagccacaattccattattattcaggctttagagagcgggacttacacgccaccccctgtcattaacggctccaaatttgacttatccgcttcaaattatatcaatgctgacatgccttggtataaccataaatattatattcctaaatcccaaaattttacagagagcgggacttattacttgccgagcgttcaaatatgggggagctacactaactcgtttaaacaaacctttagcgcaagtaatagcaatctggtgattgggtataacgcaacatggactgatcacaatgtttcttctagcgacacggtggcttttggggacacttcagggagcgctcttaatgggcattgcgggccttggccctattaccaatgcacaggcacgactaacggcacttatagcgcttatcatgtctatatcacagcgaatctgcgttctggcaatcgtataggcaccggtggggcagccaatctaatctttaatggggtagatagtatcaatatcgctaacgctaccatcacgcaacataacgccggggcttattcaagctctatgactttttccacgcaaaacatggacaattcgcagaatttgaatggcctaaattctaacggcaagcttttggtgtatggcacaactttcactaaccaagccaaagacgggaaattcattttcaatgcagggcaagcgacttttgaaaacaccaactttaatggagggagttaccaattcagcggcgatagcttgaatttttcaaataacaaccagttcaatagcggttcgtttgagattggcgcaaaaaatactatttttaataacgctaattttaacaacagcacttcttttaatttcaataattctagcgcgaccacttcgtttgtgggggatttcactaacgctaattcaaatttgcaaatcgctgggaacgctgtttttgggaactctactaatggctctcaaaataccgctaattttaataataccggctctgttaatattgcagggaatgcaacctttgataacgtggtatttaacagccctacgaacacgagcgtgaaagggaaagttactctcaataacatcactttaaaaaacttgaacgctcctttgtcttttggcgatgggacgattgtttttagcgctcattcggtgattaatattggtgaagctatcacaaatggcaaccctatcacccttgtaagctcttctaaagcaattgaatacaacgacgctttcagtaaaaatctatggcagctcatcaactaccaagggcatggggctagcagtgaaaagctcgtttctagtgcgggtaatggcgtctatgatgtggtgtattctttcaacaaccaaacctacaatttccaagaggttttttcacccaacagcatttctatccggcgtttgggcgttggcatggtgtttgattatgtggatatggaaaaatcggatcgtttgtattatcaaaacgctctcggttttatgacctacatgcctaatagctataacaataatttagggaatttaaacaacaccatttactattacgacaacagcattgacttttatgcgagcgggaaaactctattcactaaagcggaattttctcaaacgttcactgggcaaaacagcgcgatcgtttttggggctaaaaatatatggacgagcgtaagcgatgcgccgcaatctaatgtgatcattcgctttggggacaataagggagcagggagtaatgatgcgagtgggcattgctggaatttgcaatgcataggctttatcacagggcattatgaagcgcaaaagatttacatcaccggcagtattgaaagcgggaaccgcatttctagcggtgggggcgcgagccttaattttaacgggcttcaaggcattcttttaacgaacgcgactttgtataaccgcgccgctggcacgcaaagctcttctatgaattttgtttctaacagcgcgaacattcaggctcaaaactcctattttatagacgataccgcacaaaataaaggcaaccctaattttagtttcaacgctttgaatctggatttttctaacagctcttttagaggctatgtggggcaaacgcagtctgtttttaaattcaatgccgttaatgcgatcagtttcactaacagctctaatttaagctctggtttgtatcaaatgcaagctaaaagcgtgttgtttgacaattccaatttaagcgtttcagtggggacaagcagcattaaagccaatgcgatcaatctttctcaaaacgcctctatcaatgcgagcaaccattcaaccttagaacttcaaggcgatttgaatttgaacgacaccagctcgctcaacctcaaccaaagcgccattaatgtttctaacaacgccacgatcaacgattatgcgagcttgattgcgagtaatggctctcaccttaattttaacggggcggttaatttcaattcagcgaatattactacgagtttgagtagttcctctatcgtgtttaagggggcggtctctttacgagggcagtttaatttaagcaataattcttctttagattttcaaggctctagcgctatcacctctaacacggcgtttaatttctatgataacgctttttctcaaagccccatcactttccatcaagcccttgacattaaagtgcccttgagtttgggaggcaacctcttaaaccctaacaacagtagcgtgctgaatttaaaaaacagccagcttgtttttagcgatcaagggagcttgaatatcgctaacattgatttactaagcgatctgaatggtaataaaaatcgtgtgtataacatcattcaagcggacatgaatggtaattggtatgagcgtatcaacttctttggcatgcgcattaatgatgggatttatgacgctaaaaaccaaacttatagtttcactaaccctctcaataacgccctaaaaatcaccgagagctttaaaaataaccaactgagcgttacgctctctcaaatcccgggcattaaaaacacgctctataacattggctctgaaatctttaactaccaaaaggtttataacaacgctaatggcgtgtattcttatagcgatgacgcacaaggcgtgttttatctcacgagcagcgtgaaaggctattacaaccccaaccaatcctatcaagccagcggcagcaataacaccacgaaaaataacaatctaacctctgaatcttctgtcatttcgcaaacctataacgcgcaaggcaaccctatcagcgcgttacacgtctataacaagggctataatttcagtaatatcaaagcgttagggcaaatggcgctcaaactctaccctgaaatcaaaaagatattagggaatgatttttcgctttcaagtttgagcaatttaaaaggcgatgcgctaaaccagcttaccaagctcatcacgcctagcgattggaaaaacattaacgagttgattgataacgcaaacaattcggtcgtgcaaaatttcaataacggcactttgattataggagcgactaaaatagggcaaacagacaccaatagtgcggtggtttttgggggcttgggctatcaaaagccttgcgattacactgatattgtgtgccaaaaatttagaggcacttatttggggcagcttttggagtccatctcggctgatttgggctatattgacacgacttttaacgctaaagaaatttatcttaccggcactttagggagcgggaacgcatgggggactggggggagtgcgagcgtaacttttaacagccaaacttcgctcattctcaaccaagcgaatatcgtaagctcgcaaaccgatgggatttttagcatgctgggtcaagagggcatcaataaggttttcaatcaagccgggctcgctaatattttgggcgaagtggcaatgcaatccattaacaaagccgggggattagggaatttgatagtaaatacgctagggagtgatagcgtgattggggggtatttaacgcctgagcaaaaaaatcaaaccctaagccagcttttggggcagaataattttgataacctcatgaacgatagcggtttgaacacggcgattaaggatttgatcagacaaaaattaggcttttggaccgggctagtggggggattagccggactggggggcattgatttgcaaaaccctgaaaagcttataggcagcatgtccatcaatgatttattgagtaaaaaggggttgttcaatcagatcaccggctttatttccgctaacgatatagggcaagtcataagcgtgatgctgcaagatattgtcaagccgagcgacgctttaaaaaacgatgtagccgctttgggcaagcaaatgattggcgaatttttaggccaagacacgctcaattctttagaaagcttgctgcaaaaccagcagattaaaagcgttttagacaaagtcttagcggctaaaggattagggtctatttatgaacaaggtttgggggatttgatccctaatcttggtaaaaaggggattttcgctccctatggcttgagtcaagtgtggcaaaaaggggattttagtttcaacgcgcaaggcaatgtttttgtgcaaaattccactttctctaacgctaatggaggcacgctcagttttaacgcaggaaattcgctcatttttgccggaaacaaccacatcgctttcactaaccattctggaacgctcaatttgttgtctaatcaagtttctaacattaacgtcaccatgcttaacgctagcaacggccttaagattaacgccactaataacaatgtttccgtgtctcaaggcaatctgtttatcaacgctagctgcgtgcaacaaagcgatccaacgacagctagcgccacaaacccttgcaccaccgctcaaaataacgcttcttctagtaatgcgtcaaacaacgcgccaatcgccttaaataataacgatgaaagcttggtggttacggcgaatggtttcaatttttcaggcaatatttacgctaacggggtggttgatttttcaaaaattaaaggctctgcaaacgttaaaaacctgtatctttacaataacgctcaattccaagccaacaacctcacgatttccaaccaagcggtattagagaaaaacgctagctttgtaacgaataacttaaacattcaaggagcgtttaacaacaacgccacgcaaaaaatagaggtgcttcaaaatttagtgatcgcttcaaacgcttctttaagcaccgggatttatgggttagaagtagggggggcattgaataatttgggagcgatccattttaatttagaaaattctcaaacgcctgtaaatccgctcattcaagtaggggggatcattaatctcaacaccacccaaacgccttttatgaatgtcagcgtggctaatggcggaacttacactttattaaaaagcagccgttatattgattacaatatcaaccctaacagcttgcaatcgtatttgaagctctataccttaatcaatatcaacggaaaccacatagaggaaaaaaacggcgtattgacttatttgggccaacgggttttattacaagataaggggttattattgagtgtagcactacctaactcaaacaacgcctctcaaaacaacattttaagcctttctgtccttcacaaccagattaaaatgtcttatggtaataaagtgatggactttacccctcccaccttacaggattacattgtgggcattcaaggacaaagcgcactcaatcaaattgaagctgttggggggaataacgctatcaagtggctttcaacattgatgatggagactaaagaaaacccgctttttgcgccgatttatttagaaaaccactctttaaatgaaatcttaggcgtaacaaaagatcttcaaaacaccgcaagcttgatttctaaccctaattttagaaataacgctaccagccttttagaaatggcgagttacacccaacaaaccagccgtttgacaaaactctctgattttagggctagagagggagagtccaatttttcagagcgcttgttagagcttaaaaacaagcgttttagcgatcctaaccctagtgaggtttttgtcaaatactctcaactcagcaaacaccccaataacctttggattcaaggggtgggaggagcgagctttatttctgggggcaatggcacgctttatggcttgaatgtgggctatgaccgattggttaaaagcgtgatccttgggggttatgtggcttatggctatagcggttttaacgggaacatcatgcattctttggctaataatgtggatgtggggatgtatgcgagggcttttttgaaaagaaacgaattcactttgagcgcgaatgaaacttatggaggcaatgcgagtcatatcaattcttctaattccttgctctctgtgttgaaccaacgctacaactacaacacctggacaacgagcgtgaatgggaattacggctatgatttcatgttcaaacaaaaaagcgtggtgctaaaacctcaagtgggcttgagctatcatttcataggcttgagcgggatgaaaggtaaaatgcaaaatccagcttaccaacaattcgtcatgcattcaaacccttctaacgaatcggttttaacgctcaacatggggttagagagccgtaaatattttggtaaaaattcctattattttgtaacggcgaggttgggtagggatcttttgatcaaagctaaaggcgacaatgtggtgcgttttgtgggtgaaaacactttattgtaccgcaagggggaaatttttaacacttttgcgagcgtgatcacaggaggcgaaatgcatttgtggcgtttgatgtatgtgaatgcgggggtggggcttaaaatgggcttgcaataccaagatcttaatatcactgggaatgtgggcatgcgagtggcgttttag

SEQ ID NO: 22859 - DNA, 756 bp, Helicobacter pylori
atgggtgcaattttatctattttaaaacttgaaatcaaatcttatctcaccaatacaagcgcgctattttggacttttatttatcctattttaatgctcctattactaatttttgttttttcaaaaaataccactgaaattttttactttaataacattataggtctaatgggacttcttattatttctagcgcgatctttggtctcacacaagctataacaagctctagatcgcataatatattcttattctacatgctatcaccagcaactttcaaacaaataactctagcattaatcgcttcaagactaatcgttgtaatcctatatgcttttatctttattgttctctctttttatgcgctcaatatcatcactattcttaattttaaagcgcttattttggggtttattagcattttttcaagcgcattgttttgtttttgcttggcaatttttgtagctagaatttttcaaaacgaacaaagcatcttaggattttgtaatatcatcaatctctatgcgctaatgtcttgtaatgtttttgttcctttagaatacctacctaatattggtcaattatttatcaaaacatctattttttactaccttaatcaacttctaatcaaagcttttcaagggattgatactatactggttttagcaacttcaacatttttcattattggtggcattattttatttttactaagcgctaatcgcatgttactaacaccaaaagaacgcatgcgttaa

SEQ ID NO: 22860 - DNA, 339 bp, Helicobacter pylori
atgaaaattatgcatcaagtcaaggattttttagatttttgcaaacaaacgatccacaaaaattctaatgaagcgtttcaaaaaaccaaacgagcgctttttaaagaaaaatctcaaaaaatcagggagcaagcggttaaaatcgtagaaaaacgcttgataaaagagaacatgcaactgagcgattttaatgaagaagaattaaaaatcatgtttgaagccgaagaaaaaaggttgttagagcaaatccacgctaaagaattgaaagaaaaacaagaaaaaaccaccaagcattttaaagaagtttgggaaaagggcgacaatgaacaagaaaaatag

SEQ ID NO: 22861 - DNA, 699 bp, Helicobacter pylori
gtgcaattttttgatttctctttagaaagtgttattaccaccttaatgaaaatcctagcccttttgatcgctatcatagggcatgagatcatgcatggcttgagcgcgtttttatttggggataggagcgctaaagacgccaagcgtttgagtttaaaccctatcaggcatttagacatgatgggttcggtgcttttaccggctctattactcatttttcaagccccctttttgtttgggtgggccaagcccgtgcctgtggatatgcgctacattgtctctcaaaaaggctctttggcatgcgtagtggtgagtttagccggggtgatttataatttcactttggccgttctgctcgctttcatcacgcattggagcttccaaagactagggatcaacgctttaagcatcaatgaattgaatctttatcagctcgcgttagtaacctttcttattcaaggcattctctataatcttgtcttgggcgttttcaatagcctccctatcccccccttagacggctccaaagcgttaggctttttagcgttgcattttaaaagcgcgtttttattggaatggttttctaaaatggaacgctacggcttgttgattgtattaatattcttatttatcccccctttatcggagttttttatccatgcacccacaagatttttattttccttactcctttcttaa

SEQ ID NO: 22862 - DNA, 9585 bp, Helicobacter pylori
atgacttatagaaatggcaaaatagatttaaaggaacgctttagtaaaaaccgctcttttaagggcattaaaaagaaaatcgctaaaaaatatacaatcaaaaactcgctttctataatttattccttaaaaacgcattcaaattcttctctatccattaataaaaaaatcttcttagggctagggttcgtttcggctttgagcgctcaaagtgaagattataatagttcggtgtattggctcaatagcgtgaatgaaaacaataataacaaatcctactatattagccccttacgcacttgggctggggggaataggagttttacgcaaaattataacaatagtcaattatacatagggacaaaaaacgcttccgcaacgcccaatcattcttctgtgtggtttggagaaaagggctatatcggttttattacaggggtttttaaggctagagacatttttatcacaggagctgttggatcgggtaatgagttaaaaaccggtgggggggcgatactggtttttgaaagctcaaacgaactaaccactaacggggcttattttcaaaataacagagccgggacacaaacttcttggatcaatttgatttccaataacagcgtgaatttgacaaacacggattttggcaatcaaacccctaatgggggctttaatgttatggggcgaaagattacttataatggtgggagcgtcaatggtgggaattttggctttgataacgtggatagcaatggcgcaaccaccattagcggggtaactttcaacaataacggtgcgctcacttataagggtgggaatggtattggagggagcatcactttcactaactctaatatcaatcattacaagctcaatcttaacgctaatagcgttacctttaataacagcactctagggagtatgcctaatggcaacgctaacactatagggaatgcctacattcttaatgcaaataatattacttttaataatttgacctttaatgggggttggttcgtttttaatagatctgatgctcatgttaattttcaaggcacaactacgatcaataaccccacttcaccctttgtcaatatgaccggtaaagttaccattaatcctaatgcgatttttaatattcaaaattacacgcccacgatagggaacgcttacacgctctttagcatgaaaaatggcaatatcgcttatgatgatgtgaataatttatggaatattatcaggcttaaaaacacgcaagccacaaaagacaatagcaaaaacgccacttccaataacaacacccacacttactatgtaacttacaatttaggcggcacgctctatcatttcaggcaaatttttagccctgattccattgttttacaatccgtctattatggcgcgaataatctttactacaccaatagcgtgaatatccatgacaatgtctttaatttaaaaaatattaacgatgatagggctgatacgattttttatcttaatggcttgaacacttggaattacacgcaagcgagattcgctcaaacctatggcgggaaaaacagcgctttagtctttaacgccacgactccttgggctaatggtgcgatccctaaatctaacagcacggtgcgttttggggggtatgagggagtcaattgggggaaaacgggctatatcaccggcactttcacagccgatagggtttatatcaccggtaacatgatgtctggcaatggcgctcaaaccggtgggggggcgactttgaattttgtgggcgcgactgaaattaatatcgctggagccacttttaaaaacttaaaaaccacttcacaaaactcttacatgacttttatggcgttagggaatggctctgggagtggtaagatcaatgtttctcagtctgatttttacgattggacggatggagggtatgattttaccggtaatggcgtttttgacagcgtgaatttcaacaaggcttattacaaatttcaaggcgctgaaaattcttacaattttaaaaacacgaattttttagcagggaatttcaaattccagggcaagaccaccattgaaaaatccgttttaaacgacgcttcttacgcttttgatggcgtgaataacgcctttaatgaagacaaatttaatggcggatcgtttaatttcaaccacgcagagcaaacaaacgcttttaataacaactcgtttagtggcggatcgtttagttttaacgccaagcaagtggattttaatgggaattcgtttaatgggggggtgtttaatttcaataatacccctaaagccagttttactaacgacacttttaatgtgaataaccaattcaaaataaatggcgctcaaacggattttactttcagtaagggcgttgttttcaacatgcaagggcttttgagcagtttgagcgtaggcacgacttatcaattgcttaacgctaaaagcgtgggttataaggataacaataacgctttgtatcaaatgttgcgctggactagcggagaaaatcctagcggtaaattagtagatgaaaataaaaccgcgccaaacagcgctaaaatttataatgttcaattcactgataacggcttgacttactacattaaagaaaattttaataatgggatcacgctcactcgtttatgcactctaggctacacgcattgcgtgaatattgataacgatgcgtttaatcttaaaaatgtcaataataacgctagtaacaccgtgttctatctcaacggcatgacgacttggaagactgctggcacaggagttttcacgcaagattacagcggcactaacagcgttttagtgttcaatcagaccaccccttttcttgctggggcgaatcccacttccaatagcgtggtgggttttgggaaaacttcaggggctgaatgggggctagtgggctatattcaaggcgtttttaaagccaatcaaattgatattaccggcacgattcgctctggtaatggagccaaaaccggtgggggcgcgactttagtgtttaacgctcaagagcgtttgaatatcgctaacgctaatttgaataacgataaagccggtttgcaaaactcatggatgaatttcattgttaataatggcaatttgaacgtaacaaacgcaaattttagcaaccaaaccccgcatggaggctttaaccttaaagccaataatatcacttgggataaaggctctgtgagtgggggggggaattttggtgtggataacgccaacgctaatgggaatgcggtgattaagaatgttaatttcagcgataacggcactttgatttataaagggggtgaaaacagcgccggaaattccctgaccttagaaaacaacaccttcaattcctataatatcaacgccaaagcgcaaaaccttattttcaacaacaactcgtttaacagcggtagctattcgtttaacgacactaaaaatgttacttttaaaggcacgaacacgctcattaacagcgatcctttcagccgccttaaaggatcagtttctattgacaataatagtatctttaacattgaaagggatttgaccgataaaaccacttacacgcttttaagtggggataacatcaaatacaataaccaagctttagcggataatgttttttcaaaaaatttatgggatttgatccattatgacggcgaacaagggactctattaagaacggataacaacacttattttgtgcaattcacgcagagcaacggccaaaaatttgtttttgaagagacttttaatcctggctctatcacctataaatatttcactatccattcttcgcctttccacacagaagctgattctaaggatatttggaatcaggtgaggaagcagtttgattttattccaggaaaaaccccggtgtgcgttggcgtgtgctatatcgcaccctataaaaatcaagatcttatcggctctagcgcttttgcgtggtcgctgaattttggggctacggtggtggggactttgcttttagggagcgctcaagaaaaagccaataacaatggcggctcgatctggtttggtaagaataatttgctgtatttgcatggcaattttaacgcgactaatatctttttaacgaataactttaatgtcggcaaccctaacgccggcggtggggcaacgattaattttaacgctgatgaaaccttgagcgctgacgggttgaattacacgaatttccaaaccgtggctatgggcttacaaactagcgcgagccagcattcatgggcgaattttaattccaagctttctatggagattaaaaactccaactttagggatttcacatggggaggctttaggttcaattcagggcgtatcacttttgaaaacaccacttttagcggctggactaatattaacggggcgactgaaagcggttcatcgtatgtgaacatggttgcgaatacggatttgattttcactgattccattttaggagggggcattcgctatgatttgaaggctaataacattattttcaataacactcaaatggtggttgatgtgtctaaaaacgtgaatcagtcttcattgaatgggaatgttactttcaatcattccaggctttcagtcaaacccaatgcggctatcaatattgggggggatcagacccaaacgactttagaaaacgcttcaagcctttctttttataacgatagcgtagcgaattttaacggcacgaccgcttttaacggggtgtcttacttgaatttaaaccctaacgctcaagtcagcttcaatcaagcgaatttcaataacgctaatgtaaccttttatggcattccgctatttggtaaaacgcccaattttggcaactctgtgcgccttatcaatttcaaaggggacgcaaagtttaatcaagccacgctcaatttaagggctaaaaatatccatttgaatttccaaggggcttccacttttgaaaataactctacgatgaatttggctgaaagttctcaagcgagctttaacgctcttagcgtggagggggaaacgaatttcaatctcaacggctcaagtttattgagtttcaatggtaacagcgtttttaacgcccctgtgaatttctacgctaataattctcaaatttctttcactcattcggcgacttttaatgcagacgcttcatttgatttaggcaataacagcaccctgaattttcaaagcgttcttttaaacagcgctctaaaccttttaggcaatggcggtaacaatctagcgattaatgctaaagggaattttagttttggatctcaagggattttgaatctgtcttatatgaatctatttggaggggataaaaaagcttccgtttatgatgtgttgcaagcccaaaatattgatggcttaagggggaataacggctatgagaagatccgtttttatggcatacagattgaaaaggccgattactcgttcaataatggcgttcattcttggagcttcactaacccgctcaacacgactgaaaccattaccgaaaccttacataataaccgcttgaaagtgcagatctctcaaaacggtgcttctaataatgcgatgtttaatctcgctcctagcttgtatgattaccaacaaaacccttatgatgaaagcgagaattcctataatcacacaagcgataaagccggcacttattatttgagtagcagtatcaaaggctttggtaagaataatgaaatacccgggacttataacgcgcaaaaccaacccttacaagctttacacatttataatcaggctatcagtaagcaggatttgaacatgatcgccagtttgggtaaggaatttttgcctaaagtggctaaacttatcgcttcaggggctttagacaatctcaatctcaatagcccggatagctttgaaacgatttttagtatcttaaaagaatatggcattactttaaaccaagcgaattggaagagcttattgaagatcatcaataatttttctaacacggctaattatcatttttctcaaggtagtctcgttgtgggggcgatcaaagaagggcaaacgaacacgaatagcgtggtgtggtttgggggcgatgggtataaaaatccatgcgcggttggggataacacttgccagatgttcaggcagactaatttagggcagttgcttaattctagcgtgccttatttgggttacattaacgctaattttaaggctaaaaacatttatatcaccggaaccatcggcagtgggaacgcttgggggagcggagggagcgcgaatgtgtcttttgaaagcgcgacaaatttggtgcttaatcaagccaatattgacgctcaagggaccgataagatcttttcttacttgggcaaagagggcattgataagctttttggagaaaaaggtttagggaatgtgctttctaatattgtttatgaagagagcttgaatgataacgctatccctaaagatttagccaacatgatccctaaagatttgggatctaaaactttaagctctttgcttagccctactgaagtgaataacctcttaggcgtgagtgcttttaaaaacgcgatcatggaaatcttaaattctaaaacggtgggcgatgtttttggtgaaaacgggcttttaaacgcgctagatcctgtaaaaagaaaagaaattgatcaaatgcttttagagcaaatccaagcccattcttcagggtttgaaaaattcatcgttaaaactttagggattgaaaatgtagagaatttcatcaataactggtatggcaagcaaagcttgagttcttttgccaataattttgtgcctggaggcttgaatcaagccctagataaaataggttctagctctgatgccaaagacttacagagtttcttagataaaacgacttttggggatattctcaatcaaatgatcaatcaagcccctttaatcaataagctcatttcttggctcggcccgcaggatttgagcgtgttagtgaatatcgctttaaatagtatcactaaccctagtaaggaattattgggtgcgatttctggcatgggtcaaaaagtgctgaacgatttgctaggcgaaggtgtagtgaataaaatcatgagcaatcaagttttagggcaaatgatcaataaaatcatcgctgataagggctttggaggcgtttatcatcaaggtctaggctcaatactccctaaatccttacaagatgagttgaagaaattgggtatgggctctttactcaaacctaaaggcttgcacaacctctggcaaaaagggaacttcaatttcgtggctaaaaaccatgtgtttgtgaataacagcttgtttagtaacgccacagggggggaattgaattttgtagcgggcaagtccattatttttaatgggaaaaacaccattaatttcacgcagtatcagggcaggctttcttttgtatctaaagatttttctaatatttcattagacactttaaacgctaccaacggcttaacgcttaacgcttctaaaaatgatattagcgttcaaaaaggtcaaatttgcgtgaatgtcttagattgcatgaccgctaaagggaaaaccactcaaactaattcctcttcaagcgcgacagccccaactaatgaaacgctagaagtgagtgcgaataatttcgctttcttaggcaccattaaggctaatggattagtggatttttcaaaagtcttacaaaatacgactatcgggactttggatttagggccaaacgctacttttaaagcgaataatttgatcgtgaataacgcttttaataataactctaattacagggctaatatcagcggtaatttcaatgtggccaagggtgcaacttttagcacgaatgaaaatggtttgaatgtgggggggaattttaacagcgaagggccattaatctttaatcttaataaccccacccatcaaacgattatcaatgtaactggcacttctacaatcatgtcttataacaatcaagctttaatcaactttaacacccaactcaagcaaggcgcttatacgcttattaacgctaatcgcatggtttatggctatgataatcaaacgattcttggggggagcttgagcgattacctcaaactttacactctcattgattttaacggcaaacgcatgcaattgaatggcgattcgttaagctatgacaaccaaccggtcagtattaaagatgggggtcttgtggtaagctttaaagacaatcaagggcaaatggtgtattcatctatcctttatgataaaatccaagttaccgtctctgataaacccatgagcattcaagcccctagtttggagtattatgttaaacgcattcaaggtagtgctggtttgaatgcgatcaaatctgcgggcaataattccattatgtggttgagtgagctttttgcggctaaggggggtaatcccttgttcgccccttattatttgcaagacaatcccactgaacacattgttactttaatgaaagatattaccagcgctttaggaatgctctctaactccaatctcaaaaacaactccactgatgttttacagctcaacacttacacgcaacaaatgagccgtttagccaagctttctaatttcgcttcttttgattcaacggattttagcgaacgcttgagcagtcttaaaaaccaaagatttgccgatgctgtccctaatgcgatggatgtgattttaaaatactctcaaagggataaactaaaaaacaacctttgggcgaccggtgttgggggcgtgagctttgtggaaaatggcacaggaacgctctatggtgtcaatgtgggctatgatcgctttgttagaggggtaattgttggagggtatgcggcttatgggtatagcgggttttatgagcgcatcactagttctaaatccgataatgtggacgtgggtttgtatgctagggcttttatcaaaaagagcgagctgacttttagcgttaatgaaacttggggggctaataaaacccaaatcagctccaacgacgctttgctttctatgatcaatcagtcctataaatacagcacatggacaacgaacgcgaaagttaattacgggtatgatttcatgtttaaaaacaaaagcatcattttaaaacctcaaattggtttaaggtattactatattggtatgagcggtttagaaggggtgatgaataacgtgctctataaccagtttaaagcgaacgccgatccgtctaaaaaatccgttttaacgattgattttgctttggagaaccgccattatttcaacacaaactcttatttttatgcgattggtggcgttggtagagacttgttagttaattctatgggggataaattggtgcgttttattggtaacaacactttgagttacaggaaaggcgatctttataacacttttgcgaacatcactacaggcggggaagtgaggttgtttaaaagcttttatgcgaacgctggggtgggggctaggtttggattggattacaaaatgatagatattataggaaatattggaatgcgtttagcgttttaa

SEQ ID NO: 22863 - DNA, 858 bp, Helicobacter pylori
atgaaaatcggatggattggactaggggctatggggactcctatggcgactcgtttgcgcgatgcggggttagaagtgtcggtttataaccgaacagagagcaaagcagcccccttaaaggaaaaaggcgtagcggtttatactagccccatagatttggccgctaaagttgatctggtttttaccatgctttcggataaagcggcgattgatgctgttttagcaccaaaattttgggaacagatgtctaaaaaaatcgtggtaaatatgagcactatcgcccctttggaaagcttatctttagaaaaaatcgctcaaaagcatcaagcaacttaccttgaagcgcccgtttcgggatcggttggcgcggctaaagccggggctttattgattttagcggcaggtgatgaagaagttatctctaaactcaaacctgttttggcgcatttggggagtcaaaccttttatttaggaaaagttggtcaagggacaggagctaaactatccattaatagccttttggctcaaatgggggttgcttattcagaagctttgctattagccaaacgtttaggggttgatgcagagtcatttttgcaaattattggccaatctggcatgaattcgcctctctttcaagctaaaaaaggcatgtggttgcaagataattatccggctgctttcagtttgaagcttatggctaaggacattcgcttagccaaaaatgaagcaggagaggcgatgaagttgccattcttatttcaagcagaagagctttattctcaagcggaaaaatccggtttaggcggattggatatggcagccgtttatcattatttagaaaaaggagaacattaa

SEQ ID NO: 22864 - DNA, 624 bp, Helicobacter pylori
gtgcaaaaactagccgtttttgattttgactccacgctagtcaatgctgagacgattgagtctttagcgagggcgtggggggtgtttgatgaagtgagagagatcactttgaaagctatgaatggcgagacagattttcataagagtcttattttaagggtttctaaactcaaaaacatgcccttaaaactagccaaagaagtttgtgaaagtctgcctttgtttgagggggcgtttgaactcattagtgccttaaaagagaaaaattacaaagtggtttgctttagcggaggttttgatctagcgacgaatcattacagggatttattaaatttagatgcggctttcagtaacacgctgatcgtggaaaataacgccttaaacggcttggttaccgggcatatgatgttttcgtattctaagggtgaaatgctactcgccttgcaacgcttgttgaatatcagtaaagatcgcactttagtcgtgggcgatggagcgaatgacttgagcatgttcaaacatgcccatatcaaaatcgctttcaacgctaaagaaatcctaaaacagcacgccacgcattgcattgataaacccaatttagccttaatcaagcctttgatttaa

SEQ ID NO: 22865 - DNA, 1521 bp, Helicobacter pylori
atgatcaacacgatattttgcgcgaccatgcaaaggggggtggctgaaatcgtggctgtggaggcgactttcacaagagctttgccggcgtttgtgatttcaggcctagccaataactctatccaagaagccaaacagcgggtccaatcggctttacagaataacgatttcactttcccgcctttaaaaatcaccatcaacctttccccctcagatttgcctaaatccggaagccattttgatttgcctatcgctcttttaatcgctttgcaaaaacaagaattggcttttaaagagtggtttgcttttggggagttggggcttgatggcaagatcaaacccaattctaacattttccccatgctcttagacattgccattaagcgcccccatgccaaaatcattgcgcctaaggcgaatgaagagcttttttcgcttatccctaatttgcaatgtttttttgtggagcattttaaagaagcgttagaaatcttgcaaactcctgaaatcaaagcagacacccacacgaaaaaactaccttttaaaacgatagaattgaacgataaagagtattatttttcagacacctacgccttagattttaaggaagttaaggggcaagctgtcgctaaagaagccgctttgatcgctagcgctgggtttcataacttgattttagagggaagtccagggtgcgggaaaagcatgatcattaatcgcatgcgttatatcttgcctcccttaagcctgaatgaaatcttagaagcgacaaaattacgcattttaagcgagcaagacagcgcctattaccctttaagaagctttagaaaccctcaccaaagcgcttcaaaatccagcattttaggctcaagctctctaagagagccaaaacctggcgaaatcgcgctagcgcataacggcatgcttttttttgatgaattgcctcattttaaaaaggatattttagaagccttgagagagcctttagaaaacaataaattagtgatctcacgagtgcatagcaagattgaatacgaaacctcttttttatttgtgggggctcaaaacccttgcttgtgcgggaatttactcagcgctactaaagcatgccgttgccaagacagagagatcacgcagtataaaaaccgcttgagcgagccttttttggacaggattgatttgtttgtgcaaatggaagaggggaattataaagacacgccatcgcattcttggacttcaaaagagatgcatgaattagtgttattagctttcaaacagcaaaagttaaggaaacagagcgcttttaatggtaagcttaatgaagagcagatcgaacgattttgccctttaaatactgaagcgcaaaagttgttaaagcaggcggttgaaaggtttaatctgtccatgcgctctgtcaataaggccaaaaaagtcgctaggacgattgcggatttaaacgcttgcgagaatatagaaaaatctcacatgcttaaagcactgagttttagaaagatttcttaa

SEQ ID NO: 22866 - DNA, 879 bp, Helicobacter pylori
atgaaacgaagggattttattaaaacgactgctttaggcgctacaggtgctgttttaggagcacagattttgcaggcagaagaaagcaaagggagtgttgcaaaaaaatataaaatagaggctgagtacagcattgattttgattctgcagaacacacttcgcttttcattcccatgccgagcgttgcagcgagcaatgtgcatttacaaggcaatcatgctagctatgaaagcatgctcaattttggagtgccttatttgcaagtggaatttttaaaaagcactcaaaaaaaacgagtccatttgtcgtatgagatcgctagctatcaattgaatgagcgtttgtttgatgcgagcgattttgtagcaatggggcgttatgaaagagacgatgcgagcgtggctaatattgccaaccagctcaagggagcaacccctaaagaaagcgtccgtaatttttatgcgttcatcaagcatgatatgcctaagagacaaaaggctttagagggtaaagaaaatttacctaaacgagatagtttgccctggtttgcaaccatttcacaagagagcatgtttgtgtccttatgccatgcgtgcgggattaaaagcgctgaagtgcaaggcttgaaattggctcaaaacagcgtggtggaaaacgcttctagagtggaagtgtatttgaaagattccttgttagcgtttgattttcaaaataatcacaaggaagtctttatcccgttgaaccgccataaagacatgcaattagatactgccttgttggcgacttttggcgatgcctttgcccttgtagatggtagggatttaggcaattacgagagcaaactttttgaaaaaagagtgtcctatacgattgtctaa

SEQ ID NO: 22867 - DNA, 1383 bp, Helicobacter pylori
atggccaatatcctaggggctggggtgtatagcgatattttctttgtggctttcaaattgcctaatctattcaggcgtatttttgcggagggctctttttctcaaagctttttaccgagcttcatacggagttccattaaggggggttttgcgagtttggtggggcttattttttgtggcgttttattcatgtggtgcttattagtagcgctcaatcccttatggctaaccaaactcctagcttacggctttgatgaagaaacgctcaaactatgcacccctattgtagcgatcaatttttggtatcttttattggtgtttatcaccacttttttaggcgcgcttttacaatacaaacacagcttttttgccagcgcttatagcgcaagcttactcaatttatgcatgattttagcccttttgatttctaaagaaaaaacgcatttagaagcgttgtattatttgagctatggcgtgcttttagggggcgtggctcaaatcttattacacttttatcctttagtaaaattaggcttatgggatttattatttaaagggttgttgggttttaagactaaaaatacaaacaaaaaagaatatcgtttgaatagggctaaaaaggatctaaaagcgtttttcaagcaattcttccccagcgtcttaggcaattctagcgctcagatcgcttcttttttagacaccacaatcgcttcttttctggcgagcgggagcgtgtcttatttgtattacgccaatagagtcttccagctccctttagccttattcgctatcgctatctccacagctcttttccctagcattgcgatcgcgcttaaaaacaaccagcaggatttaatcttacaacgcttgcaaaaggcgtggttttttttggtgggggttttgcttctttgcagcattggggggataatgttaagcaaagaaatcaccgaacttttatttgaaagggggcaatttagccctaaagacaccctaatcacttcgcaagtcttttcgctctatcttttaggcttgctcccttttgggctaaccaaactcttttctttatggctttatgcgaaattagagcaaaaaaaagcggctaaaatctctttaatttcgctttttttaggtttagcggcttctttgagtttaatgcctttgttaggggttttgggtttagcgttagcgaatagtttgagcgggttatttttatttgttttaacgatcaaagcgtttggctttcagtcattcttgggtataatcaaaaatttaaaatcatggcttgtaatccttttcctcgcttgcgtggaaatcttattactcttagcgttcaaatcgtgggttacacatttatatttattttattattttcaaggtttttaa

SEQ ID NO: 22868 - DNA, 3867 bp, Helicobacter pylori
atggaaatacaacaaacacaccgcaaaatcaatcgccctttagtttctctcgttttagcaggagcgttgattagcgccataccgcaagagagtcatgccgcctttttcacgaccgtgatcattccagccattgttgggggtatcgccacaggcactgctgtaggaacggtctcagggcttcttagttggggactcaaacaagccgaagaagcgaataaaaccccagataaacccgataaagtttggcgcattcaagcaggaaaaggctttaatgaatttcctaacaaggaatacgacttatacaaatcccttttatccagtaagattgatggaggttgggactgggggaacgccgctaggcattattgggtcaaaggcgggcaatggaacaagcttgaagtggatatgaaagacgctgtagggacttataaactatcagggcttagaaactttactggtggggatttagacgtgaatatgcaaaaagccactttgcgtttgggccaattcaatggcaattctttcacaagctataaggatagcgctgatcgcaccacgagagtgaatttcaacgctaaaaatatttcaattgataattttgtagaaatcaataatcgtgtgggttctggagccgggagaaaagccagctctacggttttgactttgcaagcttcagaagggatcactagcagtaaaaatgcggaaatttctctttatgatggcgccacgctcaatttggcttcaaacagcgttaaattaaatggtaatgtgtggatgggccgtttgcaatacgtgggagcgtatttagccccttcatacagcacgatcaacacttcaaaagttcaaggggaagtggattttaaccatctcactgtgggggatcaaaacgccgctcaagcgggcattatcgctagcaataagactcatattggcacactggatttgtggcaaagcgccgggttaaatatcattgcccctccagaaggtggctacaaggataaacctaatagtaccacttctcaaagtggcactaaaaacgacaagaaagagatcagtcaaaataacaatagcaacacagaggtcattaacccacccaataacacgcaaaaaacagaaactgaacccacgcaagtcattgatgggccttttgctggcggcaaagacacggttgtcaatattttccacttaaacactaaagccgatggcacgattaaagtgggagggtttaaagcttctcttaccacgaatgcggctcatttgaatatcggcaaaggcggtgtcaatctgtccaatcaagcgagcgggcgcacccttttagtggaaaatctaaccgggaatatcaccgttgatgggcctttaagagtgaataatcaagtgggtggctatgctttggcaggatcaagcgcgaattttgagtttaaggctggtgtggatactaaaaacggcacagccactttcaataacgatattagtttgggaagatttgtgaatttaaaggtggatgctcatacagctaattttaaaggtattgatacgggtaatggtggtttcaacaccttagattttagtggtgttacagacaaagtcaatatcaacaagctcatcacagcttccactaatgtggccgttaaaaacttcaacattaatgaattgattgttaaaaccaatgggataagtgtgggggaatacactcattttagcgaagatataggcagtcaatcgcgtatcaataccgtgcgtttggaaactggcactaggtcaatcttttctgggggtgtcaaatttaaaagcggtgaaaaactagttatcaatgatttttactatagcccttggaattattttgacgctaggaatgttaaaaatgttgaaatcaccagaaaattcgcttcttcaaccccagaaaacccttggggcacatcaaagctcatgtttaataatctaaccttgggtcaaaatgcggtcatggactatagtcaattttcaaatttaaccattcagggggattttatcaacaatcaaggcactatcaactatctggtccgaggcgggaaagtggcaaccttaaatgtaggcaatgcagcagctatgatgtttaataatgatatagacagcgcgaccggattttacaaaccgctcatcaagattaacagcgctcaagatctcattaaaaatacagagcatgttttattgaaagcgaaaatcattggttatggtaatgtttctacaggtaccaatggcattagtaatgttaatctagaagagcaattcaaagagcgcctagccctttataacaataataaccgcatggatacttgtgtggtgcgaaatactgatgacattaaagcatgcggtatggctatcggcaatcaaagcatggtgaacaaccctgacaattacaagtatcttatcggtaaggcatggagaaatataggcatcagtaaaacggctaacggctctaaaatttcggtgtattatttaggcaattctacgcctactgagaatggtggcaataccaccaacttacccacaaacaccactaataatgcgcattctgctaactacgctctcgtgaagaacgctcctttcgctcacagcgccactcctaatttagtcgctatcaatcagcatgattttggcactattgagagcgtgtttgaattggctaaccgctctaaagatattgacacgctctatactcattcaggcgcgcaaggcagggatctcttgcaaactttattgattgatagccatgatgcgggttatgccagacaaatgattgataacacaagcaccggtgaaatcaccaagcaattgaatgcggccactgacgctttaaacaacgtagccagtttagagcataaacaaagcggcttacaaaccttgagcttgagtaatgcgatgattttaaattctcgtttagtcaatctctctaggaagcacaccaaccatattaactcgttcgctcaacgcttacaagctttaaaaggccaagaattcgcttctttagagagcgcggcagaagtgttgtatcaatttgcccctaaatatgaaaaacctaccaatgtttgggctaacgctattgggggagcgagcttgaatagcggctctaacgcttcattgtatggcacaagcgccggcgtagacgctttccttaacgggaatgtggaagccattgtgggcggttttggaagctatggttatagctcctttagcaatcaagcgaactctcttaactctggggccaataacgctaattttggcgtgtatagccgtttttttgccaaccagcatgaatttgactttgaagctcaaggggcgctagggagcgatcaatcaagcttgaatttcaaaagcactctattacaagatttgaatcaaagctataattacttagcctatagcgccacagcaagagcgagttatggttatgacttcgcgttttttaggaacgctttagtgttaaaaccaagcgtgggcgtgagctataaccatttaggttcaaccaactttaaaagcaatagccaatcacaagtggctttaaaaaatggcgcgagcagtcagcatttattcaacgctaacgctaacgtggaagcgcgttattattatggggacacttcatacttttatttgcatgcgggagttttacaagagttcgctcactttggatcgaatgatgtggcgtctttaaacacctttaaaatcaatgccgctcgcagtcctttaagcacctatgcaagagcgatgatgggtggggaattgcaattggctaaagaagtgtttttgaatttgggcgtggtttatttgcacaatttgatttccaacgcaagccatttcgcttccaatttaggaatgaggtatagtttctaa

SEQ ID NO: 22869 - DNA, 1560 bp, Helicobacter pylori
atgcaaagtttatggatttatccagaggatactgaagttttaggggctgcttgtaagagccttttaaaagcgttgaagcctcgttatcaaaaaatcgccctgttttcgcccattagtggggggtgtgagggctttggggagtgtgagagcctaagctctttagaggttcatagtgccatagacaaacaaaaggctttagagcttgtgagcaccgctcaagaagagttactatttgaaacgattctcaaacgctatgatgaattacaatccacgcatgattttgtcattaatttagggtatgcgccgaagtttttcttaaacgctcttttagatttaaacaccattttagccaagcatttaaacgctcctgtggtggctgttgcgcaaacgagtttggatcacttgaaagccatgcactctcatatcctcaaaaaagaagcccctttcgctatagggttatttgtgggcgaaacgcttgaaaaaccacattttttaagcgcgtctctttgcaagcaacaatgcgaattagaagcgagcgcgattgaaaatttgttgcaaacaaaaagcgagattattacccctttagcctttcaaaggagcttggaaaaaaaggctaaaaagcagattaaaaaagtcgttttacctgagagcgaagatgaaaggattttaaaagccgcacatcgtttgaatttaatgggcgcggtgggattgattttattgggcgataaagaagccattaactcccaagcgaaaaatttgaacttgaatttggaaaatgtagaaatcattaatcccaacacctcgcattatagagaagaattcgctaaaagcttgtatgaattgcgaaaatcaaagggcttgagtgagcaagaagctgagcgattagcgttggataaaacttattttgcgaccatgctcgtgcatttaggctatgcgcatgccatggtttctggggtcaatcacaccacggctgagaccattagacccgctttacaaatcattaaaactaagcccggcgtgagcctggtttcaagcgtgtttttaatgtgtttggacactcaagtgttcgtttttggggattgcgccattattcctaaccctagccctaaagaattagccgagatcgctaccacttccgcgcaaaccgccaagcaattcaatatcgcgcctaaagtggccctgctttcttatgcgacaggaaattccgctcaaggcgaaatgatagacaaaatcaacgaagccctaacaatcgtgcaaaaattagatccgcaattagaaattgatggccctttacaatttgacgcttccatagataaaggcgtagcgaagaaaaaaatgcctaacagccaagtggccgggcaagctagcgtttttatcttcccggatttaaacgccgggaacatcgcttataaagcggtgcaacggagcgctaaagccgtggcgatagggcctatcttacaaggcttgaacaagcccattaacgatttgagtaggggcgctttagtggaagatattgttaacaccgttttgattagcgccattcaagcgcaagattattga

SEQ ID NO: 22870 - DNA, 7200 bp, Helicobacter pylori
atggcgtttaaaaaggccagattgatttccaggtttatttcaaaaggatctttcaaattgaataagatctcaaagaaatttttcacattgaatcaaatcttaaagcgtgaaaagcccttaaaacgccataaaaaaacaaaatctattgaaaagccctttaataaaaacaaatcttttttaaaagcttcggttttattgataggagcgctaggggggttatcccacctaagggctaacgaatgccgttattggtcatggtcgtcttggagttatcaagacaatattgaaagcggtcctaattcacccacgcacaactcttattgtctttttagtagcgctcaaggctctgggacttattatttaaacactcttaccacttatagcgctggtggggctagtttcacgcaaaaattcaatggtggcacgcttgatataggggggaatatccgctttggaggcacaggtattaatggaggtgatgtagggtatatcactggaacttataatgctcaaacgatgaattttaattctagccatatcacaaccggaaactcatacgctgatggcggtgggaccacgctcaattttaacgcgactaacaatatcactatcaatcaagcgagctttgataacagcgatgcagggacacaaaaatcttacatgaattttaaaggctctaatatcaagatcagtggctctagctttacagacgacaccaatggaggttttaatttcagcggtaataacaataatagcaccatctctttcaatcaaaccagcttcaatcaagggacttataattttagtaacagcgccactttaagcttcaataacagcaatttcaatcaagggacttatcactttaacagcgcccaatccacttttgaaaacagcaatttcaatcaaggcacttataattttaatgacaatactagctttaataacgacaccttcaatcaaggcacttataattttaatagcagcaaggtgagtttttcaggcgctaacactttaaattcaagttcgccttttgctagccttaaaggcagtgtgtcttttaattctggtgcgatttttaacctcaatcaaacccttaataataatcaaacctatgacattctcactacaaacggagcgatccagtatggggtttatcaaagctatttgtgggatctaatcaactataagggcgataaagccattagccatgttgaagtgagtaataacacttatgatgtaacctttgacattaacgggcaagatgaaaccttacaagaaacctttagcaaccaatctattattacccaatttttaggagacgatttacaacaacaagcccaacaaacctatcaagaggatgtagctaattcccagaacgctttgaataaggttgctagcgacaacacgatcgcaaataacgatacaagctacactcaaagcagtaaccccactatccttaaagacgctcaaggtttagaaaacaccaaccaacaaatccaacaagacgaaaaagccttagaaaaagatttagcccaaatcaagcaattagccaactccaccacaggctttaacgaacaagctttcactcaagctcaaaaacaagaacaacaagatgaacaagccttacagaacgatgaaaacgcttttaatacggaacaagagggattagaacaagcgatagctaacgctaaacatgccaaccccacaccaaatccgacaccaagccccacacccactcctataaaacacacagcgccaaacactccccctagtcaagtcccgcccacaccccctagtcaaaatttacctaaaacaaatgtgtggaatggggtttattggcttcaaaacaaaacttactcaaacaaaggcatttattatattgatcccaatctttcaggacagagcggtcaaagcggcaacacgctcagcacctatacagctaatttgttagggagaagttttggcgtcaatgctaacaatggcactttgatcatagggaataatacagagagtgtgaatgataacgggttgatttggatagggcatggaggctttggctatattacgggaacttttagtgcggctaacatttacttgaccaataattttaaaaccggtgaaggcgtttcaaattcagatggtgggggagcgaacattacctttaaagcaagcgataatatcactatggatggcttgaattacaataacgctgaaaccgttactaaaatgattcaaacaggggccagtcagcattcctataccacttttgacgctaccaataatatcagtgtaactgattctgattttagcgatatgacttgggggaaattcagttttagcgctaagaatatttcgttttctaacgcttcgttcagcggctttacaaaccctggaggatcaagcactatcagcacgaatgcttctaattctttaagctttacagattctcgcttgaatggtggagcaatctataatttacaggctaatagccttattttcaataacacgcaagcggtttttaatgtcttgtattctagggggacaagcaattttaacgccaccacacagcttttaggcaacacgagttttacgcttagctctcaaagtttgctaaactttaatggcgatacaaccttgcaaaacaacgctaatatcacgcttggcaataaaagtcaagccgcttttaaaaattctttaacgcttgataacaattctaatttaagcttagacaatcaaagcgttttgaacgcgaatggcacgagtgcttttaacaatcaagcgagtctcaacatttataatgggagtcaagcggcctttagcagtctcttttttaatggcggaacactcagtcttaacgcgaatagcaagctcaacgcttctagcgctagtttttcaaacaacaccactattaatttagacgatagcgttttgaatgcgaataacacaagctctttaaacgctaatatcaattttcaaggcgcaagccaggctgattttggaggcaacacgactattgatacagcaagctttaattttgacagcgcaagttcattgaattttaataaccttacggctaatggggcgttaaattttaatggttatgcgccctctttaactaaggctttaatgaatgtcagcgggcagtttgttttagggaataatggggatattaatttatctgacatcaatatctttgacaacatcacaaaatctgtaacttacaacatcttaaacgctcaaaaagggattactggcattagtggggctaatggctatgaaaaaatccttttttatggcatgaaaatccaaaacgctacctatagcgataataacaacatccaaacttggtcgtttataaaccctctcaattcttctcaaatcattcaagagagcattaaaaatggggatctaaccatagaagttttaaataaccctaactcggcttccaacactatttttaatatcgctcctgagctttataattaccaagattctaagcaaaatcctaccggctatagctatgattatagcgacaatcaagcaggcacttattacttgacaagcaacattaaaggtcttttcacccctaaaggctctcaaacgcctcaaaccccaggcacttatagcccatttaaccagcctttgaatagtttgaatatctacaataagggtttttctagcgagaatttaaaaacgcttttagggatcctttctcaaaattccgccaccttaaaagaaatgattgaatccaaccaactagacaatatcactaacattaatgaagtgttgcaactcttagataagattaaaatcacccaagcgcaaaagcaagcgctcctagaaacgatcaaccatttgactgacaacatcaatcaaacctttaataacgggaatctcgttataggcgctacccaagataatgttacaaactctactagctctatatggtttgggggcaatggctatagcagcccttgcgcgctagatagcgccacttgttcttcttttagaaacacttacttggggcaattattaggctcaacttccccttatttaggctacattaacgctgattttaaagctaaaagcatttatattaccgggacaattggaagtagtaacgcttttgaaagcggagggagcgcggatgtaacctttcaaagcgctaataacttagtgttgaataaagctaacatagaagctcaagccacagacaatatctttaatcttttgggtcaagaagggattgataaaatctttaatcaggggaatttagcgaatgttcttagtcaaatggctatggaaaaaatcaagcaagccggcggtttagggaactttatagaaaacgctctaagccctttgagtaaggaattacccgctagcttgcaagatgaaaccttaggccaacttataggtcaaaataacttagatgatttattgaataatagtggagtcatgaatgaaatccaaaacattatcagtcaaaaactaagcatttttggcaattttgttaccccatccatcatagaaaactaccttgctaagcagtctttaaaaagcatgctagacgataaagggcttttgaattttatcggtgggtatatagacgcttctgaattaagctctattttaggcgtgattttaaaggatattactaacccccctacaagcctgcaaaaagacattggtgtggtagcgaacgacttgttgaacgagtttttaggacaagatgttgtcaaaaagctagaaagtcaaggcttggtgagtaatatcatcaataatgttatttctcaaggcgggttgagcggcgtttataatcaaggtttagggagcgtgttgccgccctctttacaaaacgcgctcaaagaaaacgatttaggcactcttttatcgcctagaggcttgcatgatttttggcaaaaagggtattttaactttttaagcaatggctatgtttttgtcaataacagctcttttagtaacgctactgggggtagtttgaattttgtcgccaacaagtctattatctttaatggcgataatacgattgactttagcaagtatcaaggcgcattgatttttgcttctaatggtgtttctaatatcaatatcaccaccctaaacgccactaatggcttaagccttaatgcgggtttgaataatgtgagcgttcaaaaaggagaaatttgtatcaatttagccaattgccctacaaccaaaaacagctctcctgcaaactctagcgtaacccccactaatgagtctttaagcgtgcacgctaataatttcactttcttaggcacaatcatctctaatggggctattgatttgtctcaagtaacaaataatagcgttataggcacgctcaatctcaatgaaaatgcgaccttgcaagctaataatttaacgatcaccaacgcttttaacaacgcctctaactctacggctaatattgatggtaatttcaccttaaaccaacaagcgactttaagcactaacgctagtggtttgaatgtcatggggaattttaatagctatggcgatttggtgtttaacctcagtcattcagttagtcatgctattatcaatactcaaggcacagcgacgatcatggccaataataaccctttgatccaattcaacgcttcttcaaaagaagtgggtacttacacgctgattgatagcgctaaagccatttattacgggtataacaaccaaatcacaggaggcagtagcctggataattaccttaagctttatgcgctcattgatattaatggcaagcacatggtgatgactgacaacggcttaacctataacgggcaagccgtgagcgttaaagatggcggtttagttgtaggctttaaggactctcaaaatcaatacatttacacttccattctttataataaagtgaaaatcgctgtttctaatgatcctatcaataacccacaagcccccactttaaaacaatatatcgctcaaattcagggcgttcaaagcgtggatagcatcgatcaagctgggggaaatcaagcgattaattggctcaataaaatctttgaaactaaaggaagccctttattcgctccctattatctagagagccactccacaaaagatttaaccacgatcgctggagatattgctaacactttagaagtcatcgctaaccctaattttaaaaatgacgccactaatattttacagatcaacacctacacgcagcaaatgagtcgtttagccaagctctctgacacttcaactttcgcccgttctgatttcttagaacgcttagaagcccttaaaaacaagcgattcgctgatgcgatccctaacgctatggatgtgattttaaaatactctcaaaggaatagagttaaaaataatgtgtgggcgacaggagttggaggggctagtttcattagtggaggtactggaactttatatggtatcaatgtagggtatgataggtttattaagggcgtgattgtgggaggttatgccgcttatgggtatagcgggttccatgcaaacatcactcaatcaggctctagcaatgtcaatgtgggcgtttatagccgagcgtttatcaaaagaagcgagctaaccatgagcttgaatgagacttggggatacaataaaactttcatcaactcctatgaccccctactctcaatcatcaatcagtcttacagatacgacacttggacgactgacgctaaaatcaattatggctatgatttcatgtttaaagataaaagcgttatttttaaaccccaagtaggcttaagctattattacattggtttgtctggtttaaggggcattatggatgatcctatttacaaccaattcagagccaatgctgaccctaataaaaaatccgttctaacgatcaattttgccctagaaagtcggcattatttcaataaaaactcttattattttgtgattgcggatgtgggcagagacttattcattaattctatgggggataaaatggtgcgtttcatcggtaataacaccctaagctatagagatggtggcagatacaacacttttgctagcattatcacaggcggggagataagattgttcaaaaccttttatgtgaatgcgggcataggggctaggtttgggcttgattataaagatattaatattaccggaaatattggtatgcgctatgctttttaa

SEQ ID NO: 22871 - DNA, 1266 bp, Helicobacter pylori
atgaatttttttgacacccttatgggtatgtttgttgagccatctcaaaaagtagccaaaagtcttgctgaacatgtgggtagcttttttcatgcacaactcattttaaacacaattattactattttatttatgatatgggcgtataagcgtgtgaaagagggcgatatgtttgagtttaaaaccgctatgggtgtggttgtatttatagcgtttgtaggatttatcaattgggggattaaaaatcctaatgattttaacacttattttatcaatacgatattctacccatctgaaaaactagccatacttatcgctcaaagcctaaatgatggcttagaaatccccactaacactaatttaagtcctagtgaaatttttagcataggaaatttagcctcaagtgcgtatgcaatgatagttaatctgtgggataatgcttttgatggtattaacatgtttaattggctcacaatgatacctaaaataattatgttttttttagtgattttaggggaattattgtttttaggcttattgcttattattgtgttattagttacagcagaaatttttatgtggtcagcattaggtttaattgtattgcctttaggtttaatcccccaaaccaaaggcatgttatttagctatcttaaaaagctcatttcccttactctttataaaccttgtatgatgttagtagctttttttaattatggaataatctataaagtcaatactttaatccccactaaacacgaagtcacacaaggcttttatggcaatgcggataaaatggcaaatgagggaaaaattattgatgtctttggcaatgtcttaaaaggagattggaactcttatatagcccatagttctattgtaggctttttaaccattattgttttaggttctgtgatttgtttctttctagtcaaacgagtgcctgattttatcaataatatctttggcacaagtggaggcgtgggggcagtaacagaaatgatgcaaaaaattggcatgacaataggcggagctgtatttgggggtagtgcagttatggttgctaatcaagttaagcaagcctatcagagtgctgggggcggactagcaggacttcaagctggagctaaagcttttgggcttggagcaatcagtggaggggcaagtgctatggcaaaccacaggagtgttaaagctggggtgaaacactttgtagcaagtgttaaaagtggctttggatttgataatgataaaaataataaatga

SEQ ID NO: 22872 - DNA, 435 bp, Helicobacter pylori
atgaatatatcggttaacccctatttaatggcggtcgtttttgtagtgtttgtgttgttgttgtgggcgatgaatgtttgggtgtataggcctttgttggcttttatggataacagacaggcagagataaaggacagcttggctaaaatcaaaacggataacacccaaagcgtggagattggccatcaaattgagactcttcttaaagaagccgctgaaaagcgcagggaaatgctagcagaagcgattcaaaaagctacagagtcttatgacgctgtgatcaagcaaaaggagaacgaactcaatcaagagtttgaagcgttcgcaaagcaattacaaaatgaaaaacaaatcttaaaagagcaattgcaagcgcaaatgacggtatttgaagacgagttaaacaagcgtgtggctatgggtttagggagttga

SEQ ID NO: 22873 - DNA, 2412 bp, Helicobacter pylori
ttgtggcttaagtcaaaattctttcttttaatgggcgtgggtttgctctcccattcactcaacgctttaagcctcacgctcacgcaaggcaaagaagaaggagaagatttttcggttttaaccttacgaaacgataaggcgttttcttgctcttatgctaatgaaaaaccgccgagcgggattgaagcgtctttatctattatacacgctaaacgccccatagaatgcgtgatagattctattcctaaagagggctttacccctttagaaaacgcttttttcaatatcacctattccatgcgccagcaacaattcattttacacatcaaacccaaagtgatgcgaaggctcacccttttttcttttgatagggattataaaaaagcgatccccctttttgtggaaaacgacgctaaagccaagatgtggcaaatcataggctatgatcaaaaaatcccttttttgagcgaaaaagacaacgctcaaaaaggcttgaatttccccattatcattaaagacgctcaaacccctatcattcaagagctggatgtgaataacaaacccctactcaccacaaagggctatgatttaaacgcctatttagaagctaaaaaacaaatggattcgcaagcctattttgacgccttacgcacgatcagccgcgcgtttaaaaattaccctcaaacgatttttaaaaaagatctgtatttattagaaattatcgcattaggtaaattaggcattaaaaaatccttactcatagatattggcacccaatggattaaaaattacccgactgatcctaatatccctgaagcgctatactatgtcgccaaagctttagatgaaaacaacaattacaaacaagccgtgcgctattacaaacgaatccttttagaatacaaaaactcccgctacgctcccttagcccaaatgcgtttagccattgaagcggctgaaggctctgatttgagcaacgctaatatgctttttaaagaagctttttctaacgccaaagacaaagagagcgcgagtgaaatcgcgcttaattgggctgaagcagagataaactatcaaaactttaataacgctaaatatctcattgataaggtggttcaatccaaccctgattatctttctatgcacagcgaattagccctagaattgctcaagttattgaaaaaaaaccaaatgaatgaaagtgcgattgagatcgctcacttgctcctcaatcaagatgatgacttgaaagctaaagagcaagcgctctatgatttaggggcgttgtatgcaaggatcaaggattttaaaaacgcccacctttacaatctgcaatatttgcaagaccatgcggaattggagcgggcttctgtcgttagagcacgcgatgaaaaagcccttttttcaatggaagggaacacgcaagaaaaaatcgcccactacgataaaatcattcaaaatttccctaattctaatgaagcccaaaaggctttagagttgaaagcccaactcttgtttgacaataagcactatgctgaagttttaggcatgcaaaaaaatttgcccaaagattctcccttgatccaaaaaacgctcaatatccttgctaaaaccccattagaggatcatcgttgcaaagaagctttaaaatacttatcccagatcaccgcctttgcattcaacccccaagaagaaatccaagcctttgattgcttgtatttcgcatcgctcaaggaaaaagcgcaaattattgccctaaacgctttaaaagcggctaaaacccctagcgagaaattaacatggctttatcgtttggggcgcaattactaccgcttaggggattttaaaaattccactctggcttctaaagacgccttaatcctcgctcaaagcttaaataaaaaagagttttatgacattgcttttgtgttattttcagattacatgcaaaacaatgaaaaaggattggccctcaatttgtatgcgtttttagaaaagcatttcaaagacgataaacgcatggcgttggtttattttaaattattagagaatgaaaaagaccctaaaagcgttaaaatttatgccacaagcttactcaaactccaagacgcttataaggattattcttacacgccctttggcgaatttgcccttattgacgcttacagaaccaccaaagattattcaaaagcgttagaaacgctagacaaactcttaaaccgcaggctttctttagaagatcaccaaaaagccttatacttgcaatccagcttattggatttaaccaatcaaaaagcaaaatctaaagccagtttagaaaaatgcgttcaattaaagcaaaaagatcaaacaaacgcatggcaaaatttatgcgaacagggtttaaatttattcaaaaacaaggagtcatga

SEQ ID NO: 22874 - DNA, 372 bp, Helicobacter pylori
atgaatacaaataatcacaacaatgagaaaaagaatactattactcgtaggatgaaaatcgctcataatagtcttccggaaacagataggaaagcccacatggaaccgaagtggcgcgaactagctgacataagatctaaaatgtttgcagaaagtaaaaaacaacttaaagaaagaggcattcaactaaaagaaaaaagcaaggcgcaacaacaagaatcttttgaaagagaaaaggaacttatggaagaagaatttcaagttcaaagagaacttctagaaatctattatggttacccaacacaaaaaaataaacctggaattaaatatgatgacacaatagacatagaacccgaagatgaaaaggactga

SEQ ID NO: 22875 - DNA, 1008 bp, Helicobacter pylori
atgaaagatattttaaacgctctctatcatcaaaaagacttgaacgatgaagaagtcaaaaagttattcacgctcattattgatgaaaaagtaagtcccgcacaacttggggcggttttgtgcgctttaaaaatcaagggcgagagctttaaggagattagcgtcgctgcaaccacgcttttagagcatgcccctaagccttttaatagcggcttggatttaatagacaattgcggcacagggggcgatgggctaaaaacgattaatatcagcacgattgccgcactcattgccagctctatggggttatctatggcaaaacatggatcaaggagcgtgtccagtcatagcgggagcgcggatttgttggaaaatttgggcgtgaatattgaaatgaaccccatgcaattagaaaattgcttcaaacaatcgcattttgggtttttattcgcgcctttataccatcaaagttttaaaaaatccgcccctttaagaaaagagcttttcactaaaacgattttcaattgcttagggcctttaatcaaccccttaaggccaaaaatccagcttttaggcgtgtatgacaaatccttgtgtaagaccatggcgctagcgttgaaggctttaggcgttaaaagggcgatggtggttaatggaggggggacagatgaaatcgtgttgcatgacattacgcatgcgtgcgaattgaaaaataacgaaattttagagtatgatttgagcgctaaagattttgatttacccccctatgatttgaaagaattacagattgaaaacgccaaagaaagcgttcaagcgtgtttagatattttagaaaataaaggcaaagattcgcatacaatggtggttgcggcgaatgtggcgagtttgttgtatttgagccatagggctaaagatttaaaagagggcgtgagcatgactttagagcatttaaaaaccaaagcgccttatgcgcatttacaaaaaatcataaggctaagccatgcctag

SEQ ID NO: 22876 - DNA, 1660 bp, Helicobacter pylori
atgaaatttttaaaattctttgccagtagcgtaactctagatgaaaaatttttaatgttccttctttgcaacgctctttctaacgcttacaaaaatagcgatttgttttctttctctaaaggctttttaggcgcttttttaatcgggtttgtggtgtattatggttgcgcgctaatccctaaaaaacgcttgaaatattcattagaatggctgtttataggaagcggtattatttttagcgtggcagaaatttttacgctgtttatgtttaaaatgcctttttccaaaggcttgattgacacgcttttagccacaaacagctctgaaacgatggcgtttataaaaagctataaaaattatttgctttactacgctttgattttgatcgctttgttgatcgccattaaaatcattcgctttagagcgcttgtgcctggtgtgatagcgagcgttttagggctttctatccttacaatagggagcgttcgtaacattaaacaccttacaaagaacgatgcgattttaaaaagatcactcttttctctttctttagctagggggttttattccgcttatttgagtttgtttgatcgccaacaagccataaaattttatagctttttaaataatctttatttaccaagcgattatctttctagcacgggcgatatttcaaatgtcgtcttagtcatcggcgaaagcgcgagcagaaatttcatgcaactctatggctatagcgttcctaataatcccttatcgagcgaactcgccaacgagagagagagagagagagagtaacaacctgttcgtgttttctgacacgataagcaaagaagcccacacctctgatgtctttgaaagcctgctcaattatagcgatgctgaaacgactaaaccttggtatcattaccacaacatgatagatattttcaagcgatcccattatgaaactttttggttagaaaaacaaatcgtcgatgaatgggggatcacacaaaatctagtctctaatcgttctaaaaaccgctactatattttgggaaactatggtgcatacgatgaagagctagtgaaattttattctaaaaatgtccaaccccaattaaaaagcaagaattttatcgtgttccatttgcttggctctcattcttggtatgccgatcgtttccctaaaagctttgccaaattcaaaccaagcgatttgtctttttctaatttgcatgcaagcagcgatagagacaagcaaatcgtcgctgattatgtcaattcgctttattataacgactttgttttgaatggaatttttaacctctttaaagataaagacgctattgtgttttatttgagcgaccatgcgcaagatatttttgaaagcggccctacttatgggcatagctgttctaaagcgggattagaaatcccttttatgatttatgtgagcgatatttttaaagaaaaacaccccgagaaagtgaagttgattaaaaacgctttaaacaaacctttcatgagcgatgatttaatccattctcttttgcctttggtgggcattcacactaaagatgaaatagagagtaaaaacctttttagcccccaatttgacgcccaaagaaaaagggctgtttgttatggcagcatgaattatgataggactaaataa

SEQ ID NO: 22877 - DNA, 951 bp, Helicobacter pylori
atgcaagaattcagtttgtggtgcgattttatagaaagggattttttagaaaacgattttttaaagctcatcaataagggggctatttgcggggcgacgagtaaccctagtttgttttgcgaagcgatcacaaaaagcgcgttttatcaagatgaaatcgctaaactcaaaggcaaaaaagctaaagaaatttatgaaactctggcactaaaggatattttacaagcctctagcgcgttaatgcctttgtatgaaaaagaccctaacaacggctacatcagcctagaaattgacccctttttagaagacgatgcgattaaaagcattgatgaagccaagcggttattcaaaacattaaaccgccccaatgtgatgattaaagtcccggcgagtgaaagcgcttttgaagtcattagcgctctggctcaagcctctatccccattaatgtaactttagtcttttcgcctaaaattgccggtgaaatcgctcaaatcttagccaaagaagcacgaaaaagagcggtcattagcgtgtttgtctcacgatttgacaaagaaatagacccactagtgccacaaaatttgcaagctcaaagtgggatcatgaacgctaccgagtgttattatcaaatcaaccagcatgctaataagctaataagcaccctttttgcatccaccggcgttaaatctaattctttagctaaagattactacattaaagcgctgtgttttaaaaactctatcaacacagcccccctagacgccctaaacgcttatttgcttgacccaaacaccgagtgtcaaacccctttaaaaatcacagaaattgaagcgttcaaaaaagaattaaaaacgcacaatattgatttagaaaacaccgcccaaaaactccttaaagaaggcttgatagcgttcaaacaatcctttgaaaagcttttaagcagtttttga

SEQ ID NO: 22878 - DNA, 543 bp, Helicobacter pylori
atgctgctttgcgcgggaaggaatgagactttaaaaaaagcggtgcctattggtgtgggcttgatagagagcgcgatcaatttaacgagaatgtgccttaaaaaccctgatacagaaagccttatttttatagggagcgcggggagttatagcccagaaacggagattttgagcgtgtttgaaagcattgaaggctatcaaattgaagagagttttagccatttaaacagctacacgcctttggataatttcattcacatagaaactaaagagcaggctctttttgaaagggtgcgtgtgaatagcagtaactacatccacaccagcgaaatgtttgctaaaaaaatggttcaaaagggcgttttattagaaaacatggagttttttagcgtcttaagcgtggctaaaattttttctttaaaggctaaagggattttttgcgtgagcaatcatgtagggcttaacgcgcataaggaatttaaagaaaaccacgccaaagtcaaacagattctagaaaacatcattgatagtttgatagtttag

SEQ ID NO: 22879 - DNA, 207 bp, Klebsiella pneumoniae
tcggtgctgccgctggcgccggtgtcaccgtttgtgccgttgtttctcggttttctacagcgctaccggccggatgcccgcctcggcacctactactcgctggtgctcccttacccgctgatttttctcgccgtctggctgctgttgctggtgggctggtatctggtgggactgccgatcggccctggcatctatccgcggctgtct

SEQ ID NO: 22880 - DNA, 916 bp, Klebsiella pneumoniae
attttaggtttctttcagcgactgggtagggcgttgcagctccctatcgcagtgctgccggtcgcggcattgctgctgcgtttcgggcaaccagacctgttgaatgtacccttcatcgcgcaacggatggggcgatcttcgataatctggcgctgatcttcgcaattggtgtggcatcaagctggtccaaggataacgccggttctgcggcgctggccggtgcggtagggtatttcgtgatgaccaaagcgatggtcaccatcaacccggaaatcaatatgggcgtgctggccggtatcattaccggtctggtggcaggggcggtatacaaccgctgggccggcatcaagctgccggacttcctgagcttcttcggcggcaaacgcttcgtgccgatcgccaccggcttcttctgtctgatcctcgcggcgatcttcggctacgtctggccgccggtgcagcacgctatccactctggcggcgaatggatcgtctccgcaggcgcgctgggttccggtatctttggtttcatcaaccgtctgctgatcccaaccggtctgcatcaggtgctgaacaccatcgcctggttccagattggtgagttcactaacgccgctggcgctgtgttccacggcgacatcaaccgcttctacgccggcgacggaaccgcggggatgttcatgtccggcttcttcccaatcatgatgtttggtctgccgggtgcggcgctggcgatgtatctggcggcgcgaaagcgcgtcgtccgatggtaggcggtatgctgctgtccgtggccatcaccgcgttcctgaccggggtaaccgagccgctggaattcctgttcatgttcctggctccgctgctgtacctcctgcatgcggtgctgaccggtatcagcctgttcatcgcaacggcg

SEQ ID NO: 22881 - DNA, 381 bp, Klebsiella pneumoniae
tgctacaccctggtgacagaaacccaggtggattgcctcgccgccgcgctgggctccacccatggtctgtataaaggtaaagcccggctgggatttaccgagatgaaagccattgccgagcaggtgaaggttccgctggtgctgcatggcggcaccggtattgccgatgaggatatgcgccgggcgattgcctgcggcaccgccaagattaacgttaataccgaaaatatgtacgcctggtgccaacaggtgaaagcaattttcgccgccgacaccgggcacgatgtgaacgatccgcggaaagtcatcgcccagggactgcagccggtacgcgagatgattgcccgccgcatggcgctctttggctcagagcagcgctat

SEQ ID NO: 22882 - DNA, 219 bp, Klebsiella pneumoniae
gtccccggggtccgcgccgcacagtgtcacgataccttctccgccgagcgagcgcgtaaaagtaacaacgcgcagattattaccctcggcgcgcgggtgattggcgctgagctgtgcaaaaaaattattcaggcgtggcttgagtccgaatatgaaggcggcggatccgcgcccaaagtggaacgtattgattattacgaacaccagcatgccagagat

SEQ ID NO: 22883 - DNA, 1055 bp, Klebsiella pneumoniae
cgccagaccgtctacctgcgtgaagtgctcgacaacgccaagttccgtgataacccatctccgctcaccgtggtgctgggcaaagacatcgctggcgatccggtagtagccgatctggcgaaaatgccgcatctgctggtggccggtaccaccggttccggtaagtctgttggcgtcaacgccatgatcctcagcatgctctacaaggcgcagccggaagatgtgcgtttcattatgatcgacccgaaaatgctcgagctgtcggtctacgaaggaattccgcacctgctgacggaagtggtcaccgacatgaaagacgccgccaatgcgtgcgctggagcgtcaatgagatggagcgccgctacaagctgatgtcggcgctgggcgtgcgtaacctcgcgggctacaacgagaagatcgccgaagccgcgcgcatgggacgtccgatcccggatccgtactggaagcctggcgacagcatggacgccgtacatccggtgctggaaaaactgccgtacatcgtggtgctggtggatgaattcgccgatctgatgatgaccgtcgtgaaaaaggtggaagagctgatcgctcgcctggcgcagaaagcgcgcgcggcggggatccacctggtgctggcgacacagcgtccgtcggtagatgttattaccggcctgattaaggccaacatcccgacgcgcatcgcctttaccgtgtcgagtaaaattgactcacgtaccattctcgatcagggcggcgcggaatcgctgctgggtatgggggatatgctttactccgggccgaactctaccacgccggtgcgtgtccacggggcgtttgtgcgcgaccaggaagtccacgccgtggttcaggactggaaagcccgcggtcgcccgcaatatgtggatggcattacctccgacagcgaaagcgaaggcggcggtggcggcttcgatggcggggaagagctggatccgttgttcgatcaggcagtcaactttgtgaccgagaagccaaagcgtcgatttccggggttcagcgtcagttccgcatcggct

SEQ ID NO: 22884 - DNA, 504 bp, Klebsiella pneumoniae
agcgtcgaaaaaggctggcagcaggcctatgagaagctaaaggcgttcaataaaaacgtaactttcaccccgggcaacgccgggacgctcgatatgctgagccggggggaaatcgccatgggcccggtgtgggtcgatatgttctatagctggaaagatcagggcaagctgccgccgtcgatcaagcttgctttactggcgccgggcatgccgggccagccgatgtattacgtcatcccggcgaaggcggcgaatccgcagctggcgcgcgactttatcgcgctagccaccagcccggaagtgcaggcgcaggggatcgtcaagcagttcaactggtatccgggtatcgacgccgggcaggtgaagccgaagctggatgcggcgacctggcaaaagctgtttgccgaaatctcgccggaagcgctggcgaagtatggcaaaagcttcccgatcgccccctactttgacgatatcaaagagggttacgaaagccaggtggctaat

SEQ ID NO: 22885 - DNA, 659 bp, Klebsiella pneumoniae
  misc_feature (577)..(577): n=g, a, t or c
aggaggaagcagcagcagctgatcgtcatggaagaacgggccactatcgcccgcgagctgcacgattccatcgcccagtcgctatcctgtatgaagatgcaggttagctgtctgcagatgcaaggcgacgccttgccgacggagagccgccagctgctggggcagatccgtaacgaactgaatacctcgtgggcccagctgcgggagctgttaaccaccttccgcctgcagttgaccgagccggggctgcgcccggcgctggaggccagctgtcaggagtacagcgcccacttcggctttacggtgcagcttgattaccagctcccgccgcgctttgtgccctcgcatcaggcgatccacctgctgcagatcgctcgcgaagcgttgagcaacgctctgaagcatgccagcgcgaccgaagtgaccgtgacagtgtcacaacgcgataatcaggttcgtctggtggtagcggataacggccgcggcgtaccggaccacgcggaacggagtaaccattacggtttaattattatgcgggatcgcgcccagagcttgcgcggtgactgtcagtacaggnactcgggaaaccggtgggaacggaagtgatcgtcacgtttatcccggaaaacacgttttccatccaataaggagacccttca

SEQ ID NO: 22886 - DNA, 188 bp, Klebsiella pneumoniae
gagagtctgcagtttagcgcgcctgaatttggtgcaatagcctcagtggatgatgaaagcgccgcttggtcgcagggcattctgagcttcagcgataaacctttgagtgaagtgattgccacgctgagccgttatcgcaacggcgcgctgtgatgcgatccacggtggctttgttacgcctgactgta

SEQ ID NO: 22887 - DNA, 656 bp, Klebsiella pneumoniae
caggcagtgacccacaccctcgccaccggcccggtcaacgatctcgagctggcgctgttcccggatgagaccggcgggctgtcgctggaaatcctcgccaacaaggcccggtacgacgaagccgagctccgtcgccacatggcgcgactgaccgcgctgctggcgcagttcgccgccgatccgacgctgcgctgcggcgaagcagagatgctctccgccgacgagctggcccggctggcggcggtcaacgataccgctgtgccgctgcctgccaccaccctcagcgcgctggtggccgaccaggcgcggaagaccccggatgcgccggcgctggcggacgcccgctggcagttcagctatcgcgagatgcgtcagcaggtggtggcgctcgcgcagctgctgcgtcagcgcggcgtgaagcctggggacagcgtggcggtggccctgccgcgctcggtgttcctgaccctggcgctgcacggcattgtcgaagcgggggccgcctggctgccgctggacaccggctacccggacgaccgctgcggatgatgctggaagacgcccggccgtcgctgctgatcgccacggaggatcaactggcccgcttcagcgatattccggggctggaaagcctctgctaccagcagccgctggcc

SEQ ID NO: 22888 - DNA, 342 bp, Klebsiella pneumoniae
atgatcatcaacggtatgttctgggtgctgtgttcaggcgcatcatggcgcgatttgcgtgagcgatacggtccatggaagaccgttgaccaccgctttaaccgatggtcaaagacaggagtgattaacaatattttcaacaggttacttacgttacttaatgcaaacagccttattgactggtcagcgacagcgctgtatagcagtaatatccgtgcactcagatgtgcagccggtgctcaaaaaaacatcccgatatcgccggagataatgtgctgggtcgctctcgcggcggttttggcaccaaaatccacctgtcgacagacggaagcggtctgccgt

SEQ ID NO: 22889 - DNA, 825 bp, Klebsiella pneumoniae
atggtttcggaaactaaaaccacagaagcgcccacgctacgtcgtgaactgaaggcgcgccacttgaccatgatcgccatcggggttccatcggtacgggtctttttgttgcctctggcgcaaccatttcgcaagcaggtcccggcggggcgctgctgtcttatattctgatcggtttgatggtctatttcctgatgaccagcctcggcgagctggcggcgtttatgccggtatccggttccttcgccacctacgggcagaattatgttgaagaaggcttcggcttcgcgctgggctggaactactggtacaactgggcggtgacgatcgccgttgacctcgtggcctcacagctggtgatgagctactggttccctgacactccgggctggatctggagcgccttgttcctcggcatcatgttcctgctgaactggatctcggtgcgcggctttggcgaggcggaatactggttctcgctgataaaggtagccaccgtcattatctttatcatcgtcggcgtgatgatgattgtcggcatcttcaaaggggcgcagcagccggctggagcaactgggggatcgcggatggccgttcgccggcggtttctcggcgatgattggcgtggcgatgattgtcggcttctcgttccagggcaccgagcttatcggcatcgctgccggtgaatctgaaaatccggagaagaacattccgcgcgcggtgcgccaggtcttctggcgtatcctgctgttttacgtcttcgcgatcctgattatcagcctgatcattccgtataccgatccgagtctgctgcgcaatgatgtg

SEQ ID NO: 22890 - DNA, 802 bp, Klebsiella pneumoniae
atgcttgccacaaccgatctctggtttcgctatcaggatgagccggtacttaaagggctgacgctggatttttcccgccatgcggtgaccggcctggtgggggccaacggctgcggaaagtcgacgctgtttatgaacctgagcggcctgctgcgcccgcagcaggggcggtgctgtggcagggagaggcgctgaattacagcaagcgcggtctgctggcgctgcgccacaggtggcgacggtgtttcaggatccggatcagcaaatcttctataccgatatcgacagcgatatcgcttttagtctgcgtaacctcggggtggcggaagaggagatcgcccgccgggtggatgaggcgttgaccctcgtcgatgcccaggggtttcgccagcagccgatccagtgcctcagccatgggcagaaaaaacgggtggcaatcgccggggcgctggtgctgcaggcgcgctacctgctgcttgacgagcccaccgcgggcctcgacccacgcgggcgggcgcagatgatcgccatcatccgccgcattgtcgggcagggccggcatgtggtgatctccagccacgatatcgatctgatctatgaggtgagcgacgccgtttacgttctgcgtcacggcgaagtgctggccgcgggggatcccggcgaggtatttgcctgcgcggagacgatggaccgggcaggattgacccagccgtggctggtgaaacttcatagcgaactggggctgccgctgtgtaaaaccgaggcggagttttttcagcggatgcacaacaacgcgataggc

SEQ ID NO: 22891 - DNA, 579 bp, Klebsiella pneumoniae
caggcgcagcatatttcgctgaccaacttcctcgacagcggtctgtacaccagcctgaccgagcgcctggtcgcggcccagcgccacatcgacaacgaagtcaaagtcaccgatagcctgaaagacagctttgacgatactaacaacaacctgttccagctgggcgcggataacatcttcctcggtcgcaaagcagccaccaaagaagaagccattcgcttcgccggtgagcagctggtgaaaggcggctacgtcgagccggaatatgtgcaggcgatgctggatcgcgaaaaactgacctcgacctatctcggcgagtccatcgcggtaccgcacggcaccatcgaagcgaaggaccgcgtgctgaaaactggcgtcgtcttctgccagtacccggaaggcgtgcgcttcggtgaagaagaagatgaagtcgcgcgtctggtcatcggcatcgccgctcgtaataacgagcacattcaggttatcaccagtctgactaacgcgctggatgacgaaaccgtgattgagcgcctggcgaaaaccaccagcgtcgacgaagttctggcactgttaaataaa

SEQ ID NO: 22892 - DNA, 1079 bp, Klebsiella pneumoniae
atgtctgaacaacaagcacagggcgctgacgcggcaattgaccttaataatgaactgaaaacccgtcgcgagaagctggctgcgctgcgtgagcagggcgtcgctttcccgaacgatttccgtcgtgaccatacctctgaccaactgcacgctgacttcgatggcaaagaaaatgaagagctggaagcgctgaacgttgaagtggctgttgctggccgcatgatgacccgtcgtattatgggtaaagcgtctttcgttaccctgcaggacgttggcggccgtattcagctgtacgtggcgcgtgacgacctggcggaaggcgtttataacgaccagttcaaaaagtgggacctcggcgacatcatcgccgcccgcggtaagttgttcaagaccaaaaccggtgagctctctatccactgcaccgagctgcgtctgttgactaaagctctgcgcccgctgccggacaaattccacggcctgcaggatcaggaagcgcgttatcgccagcgttacctggacctgatctccaacgatgaatcccgcaagaccttcaaagtgcgttcgcagatcctggcaggcatccgtcagttcatggttggccgcggctttatggaagtagaaaccccgatgatgcaggtgatcccgggcggcgcttccgcgcgtccgttcatcacccatcataacgcgctggatctggacatgtacctgcgtatcgcgccggaactgtacctcaagcgtctggtggttggcggcttcgaacgcgtcttcgagatcaaccgtaacttccgtaacgaagggatctccgttcgtcataacccagagttcaccatgatggaactctacatggcctatgcggattataaagatctgatcgagctgaccgaatctctgttccgcaccctggcgcaggacatcctcggcaataccgaagtgccttacggcgaccaggtgttcgacttcggcaagccgtttgaaaaactgaccatgcgcgaagcatcaagaaataccgtccggaaaccgagatggcggatctggataactttgattccgcgaaagcgatcgctgaatctatcggcatc

SEQ ID NO: 22893 - DNA, 1085 bp, Klebsiella pneumoniae
accaaaaaactgttgcctttactgctactgtcggcgctctccgccgccgcgcatgccgccacgccgcccaacacgctggtggtcgcccagggtctcgacgatatcgtcagcctcgacccggcggaagcgaacgaactctccagcattcagacggtccccagcctctatcagcgtctggtgcagcccgaccgcaacaaccctgaaaaaatcgtaccgatcctcgccgaaagctggcaggccgatccggcggcgaaaaccctgaccattaaactgaagccggatgccaaattcgcctccggtaatccgctgcgcccggaagatgtgattttctcttacacccgcgcggtgacgctgaataaatcgccggcgtttattctcaacgtgctcggctggcagccggacaacatcgccagccagctgaaaaaggttgatgaccataccctgacgctgcactggaccgccgacgtcagcccggcggtggcgctgaatattctctccacccccatcgcctctatcgttgatgaaaaacaggtggcgccgaacgcgaaaaataatgacttcggcaacgactggctgaagatgcactcggcgggcagcggggcctataaaatgcgcgtctaccagccgcatcaggccatcgtgctggaggccaacgccagctcccccaccggcgcgccgaagatcaagagcatcattattaaaaacgtccccgacccgcttcccgccgcctgctgatccagcagggggatgccgacgtggcgcgcgatctcggcgctgaccagattgccgccctgcaggataaacccggcgtgaaggtgctgagcatcccgtccgccgagcagaactacctggtgtttaataccgccaacagcgccaacccgctgctcaataacccggccttctgggaggcggcgcgctggctggtcgattatgagggcatcaccaaaaatctgctgaaaggccagtactttattcaccaaagcttcctgccggccggcctgccgggggcgctggagactaatccgttcacctttgatccgcaaaaagctaaggctatcctcgataaagcgggcattaaggatgcc

SEQ ID NO: 22894 - DNA, 980 bp, Klebsiella pneumoniae
ctggcagcgatcgtgctggcgctggtgatcgctgtgggcgtcagcgttggcgagctggccatcccgctgcagaatgtcttttacgctatcagcaacagaaccggcttaaccgctgagccgctcaaccgtatctatgagagcgtaatctgggatttccgcctcagccgcgcgctggtcgccgcctgctgcggcgcaggcctcgctatctgcggcgtcgtgctgcaaagcctgctgaagaatgccctcgcggaaccctacgtcctcggcgtctccgccggggcctccaccggcgcggtgtcgatcgtggtgctgggccttggcgctggcgcaatttccctctcggcaggcgcctttgccggggccttcgctgccttcgcctttgtcgccttgctgactaacggcgcgcgcggcggcaatgagcgtacgattctggcgggcgttgccgcctcgcagttatttaacgccatcacggcttacaccatcagcacctccgccagcgcgcagcaggcgcgcgatgtgatgttctggctgctgggcagcttcagcggcgttcgctggcccgaattccagctggtcattgtggtggtgctcgcgggtctggcggtctgcctgtggtatgcccgggcgctggacgcgttcaccttcggcgacgatgccgccgcctcgctggggattgctgtgccgcgcgtggcctgatcctcttcaccactgcggcgctgatcaccgccaccatcgtcagcatggccggctcaatcggctttgttggcctggtggtgccgcacgtgatgcgtttcttctttggcccgctgcaccgaacgttgctgatcgccagcgcgctggcaggggcgatattgatggtactggcggacattgcgtcgcgcctgctgattgccccgcaaagtctgcccgttggggtagtaaccgccctggttggggtgcctttctttgccgtgattatctaccgctcaaggaataagtga

SEQ ID NO: 22895 - DNA, 1260 bp, Klebsiella pneumoniae
atggataaattccgtgttcaggggccgactcgccttcagggtgaagtcaccatctccggggcaaaaaacgccgccctgccaatcctcttttccgcgctgcttgccgaagagccggtagagatccaaaacgtacctaagctgaaagacatcgataccaccatgaagctgctgagccagctgggcgcgaaggtcgagcgcaatggttcggtatggattgacgccggcccggtcgatgtattctgtgctccgtacgatctggtgaaaaccatgcgcgcctctatctgggcgctgggcccgttggtggcgcgtttcggtcaggggcaagtttctctgcctggcggctgcgctatcggcgcgcgtccggtcgatctgcatattagcggtctggagcagctgggcgccgagatcaaactggaagaaggttatgtcaaagcctcggtcagcggtcgcctgaaaggcgcgcatattgtgatggataaggtgagcgtcggcgccaccgtaaccatcatgagcgcagcgacgcttgcggagggaacgacgattattgaaaacgccgctcgcgagccggagattgtcgataccgccaacttcctgaacgcgctgggcgcaaaaatcacaggccagggtagcgatcgcattaccatcgaaggcgtgcagcgcctgggcggcggcgtctaccgtgtgctgcctgaccgtattgaaaccgggactttcctggtggccgcggcgatttccggcggcaagatcctctgccgtaacgcgcagccggataccctggatgccgtactggcgaagtgcgcgacgccggggctgacatcgaaacgggcgaagactggatcagcctcgatatgcacggcaaccgtccgaaagcggtgcaacgtggtaccgcgccgcacccgggcttcccgaccgatatgcaggcccagttcacgctgcttaacctggtagcggaagggaccggcgtgatcaccgaaacgatctttgaaaaccgcttcatgcacattccggagctgatccgtatgggcgcgcacgcggagatcgagagcaataccgctatctgtcacggcgtgaagcagctttctggcgcgcaggtgatggcgaccgatttgcgcgcgtcggcgagcctggtgctggccggctgtatcgctgaagggaccaccatcgtcgatcgcatctatcatatcgatcgcggctatgagcgtatcgaagataaactgcagggcgctgggcgccaatattcaacgcgtgaagggcgagtaa

SEQ ID NO: 22896 - DNA, 771 bp, Klebsiella pneumoniae
atgcgttttaccgataaagtcgtcgtcatcaccggcgcggcgcagggcattggccgccagacggcggagcaggcggctgcagaaggcgcggctctgctgctcatcgatcgctcgtcatacgtccatgagctggcggcgacgctggcgcaatccggctgtctggtgctggcgctggaggcggatctggaagcgtgggaaagtaccgagcaggcgtttgccgccggggtcgctcattttggccgtatcgacgtgctgatcaacaacgttgggggcaccatctgggcgcgcccctttgccgaataccagccggatcagattgagaaagagatccgccgctcgctgttccccacgctgtggggctgccgcgcggcgctgccatggatgctgaagcagggcaaaggcagcatcgtcaacatttcgtcggtggcgacggcgggagtgaatcgggtgccgtactcggcggcgaaaggcggcgttaacgcgctgacccggtcgattgccatggagtacagcggcagcggtattcggattaacgccgtggccccgggcgggaccgaggcgccgccgcgcctgacgccgcgtaacgaagagcagccgagcgagcaggaaaaggcgtggtatcagcaggtcgtcgatcagacggtggcgagcagtctgctgcaccggtacggcacgctggcggaacaggcgaatgcgatcctgtttctcgccagcgatgaggccagctatatcaccggcgtgacgctgccggtagccggaggcgatctcggc

SEQ ID NO: 22897 - DNA, 626 bp, Klebsiella pneumoniae
atgtttgcacaacaacctcgttccgcgcccgcgcctttctatgaaaaggtgaagcaggcgatcagcgaaaagatccacagcggcgtctggcgaccgcatgaccgtatcccgtcggaagctgagctggtggcccagttcggcttcagccgaatgaccatcaatcgcgcgctgcgcgagtgacggacgaaggcctgctggtcaggctgcaaggggtgggaacctttgtcgccgagccgaaagggcagtcggcgctgttcgaggtgcgcagtattgccgcagaaattgtcgcccgtcaccatcagcaccgctgtgaggtactcctgctggaggagacccgggcggatcatattcaggcgacggcgctcagcgtcccggaaggcacccgcatctttcactcgctgatggtgcattacgaaaacgaggtgccggtgcaaatcgaagatcgctgcgtcaatgccgcagtggtaccggactatctgcatcaggactacaccgccaccacgccccatgattacctgtcgctgatcgcgccgttaaccgaagtgtaacatattgttgaagcggtgcaggccacggcggaagagtgcgcgctgctgcatattcacgcccacgatccgtgcctgcct

SEQ ID NO: 22898 - DNA, 579 bp, Klebsiella pneumoniae
atgatggccgaaatattcggtaaggacagcgggttatgtcgcggtaagggcgggtcgatgcacattgccgatctgtcgaaaggaatgctgggagcgaacgctatcgttgggggagcccctcccctggccatcggcgccgcgctaacggcaaagacgctaaaaaccggcaacgtcggtgtctcttttacgggcgatgggggttctaatcagggcctggtctttgaagccatcaatatggccgtcgtgctccagcttccagccgtctttattttcgagaataacggttacggcgaagggaccggtcacgactacgccgtgggcgggcgtgatatcgcccgacgcgccgctggcttcggcctgccggcagtgaccgtcgatggcaccgatttctttgccgtttatgaggcaacctcagaggcggtcaagcgtgcgcgagaaggcggtggcccaagcgtcattgaggccaaagccttccgctggcatggtcattttgagggcgatcccgcgctataccgcgcggaaggtgaagtgcaacgcctgcgtgaacaacatgatccgctaaagatttttaccgctaag

SEQ ID NO: 22899 - DNA, 932 bp, Klebsiella pneumoniae
atgaacgaactggtgcaaatactaaaaaatacccgccagcatctgatgaccggcgtgtcacatatgatccccttcgtggtctccggcgggatcctgctggcggtgtccgtcatgttgtatggcaaaggcgcggtacccgatgctgcctccgaccccaacctgaagaaactctttgatatcggcgtcgccgggctgacgttgatggtgccctttctcgccgcctacatcggctactccatttctgaccgcgccgcgctggccccctgcgccatcggcgcctgggtgggcaacagttttggcgccgggttcttcggcgcgctgatcgccggcatgattggcggcctggtggtctattacctgaaaaaaatccccgtacataaagttctgcgctcggtgatgccgattttcatcattcccatcgtcggcacctttatcaccgccgggatcatgatgtgggggcttggcgagccggttggcgcgctgaccgctaacctgaccggctggctgcaggggatgcgcgagggcagcatcgtggtgctggccatcattatgggtctgatgctggcctttgatatgggcggcccggtgaacaaagttgcctacgccttcatgctgatttgcgtttcgcagggcgtctacagcgtggtggctatcgccgccgtcggtatcgccgtaccgccgctgggcatggggctggcgacgctgattggccacaaatatttcaccgccgaagagcgggaaaccggcaaagccgcgctggtgatgggctgtgtcggcgtgaccgaaggggcgattccctttgccgccgcggattcctgcgcgtcattccggccaatatgattggcgccgccagcggctgcgtcaccgccgcgctgatgggcgcccagtgttacgccggctggggcgggcttatcgtgctgccggtggtccag

SEQ ID NO: 22900 - DNA, 603 bp, Klebsiella pneumoniae
atggcccagcatgacgaaaacgtcgtctggcatgcccaccctgtgacccaacagcagcgggaacagcatcacggccatcgcggcgtggtgctgtggtttaccggcctttcggggtcgggtaaatccaccgtcgccggggcgctggaggaggccctgcatgagcgcggcgtcagcacctatctgctggacggcgataacgtgcgccatggcctgtgcagcgacctgggattcagcgatgaggatcgcaaagagaacattcgccgcgtcggcgaagtggccaggctgatggtcgatgccgggctggtggtattgacggcatttatatctccgcaccgtgcggaacggcagatggtgcgcgagcgcctcggggaaggacgctttatcgaagtgttcgtcgataccccgctggccatctgcgaggcgcgggatccgaaaggattgtataagaaagcgcgggcaggggaattacgcaatttcaccggcatagactcggtctatgaggcacccgaaaaggccgaaattcatctggatggtgaacaattggtaacaaatttggtgcaccaactattagacctgctgcaacagagcgatattatcagatcc

SEQ ID NO: 22901 - DNA, 1275 bp, Klebsiella pneumoniae
atggataagatcgaagttcggggcgcccgcacccataatctcaaaaacatcaacctcgttatcccgcgcgacaaactcattgtcgtcaccgggctttccgggtctggcaaatcttcactcgctttcgacaccctgtatgccgaacgcagcgtcgctacgtcgaatcgctctccgcctatgcgcgacagttcctgtcgctgatggagaagccggacgtcgaccatatcgaagggctgtcgccggcgatttccatcgaacagaaatcaacctctcacaacccccgctcgacggtgggtactattaccgaaattcacgactatctgcgtctgctgtacgcccgcgtcggcgaaccgcgctgtccggatcacgacgtgccgctggcggcgcaaaccgtcagtcagatggtcgataatgtcctcgcccagccggaaggcctgcgcctgatgctgctggcgcccattattaaagagcgcaaaggcgagcacactaaaaccctggaaaacctcgccagtcagggctacatccgcgcgcggatcgacggcgaggtctgcgatctgtcggatccgccgaagctggagctgcagaagaagcacaccattgaggtagtcatcgaccgcttcaaggtgcgcgacgatctggcacagcgcctggccgagtcgtttgaaaccgcgctggagctctccggcgggaccgccattgtggctaatatggatgatgagaaagcggaagaactgctgttttccgccaacttcgcctgcccgatctgcggctacagcatgcgcgagctggagccgcgtctgttctcctttaacaacccggcgggcgcctgccgacctgcgacggcctcggcgtgcagcaatatttcgatcccgatcgcgtggtgcaaaatcccgagctgtcgctggcgggcggcgccatccgcggctgggatcggcgtaacttctactacttccagatgctgaagtcgctggcggacactataaattcgacgtcgaagcgccatggggcaccctcagcgccaacgtgcagaaagtggtgctgtacggttcaggtaaagaaagtattgaattcaaatacatgaacgaccgcggcgatacctcggtgcgccgccatccgttcgaaggcgtgctgcataacatggagcgccgttacaaagagacggaatccagcgcggtgcgcgaagagctggcgaagttcatcagcaaccgtccgtgcgccagctgcgacggcactcgtctgcgtcgcgaggcgcgccacgtgtttgtggaaaacacc

SEQ ID NO: 22902 - DNA, 1014 bp, Klebsiella pneumoniae
atggccgttaaatcactgaaaaaaggatatctggcgctggcggcttccatgctgctggtggcgcaggcgcaggcgacggagctgctgaacagctcctatgatgtctcccgcgagctgtttgccgcccttaacccgccttttgagcagcagtgggcgaaagacaatggcggggacaagctgaccatcaagcagtcgcatgccggttcatccaagcaggcgctggctattttgcagggcctgaaggcggacgtggtcacctacaaccaggtgacggacgtgcagatcctgcatgacaaaggcaacctgatcccggccgactggcaaagccgtctgccgaacaacagctcaccgttctattcgacgatgggtttcctggtgcgtaaaggcaatccgaaaaacattcatgactggaacgacctggttcgctctgacgttaagctgatcttcccgaatccgaaaacctcgggtaacgcccgatacacctacctggcggcatggggcgcggcggataaagctgatggcggcgataaagctaaaaccgaacagtttatgactcagtttctcaagaacgtcgaagtctttgacaccggcgggcgcggagcgaccaccaccttcgccgaacgcggcctcggcgatgtgctgattagcttcgaatcggaagtgaataatattcgcaagcagtatgaggcgcagggatttgaagtggttatcccgaaaaccaacattctggcggagttcccggtggcctgggtcgataaaaacgtcaaagccaatggcacggaaaaggcggcgaaagcctacctgaactggctctatacgccacaggcgcaaactatcattaccgactactactatcgggtaaacaacccgaaagtgatggatgctctgaaggataaattcccgcagaccgagctgttccgcgtggaagataagtttggctcctggcctgaggtaatgaaaacccacttcgccagcggcggcgaactggacaaactgctggcggcggggcgtaag

SEQ ID NO: 22903 - DNA, 1722 bp, Klebsiella pneumoniae
atgactttgccaactaaaacctcaaccttggatgtggctgcgcagtgcttccttaattccttggttcgtgaaaccaaagactggcggctgacggaataccagccaacccaattgatcatcccgctgggcgaacagcaggcgctccatttcagagtggcttatttctccccaacccagcatcaccgctttgaatttccggcgcgtctggtcacggcctccggcagtcaccccgtcgatttcgccaccctctcccggcttattgttgataagctccagcaccaactcttgctacccgcgaccagttgcgaaaccttccaccagcgcgtgatggaaagccacgcccatacgcagcaggcaattgatgcccgccatgactgggcagccctgcgtgaaaaagcgttgaactttggcgaggcggagcaggctctgctggtcgggcacgccttccacccggcgcctaagtctcatgaaccgtttaaccagcaggaggccgaacgctacctgccggacttcgcgccccacttcccgctgcggtggtttgcggtgaacaaaacgcagatcgccggtgaaagcctgcatctcaacctgcaacaacggttgacgcgatttgccgcagagaatgcgccgcagttactcaatgaattaagcgacaatcaatggctattcccgctgcacccgtggcagggggagtatctgttgcagcaggaatggtgccaggagcttgtcgctaaagggctgattaaagatttaggcgaggccggcgcgccgtggctaccgaccacctcttcccgctcgctatactgcgccaccagccgcgacatgatcaaattctccctgagcgtgcgcctgaccaactccgtccgtaccctgtcagtgaaagaagtgaagcgtggaatgcgcctggcgcgcctggcgcaaaccgacgactggcagacgctacaggcccgcttcccgactttccgggtgatgcaggaagacggttgggccgggctgcgcgatctccacggcaacatcatgcaggaaagcctgtttgccctgcgtgaaaacctgctggtggatcagccgcaaagccagactaacgtactggtctccctgacccaggccgcgccggatggcggtgattcgctgctggttgcggcggtaaaacgcctgagcgatcgcctcggcatcactgcgcaacaggccgcccacgcatgggtcgatgcttactgccatcaggtgctgaagccgctgtttacggctgaagcggattacggcctggtgctgctggcgcatcagcaaaatattctggttcagatgcttggggatctgccggtcgggcttatctaccgtgactgccagggcagcgcgtttatgcctcacgcggcaggctggctcgacacaattggcgaggcgcaggcggaaaacgtcttcacccgtgagcagttgctgcgctacttcccttattacctgctggttaactccacttttgccgtgaccgccgcgctgggcgctgccgggctggacagtgaagcgaatctgatggctcgcgtacgaacgttgctggctgaaatgcgtgatcaggtgactcataaaacctgtctcaactacgtgctggaaaatccgtactggaacgtaaaaggtaactttttctgttatctgaacgaccacaacgagaacaccatcgtcgatccctcggtgatctacttcgatttcgccaacccgctgctggctcaggagggt

SEQ ID NO: 22904 - DNA, 945 bp, Klebsiella pneumoniae
atgcgcagagtgacgatattggtattattcctgctggtttcactgacctgggggaccacatggctggctatgcggatagccgctgaaactatccctccggtgtttgcaaccgggatgaggtttatgtttgcagctccattcttaatcggcattgcatggttaagaaaaacaccgcttttatttccacgcggacaacgcttgttccagcttgtaatttgtattttttattttgccattcctttctcattaatgatttatggtgaaacatatgtcagctccgggcttgcctccattatattttcaaacatgcctgtggctgttttgattgcatcagttttgtttttgaatgaaaaaacaaactcaatgcagattgcgggtttaactatcgcaatagtggcactggcgggcattcttctcgaagaaacgaaaacaagcacagagacccaatggcagggaatcattgcgcttgtttcagccgtaatcatccatgccataatatatactcaatgcaagaaaagaagctgtgctgtctctgttataacgtttaatgcgctcccgtgctttctggcaggattgttactttctgcggcaggatggttcttcgaaagaccactggtgtcagccttctcagcacactcaatattagctaccctgtatctcggtgcttttgccggggtttttgggatattgtgctactttgcacttcagcaaaaggccagtgcctttcaggcttcacttgtattccttatttttcctctgattgcggtaagcctggaaagctatgtatatggatatgcaatttcaactcaatcaatgctctttattataccgttagttgccgggatatttcttactcttttctcacggcgagtgtctgcaaccaacaaacatcgggattgctcaccacaaacaaataatggtattcatgagcatactgagacttcc

SEQ ID NO: 22905 - DNA, 2847 bp, Klebsiella pneumoniae
atgcttgagatatatgccattgctggcggcgactggttacggggcaacctgaacgcgattgcggcgtttatggggaccagcacatggtcgactatagaaaagatgtgtatcgccatctcggtactcattgtggcggggaactgggtaaaaaaacacaacgtaatggaccttattggctgggtcttttccctcaccctggtctctatgctggttgtcattcgtacccctgtgcagatcatcgattacagtaacgttgcgcaggtctatgaagtcgataatgtgcctattggtctggcgattccggcgtcgctgacaacacgggcaggaaacgcgcttatccagagttatgagatggtcttcgctctgccggacagtgtcacgtacagtaaaacggggatgttatttggcagtaatctggtcgcgaaaagtacggattttttgtcacaaaatcctcagattacgacgctgttttccgattacgtacaaaactgtgtgatgggcgatattttcctcaatcataagtactcttttgaggaattactgaattcacctgatccgtataccctgatttttgcaaacccgagtccactgcgtggcgtgtttgacaaaaacaaccagttccagacatgcgaggaggcctcacgggatctgaaatcggctctcgtgctggatactcagacaggcggtaaaacctggaactactatgttcgtcagctgtttggcggcaaacctaatcccgatctgcttttcagccagatgattggcgacagctacaattacttctacagctcgggacagagcgccgggcagattatccgccagaacgtcacgatgaacgccctgcgcagtgggatccagagttatgcggcccgcagcggggacaccgccagtctggtcaatatggctaacacatcatcccttgaaaagcagcggctggcacaggccacaatggggcaccaggcgcttcgcacacttccgctgatgcagaccgttatcatggggataatgattgggatgttcccgatcatggtgatggccgccatgtttaatatgatgactctgcaggtgctaaaggggtatgtgtttgcgcttatctggctgcagacgtggccattactgttcgccatcctgaacagcgcaatggcctactatgcgaagcaaaatggcgtcccagtcgttctctctgagttgtcgcaggttcagctcaaaaactcggatattgcgaccaccgcgggctatattgccgtgatgataccgcctttgtcgtgggggatcgtgaagagcatgggagcagccttctccagtgcctacagccatttttcttcatcggggctcagtgcaacatcgcaggctgcctccggcgtggtggacggcaattactctttcgccaacatgcagatggagaacgtcagcggctacagctggggtaccaacagtacaaccagtttcggacagatgtcacggcagctggcgaatgggggcatgagcacgcagacgagggatggatcgatggtctgggacagtggtggtgcaatgtcaaaactgccggtggatatcaacgtcggtcgtcagatagccagtgcgcagcaacagatggcccgtgaggctgatgtccaggccgaaagcgcgctgcatggctataacagcagcgtgacaagtgcctggaatagtctgcagcaatttggtaccaataaagggaacagcgcctcaacaacgaccggagctgatactaccgagtcttcgcaggactcgatggccagaagcaagatgtggaatgcggttgttgctaatgcgaaagccaacaacatcagtaatgaggagtctttccagcagttgatggatgattcagctaaaagtacgcagggcgttgatttatacggatctggtaagtggagttcaggggatcagctgtttggtaagctaggtaaatggggaactgggttatctgctgaggccggagttaaaggcagtgcgggttggacccacagctcgggtaacacagataatgttggcacttccggtcgtgaatcgaatgacagccgacatgataccagtagtcaggcggccaaagactttaaggaagcatccgattactttaccagccgcaaaaccaccacatcgggcaacattaccgataataatgccagctcgcgtgttgaccagtttgccgcgtcactctccagtgccaaaaacagctatgaccagtatacaagcagccggacacgcagccatgagtacagtgagatggcgtcacgcacagagagcatgactggccagatgaacgaaaacctgactcagcagtttgcgaactttgttcagcatcgtgctccacaggatgcagaggccattctgaccaataccagttctcctgaaattgcggcgcagcgtgaagccctggcgcgtgaattcgtcaaagagcaggtagaacccagggttgatgctgcgtatcaacagggtcgtgaaagcattggacagaatatggctggggtgtcaggtggtggtgacaatggatcggtaatggccgactaccgacaaaattctggtcgtatcgatgctatgacgcaagatgcgggtattaaggataatgtggatcagaaagttggtgggatgattacagagaataaacaacagcagcaggaaacccgcgaaaacatacaacggcaaggcgcagaggtgaaaaatgagaatactgaaatggaaaaggaccataaaacaaaagcaaatgagtttaaaggtgattataatgaaagaaagagtaaggtgaaatctttaccaggagctgactcgcctactgagttagaggcaaaagcggcgaaaattcaaaaggattatcttgatggtaaaagg

SEQ ID NO: 22906 - DNA, 380 bp, Klebsiella pneumoniae
ggcaactacttcgatcgcgcggaatatattcgctggaaggcgtttcgcgaaactgacgatgcccgctacatcggcctggtgatgccgcgcgtgctgggtcgtctgccgtacggcccggacaccgtgccggtgcgcacttcaactatgtcgagcaggtgaagggcccggaccacgaaaaatatctctggaccagcgcggcgttctccttcgcatccaatatggtgaagagctttgttaacaacggctggtgcgtgcaaattcgcggtccgcaggccggcggcgcggtgaaagatctgcccatccacctgtacgatctgggcaccggcaaccaggtgaagatcccttccgaagtgatgatcccggagacgcgggagtttgag

SEQ ID NO: 22907 - DNA, 386 bp, Klebsiella pneumoniae
atgctggataaaattgtcatcgctaaccgtggcgagatcgcactgcgcatcctgcgtgcctgtaaagaactgggcatcaagactgtcgctgtgcactctactgcggatcgcgatctaaaacacgtattgttagcggatgagacggtctgcatcggtccggctccgtccgtaaaaagctatctgaacattccggccattatcagcgccgctgagatcactggcgcggtagcgattcacccgggttatggcttcctctctgagaacgctaattttgctgagcaggttgagcgttccggctttatcttcatcggcccgaaagccgacactattcggctgatgggcgacaaagtgtccgccatcaccgccatgaagaaactggcgttccg

SEQ ID NO: 22908 - DNA, 496 bp, Klebsiella pneumoniae
ttgggcagaaaagtaaaccatcatcaaaaaccgatggaagggaaaactatgcgtattggtgtaccacaagaaaggctagcccaggagacccgggccgccgccacgccgaagaccgttgagcaattgctcaaactcggctttagcgtcgcggtagaaagcggcgccgggaagctggccagctttgacgatgaggcctttgccgaggcaggagctgaaatcgtgaccggcgacgaggtatggcagtctgatgtcatccttaaggtcaatgctccgaatgacgatgaaattgccctgctgaatccggggaccacgctgattagttttatctggccggcgcaaaacccgcagctgatggaaaaactggcggcccgtaatatcaacgtaatggcgatggattccgtgccgcgtatttcccgcgcccagtcgctggatgcgctcagctcaatggccaacatcgccgggtaccgcgctatcgttgaagcggcgcatgaatttg

SEQ ID NO: 22909 - DNA, 399 bp, Klebsiella pneumoniae
atcgcccccaccggcggccagctggggcagatctcggtgcgtcttggcgcctatgtcagcgccggaacccatctgacctcgctggttccgccgcagcactgggtgattgccaacctcaaagagacccagttggccgaagtacgcgttggccagccggtcaccttcaccgtagacgcgctcaacggcgagaccttccacggcaaggtgcagagtatctccccggcgaccggggtggagttcagcgccatctctccggacaacgccaccggcaatttcgtcaagatcgcccagcgcatcccggtgcgtattacggtcaacgacgggcaaaacaacagcgaacgcctgcggccggggatgtcggtgcaggtgactattgatacccgtgcggagaaacaacca

SEQ ID NO: 22910 - DNA, 448 bp, Klebsiella pneumoniae
aagcatctcccggcggccggcgaaatcgtgattttcgatcgcagctggtataaccgcgccggcgtcgaacgggtgatgggcttttgtacgccggaggaggtgcagaagttcctcgacggcgcgccgatggtggagcgcggcatggtcgaatcgggcattattctgctcaagtactggctggaggtctctccgcaggagcaggagcgccgtctgcgggatcgcatcgacgacgggcgtaaaatctggaagctctcgccgatggacattaagtctttcaaccgctgggatgaatatactgctgcccgcgacgccatgttcgccgccaccgataccgcctgggcgccgtggttcgtcgcccgctcggaggataaaaagcgcgtgcgtctgaatatcatcacccatctgctgtcgcagatcccctatgaagctttaccggtggagcctgtga

SEQ ID NO: 22911 - DNA, 572 bp, Klebsiella pneumoniae
atgcgtaactttgtgtttttgttaagtctattggggactcctatgaccgtaggaattaataccgaagcaattaatcataagaatactccctttaccatgtatgatttagggtgggtggtgctttgcatcggagctgccattggctccggaatcgtctttttcccattacaggttggattaaaaggggtgtgggtctttgccctggccgttatcctgggctatccggcagtttattacatgcagaagctgttcatcgaaacgatggcgcgcagcattgagcaagattcctacctgagtattattaccagctacgttggcagccgctggggcgtactgcttggcgcgctttactccttcaccatgctgaagtcgatcgtggagtatgctcttgccattaccaacgacagcgcctcgtatctgaaaacctttggccttactaaccagacgttatccgaacactggtggtggtctctgctgttaatcgccgggctttctctggtcgcgtcgaaaggagaaaagctgctctgcaaagtttcaggcagcatgatcgtcgtaaagctggtgatcatcgt

SEQ ID NO: 22912 - DNA, 673 bp, Klebsiella pneumoniae
atgaatcatctcccccactggtggcaaaacggcgttatttatcaaatcctaccgaagagttttcaggataccaccggcagcggtaccggcgacctgcgcggcgtcacctcccgcctcgactatctgcaaaagcttggggtcgacgccatctggctgacgccgttctacgtctcaccgcagggagtaacggctacgacgtggcgaactacaccgccatcgatccctcctacggcacgatggccgactttgacgccctggtggcggaggcgaaggcccgcggcatccgtatcgtgctggatatggtgctgaaccacacgtcgaccgaacatgaatggttccgtcagtcgctgaataaggagagtccctaccgccagttctatatctggcgcgatggcgaaccggacgccctgccgaacaactggcgctccaaatttggcggtaacccctggcagtggcacgccgacagcgggcagtattatctgcacctgttcgccattgagcaggcggatctcaactgggagaatccggcggtgcgcgccgagctgaaaaaggtctgcgaattctgggctgaccgcggcgtcgacggtctgcgcctcgacgtggtcaacctgatctcaaaagaccagacctttccctgcgatctggacggggatggccgcgcttctataccgac

SEQ ID NO: 22913 - DNA, 2474 bp, Klebsiella pneumoniae
gaataccacgcagagctttcaaataagctggatttgacggagaaagggctcaatcaggtcagcaatgaaatgcgtatgggggccatttccgcagggcagtttaaaatgccatgcggttactccccgcgcagttgaatgataatgctgttggcctggctggtggtatgcctttgttcactatcttcatgcaacagggttcgcagatcgccgattcgtttggcggttggggtaatctgttcgagatcataaaacagcaactgctgggggccggagatgccgccgatgaatcaagcgattccctgtcagataacgctaactcattgtctgaaaatgcagagaatgccaaaaaactgactggatttctgaatcccatgactatcgggatcggcgctcttgtcgcagttgtgggtactctcacatatgcctggtacaaaggcagccaggagcaacaggagttcaataagtcccttgtcctgaccgggaatattgccggggtaaccaccgggcaattggcagacatggcgagatcggtcgcagataatacagggaataccacagccgctgccgctcaggcactaaaccgtgttgtctctggtggtaaaatcgctacaggttcaatgcagactgtcacagaggccgttgtcgcaatgaatgatgcgaccgatgaatctatcgatagcatggtggcagacttcgagaaaatcgcacaaaacccggtagctgctattggagaactgaacgacaaatatcacttcctaacactggcaacctataaccagattaaagcgcttcaggacgagggtaatcagcaggaagccgccaggctggcgactgaagcatatgctgcaactatgaagcagcgtgcagatgagattactgaaagtttgggtaccttgcagtcagcatggaaatggctcggcgatgaggccaaaggtgcatgggatgcaatgctcaacattgggcgtgaaaagagccttgaatcccagcttgaagaggcagaaaaagccttagaaaacgcacagcgaagccgcggaataggtaatggtctgtggaatacctatggagttaactatcagggcagtgataacgcgatcgcgcaagctcaggcgcaggttgattctctgagggggcagattacagctcagggtgtgctgaatgacgctattagcacctataacaagcggcaacaaaaaggcgttgatgcaatgcggcgactggatgcacaagcagaccggatggcatctaatgagagcaaacgcaagaaagagcttgctcaattagacagggatcttgcagacgccagggctgcggggagggcaataagcgctgaggatgaggcagcaaggcgcaaagagataaacgagaagtacaaagatccaaaaacacccaaggggaaatcatatacagaggatgccgcaacccggctgcttgatcagataaaccagcagactgccgcgatgcagtcacaactggatgccagtgacaagcttaacagcgcgacacaggcacggatcaagttcgagcagcagattgctgacctcaaatctaaaacgcagctcacagccgaccagaagtcgatcctttcccgttcagatgaaatcctccaggcatataagcagcaggaggcactgcaaaattccgtcaaaaccctggacgattaccggaagatgcaggaacaggtaaagacgaaggatgagcggaccaacgatctgcttaaaacccgtcttgaactgctggagaaagccaaagcaaccgggcaactgaaacccggtgaatatgaaaaaacgcgggcagatatttatcaaaacaccgatatgcaactgccctcgacggttcgtaatgttgtgggtaataccacgccgaccggcggccagctatctggcacttttggcggaatgcaacagcaatatagccagctcgatcaggcgcaaaaagatttggatgcctggcttgcccggaaggaagaggcttacaaaaaggctggtgcaatcaccgttgagggtgaagcgaggatgcaaaaaactcgcgccgatgctgcaaacgctgctgcggttatagaggcccaaaaaaacgccatcattaccagcactacgcaaagcatgatggacagtggattaagtattctggccgatggttttggtcagcaatccggtatctacaaagcagcgttcgcagccagtaaagcctatgcgatcgcacagtctatggtggcaatcaatgcgggtatcgcacaggccgcaagtctgccttttccggcaaatttgatggctatggcatcggttgccatggagaccgccagtattgtctctaacataaaagcggttgctgatactggcttcgcctccggcggttacaccggccccggtggtaagtatcagcccgcgggtattgttcacaaaggcgagtacgtcttcgaccaggcgtcaacgaaccggatcggcgtgtctcagcttgaggcacttcgaaatggccaa

SEQ ID NO: 22914 - DNA, 363 bp, Klebsiella pneumoniae
gacccacgctcgccgcagaaatgatcgacgaagcggtcgcggcggcgaacaatccgatgtggtggtcgccgtggtgggcgaggcgcagggcatggcgcatgaggcctccagccggaccgatatcaccctgccgcagagccagcgcaatctgattgccgctcttaaagccaccggcaaaccgctggtgctggtgctgatgaacgggcgtccgctggcgctggtgaaagaggatcagcaagccgatgcgctgctggagacctggtttgccggcaccgaaggcggccacgcgatcgcccgacgtgctgtttggcgactacaacccgtcgggcaaagctgccggatgtctttcccgggctgcggtgg

SEQ ID NO: 22915 - DNA, 298 bp, Klebsiella pneumoniae
gcccaggccaggcagatcaccgccctgctgccgctgttaacggaaaactacgatctgagtaacgatgtgttgtataccgcgcaaaaacgcgggtcggtgctgctcaacgctatgctcgacggcgtcaaaccggactcgaatccgaacgtacgctggctgctgctggtggcccatgacaccaatatcgccatggtgcgcacgctgatgaactttagctggcagctgccgggctacagccggggaaatatcccgccgggcagcagcctggtgctggagcgctggcgcaacgcgaagagcg

SEQ ID NO: 22916 - DNA, 882 bp, Klebsiella pneumoniae
ctaccggatattcagtccactaagggtgacggtgagggagagtcattatcctgggttggcatggagcaaattgacctgccgatagacatcgcaggtaggccggtatcagcaaaggtcaatgccggcataaaccttctcagttcacctgaagctgaaaaggggatccatatgtctcgcctttatcttcttctggacgaactgacacaaggggaaatcacaccggcattattgcaacatgtgctgaaagatttctggtatctcatcagggacgtagtgatgaagccagtattgagatttcaggggatttgttactgtcgcgtaagtcgttaaattctaatcactccggctggaaagcttatcctctgactctgagcgccgaactcaggcaatcttttacggttaccctcaaagtgggtatcccttattcgtcaacctgcccggcttccgctgcacttagccgccacgtcgcgggtttgcagtttagcaaagactttggtaaccggatcgacaggctcccggcagcagaaatagccgactggcttgttgagaaaggaatgccggcaaccccgcacagccagcgaagctggcatgggtggatatccgtcttaatcctgaagcaaaatcactgcctgtgcttgagctgattgattatgctgaagttgctctcgggacagccgtgcaaacggtcgtcaagcggagatcgaacaggcttttgcagtggctaacggtcaaaatctgatgttttgcgaagatgctgcccgtcggctcaataatgtttttcgttgtgcatccttttgtgaagcatttgatatcagggttgaacatcaggaaagcctgcatccccataatgccgttgcccgtattcactggaaaggaagtaaa

SEQ ID NO: 22917 - DNA, 465 bp, Klebsiella pneumoniae
aaagtagagaaagataagttatcttctaaagtagtagagcttactgaacaaacttcattaaaagatgaagaaataaatgaactcaaggaagagcttgaaaaagaaaggactgaaaaagaagagtttgttgataaaaataatgaattgtattttaaaaacactgaacttgaaaaggaaaaagaagagttagcgaaagaggttaaaacgcttgaggacgaaaatatagcgttagaaaaagagaataccactcttactgaaaaagtttctgctcttgaagagaaaaacactaaacttgaagaagaattggaaactcttgatgctaatactacgcgagagattaataatttaaaaggtcaggttgaatctcttaatggtcaacttgagcaaaaagatattactcatgctgctgataaagaagctgctttagcagagttgagaaaagaacttagtgaagcgtttgaatac

SEQ ID NO: 22918 - DNA, 459 bp, Klebsiella pneumoniae
atgcgagcagggtggcccactgctcaacccacggattggagacgctctccggctccgggtcttcgctggcgtcaatcttcagcatctcgccggatgcttcgcgccctgctcctgcagcagctgatcgaacttcaggccgccgccgcaaaagttggcataggtgctgtcgccgagcgcgataatgccgtaccgcaggtgaggctgatacatatctttgatgccctcatacagcgggacgatgctgtccggcagatcgccctgcccggtggtggaggtgaccaccagcacatacttacccgtgtaggattcccagtcgttgacctgcggatcctcatacacggtagccttgtgtcccagtccgctgaggatcgcttccgcttcttccgcgaccagcagcgagttgccgtacatggtgccgacaaaaattccgacttccgccatgctattatctccctggat

SEQ ID NO: 22919 - DNA, 492 bp, Klebsiella pneumoniae
ttgctctatgcgctgatgcaggactttcagcgcctgatcgcgctcaatcggcacgtcccgcaggccaaagttggccatgcagaggttatcgctgccgatgagaaagatgcggttaaggtcgtaggcggcagtaaaattatcccgccagtagcgcataaaccatgccagcgactgcagcgaattacgccaggtggcgctcatcgcgctgcagtcggaatcggggtacaggggttcaaagttgggcaccgccatatcgccgttttgcccttgcgctaccgcgtcccctgccgacaagcggttaccggcgacatacttcagctctttcattacgtccgcggtacgctggatatagcgctgggcctgatcggcgttgagattaagctcctgatggatttcggcttcccgctcgtgcagcgcgttgacgatataaaacacagagacaaacgcaataagcagccacagcaataccgccagcgctctgaacagataacg

SEQ ID NO: 22920 - DNA, 363 bp, Klebsiella pneumoniae
gtgagaaactttgtgttgtacgtgcagaagttacagaaccatcagacccatcagaaccgtcagacccgtcagagtcatcagagccgtcagagccgtcagagtcatcagagccatcagagccgtcagagtcatcagagccgtcagagtcatcagagccgtcagagtcatcagagccgtcagagccgtcagagccgtcagagtcatcagagtcatcagagtcatcagagccgtcagagtcatcagagccgtcagagtcatcagtgccgtcagagtcatctaatcggttttgttcttctttatcttttagatcatcacgtaacttttctagttcttcatatagtttcaatcctaactcacatgcca

SEQ ID NO: 22921 - DNA, 882 bp, Klebsiella pneumoniae
gtggcgtacaaacgcggcgatgatgtccttcaggttcatgatcttcggctgaccatggtgcagagctaccatgttgatgccgaaggagacctgcagctgggtctgggaatagaggttgttaagcaccacttcccctaccgcatcgcgcttcacttcaatcacgatgcgcatcccgtctttatcagactcgtcacgcagcgcgctgatgccttccacgcgtttttctttgaccagctcggcgattttctcgatcaggcgcgctttgttcacctgatacggaatttcgtgcacgatgatggtttcgcggccggatttcgcgtccacttccacttccgcgcgcgcgcgaatgtacactttaccgcgaccggtgcggtaggcctcttcgatgccgcgacggccattgataatggcggcggtcgggaaatcagggccaggaatatgcgccatcagcccttcaatgctgatgtcttcatcgtcaacatacgccagacagccgttaatcacttccgtcaggttatgcggcggtatgttggtggccatccctacggcgatcccggaggcgccgttcaccagcaggttaggaattttggtcggcatgacgtccggaatacgctccgtaccgtcatagttgtcgacgaaatcgaccgtctctttttcaagatcggccatcagctcatgagcgattttcgccagacgaatttcggtataacgcatcgccgcggcggagtcgccgtcgatggaaccaaagttaccctggccgtccaccagcatgtaacgcagcgagaacgctgcgccatacgcacgatggtgtcgtataccgcggagtcgccgtgcgggtggtatttaccgattacgtcaccaacgacacgggctgatttttta

SEQ ID NO: 22922 - DNA, 867 bp, Klebsiella pneumoniae
ttggccgttggccttcagcgtggccagggcggccttgatcgcctccgccagctcggtgttgcctttggcgacgtagatccccagcggcagcgggtagaccaggcgcgtagagcttatcgccaggcggccgcggctcttgtcgacgatgatctgcgctgccggggcaatctcaagctgagcgccgatgttcttcgacagcagcgcctgcgaggcttccggcgccgtcgggaactcctgaatggtgatggccggtttgccgtttttcaggcaccactcatcggagtgttttttcaggctggtcacccaggtggtgcccgcctgcagaccgaccttcacaccgcacagctcatcttcggttttcggctgcaccgcgccgcccttcagggcgatgatcgacgcgccggagagggcgtaagggatggcgtcggcctgtttctggcgctccggcgtcacgtacatcccggagatcaccgcgtcatatttcttgccgatgccgaggatcaggctggtgaacttggtgtcgatcagctgcggtttggcctgcagatgttgggcgatcagcgcggcaaactccgggtcgagaccgacgatattgttattgctgtcataggactcaaacggcgggtaggtgacctccattcccaccttaaagacgccctcggtcagcagttccgccgcctgggtgacaggggaaaaacaggcgctgacggcgagggtaagcgcgacatggcgcgagatttttttcagggtgctagtcatcatggatcctcacgggtggttaggggtttttttgctgagcctgttttttcaaatggccaaacgtattggtgccgcgcgcgcgctccggtagctgaagttcaccgcgat

SEQ ID NO: 22923 - DNA, 534 bp, Klebsiella pneumoniae
atgcacactctttcttttcaacaaagtaccggattcaacgccggcgctctgataaagcgatatcagccgatagtggcagagcacgacaacattcgctccgccgttcgcgcctgggcagcggctgaaggtcaggatgttgtatctgcgtacatcgtcgatgagtggcgacagcagggcggcgaggagatcgcgtttcctgatgacatcagccgagcccgacaaaagctttttcgctacctggacaacccggccgagtctgagcgctatcgcgagtacgttcgccttcttacaccggcgatcatggccgttcttcccctggaataccgccaccgtctattgcccgtagacagttttatgtcccgtctggctcgtctggaaaaagaaaccagcgaagcaaaggttgccgttgctatgggggcaccacgccatcagaagctgaaagaactgagcgagggaatagtcgagatgttccgcatagacccggagttaacagcgccactgatggccattgtcacttcaatgctgggagctctg

SEQ ID NO: 22924 - DNA, 1656 bp, Klebsiella pneumoniae
gtgactatgtcgactaaaccgtttgtttatcaggatccgtttccgctggcgcacgacgatacggaatactatctgctcagcaaagagcacgtctccgtcgccgaatttgacggccagcaggtcctgaaagtagagccgcaggcgctgaccctgctcgctcagcaggccttccacgacgccgcctttatgctgcgcgtctcccatcagcaacaggtcgcctcgattttgctcgacccggaagccagcgataacgataaatatgtcgccctgcagttcctgcgcaactcggaaattgccgccaagggcgtgctgccgacctgccaggataccggcaccgcgattatcatggggaaaaaaggccagcgcgtctggaccggcggcggcgatgaagccgccctggcgcagggggtgtacaacacctataccgaagataacctgcgctactcacagaacgcgccgctggatatgtataaagaggttaacaccggcaccaacctgccggcgcagatcgatctctacagcgtcgacggtgaagaatataagttcctgtgcatggcgaaaggcggcggttccgccaacaaaacctatctgtaccaggagaccaaggccctgatcaccccggcgaagctgaaaaactacctcgttgagaagatgcgcactctcggcaccgccgcctgcccgccgtaccacatcgcgtttgtgatcggcggcacctcggcggaagcgacgctgaagaccgtgaaactggcctcgacccgctattacgacggtctgccgaccgaaggtaacgaacacggtcaggcgttccgcgacgtgcaactggagcaggagttgctgcaggaagcgcagaacctcggcctcggcgcgcagttcggcgggaaatacttcgcccacgatatccgggtgatccgcctgccgcgccacggcgcctcctgtccgatcggcatgggtgtctcctgctccgccgaccgcaatatcaaagccaaaattaaccgcgacggtatctggatcgagaagctggagagcaatccgggaaaatatattcctgaacatctgcgtcaggccggcgaaggcgaagtggtaagcatcaacctgaatcagccgatgagcgagatcctggcgcagctgtcggcacatccggtctccacccgcctgagccttaacggcaccattatcgtggcccgcgacatcgcccacgccaagctgaaggagcttatcgacaacggcgaggcgctgccgcagtacgtcaaagatcacccgatctactacgcgggcccggcaaaaacgccagccggttacgcttccggctccctcggcccaaccactgccggccgcatggactcttacgttgatctgctgcagtcccacggcgcgagcatggtgatgctggcgaaaggcaaccgcagccagcaggtgaccgatgcctgccataaacacggcggcttctaccttggaagcatcggcggcccggcggcagtgctcgcccagcagagtatcaagagcctcgagtgcgtggcctatccggaactggggatggaagctatctggaaaatcgaagtggaagattttccggcgtttatcctcgtcgatgataaaggcaacgacttcttccagcagatccagaataagcagtgcgcgggctgtaaacagcacggc

SEQ ID NO: 22925 - DNA, 372 bp, Klebsiella pneumoniae
atggcaacaattaaccagctggtacgcaaaccacgcgcgcgcaaagttgcaaagagcaacgtgccagcgctggaagcctgcccgcagaaacgtggcgtatgtactcgcgtatataccaccactcctaagaaaccgaactccgcactgcgtaaagtttgccgtgtgcgtctgactaacggtttcgaagtcacctcctacatcggtggtgaaggtcacaacctgcaggagcactccgtgatcctgatccgtggcggtcgtgttaaagaccttccgggtgttcgttaccacaccgttcgtggtgcgcttgactgctccggcgttaaagaccgtaagcaggctcgctccaagtacggcgtgaagcgtcctaaggct

SEQ ID NO: 22926 - DNA, 3114 bp, Klebsiella pneumoniae
atgccgcactttttcattgagcgccccatcttcgcatgggttattgccctgtttattgttctgacgggactgttttccatacctcgtttaccggttgcgcaataccctgaagttgcgccacccggtattatcatttcagtgagttaccctggagccagcccggaagtgatgaacacatccgtcgtgtctctgatcgagcgtgaaatttcgagtgttgacaatttactctattttgaatcttccagtgacacgacagggatggcgtcaattacggtaactttcaaacccggtaccgacatcaaactcgcccagatggatctgcaaaaccaaattaaaattgtggaatctcgcctgccgcagtcggtaagacagaatgggataaatgttgaggcagctaattccggttttttaatgatggtggggttaaaatcgccaagcggagcctatcaggaagctgacttaagcgattattttgcaaggaatgttactgatgaactccgtcgcgtacctggtgtaggtaaagtccagctttttggcggagaaaaggcactccgcatatggctggacccgatgaaattacacagctatgggctctctgttacggatgtattaagcgccatcagtcaacaaaacgtgattgtttcaccgggcagaaccggagatgaacccgcgacgagcagtcaagaggtgacctatccaataacggtaaaagggcagctctcttcggttgaagaatttcgcaatatcacgattaaatcacaggtctcagccgcccgggtgacactggcagacgttgcccgcgtggaatccgggttgcaaagttacgcatttggcatccgtgaaaatggcgtgcctgcaacggctgccgccattcagttgtctcctggcgcaaatgcgattagtactgcgtcgggtatccgcgcgcggttaacagaactgtccggtgtgcttcccgagggaatgacattcaccgtgcctttcgatacggctccatttgtaaagctatcgatattgaaggtagttgagacatttgttgaagccatggttctggtctttttcgtgatgctgcttttccttcacaagatacgctgtacgcttattcctgcgattgtggcacccgtggcgctgctcggcacatttaccgtaatgctattaagcggttattccatcaatattttaaccatgtttggaatgatactggccatcgggattattgttgacgatgctattgttgtggtggagaacgtcgaacgactgatggaagacaaaaaaatgtctccacaggatgcaacgcgagaagcgatgcgtgaaattacgccggcaatcattggtattacgctggtgctcactgcggtgtttataccaatggcctttgccagcggttctgtgggtattatttatcgacagttcagcatttcgatggcgatatccattttactgtcggcattcctggcgctgacgttaacgcctgcgctttgtgcaaccctgctcaaaccacatggtattcatcagggtaaaagcagcgtattttcagcgtggtttaacgctcactttcatcgcctgacttcgttttacgccactggtctgggatttgtactgaagcgtactggccgtatgatgatgatttacgctgcattatgtttggcattgtttgccgggctgtccaccttaccatcatcatttttacccgatgaagatcagggttattttatgtcctcaatccagcttccttctgatgccacgatgcagcggacgcttaaggtcgtcgatacatttgaagaggagatcgcccatcggcaggcggtagaaagtaacattatgattctgggatttggtttctcaggatcaggccaaaattcggccatggcattcaccaccctcaaggactggaaacaacgcaaaggaaccacggcacaggaagaagctgaccatattcagtcccaaatggcaaacgtgcctgacgccgtaacgatgagtctgctgcctccggctatttctgatatgggaacctcatccgggttcacttattatttacaggacagaggggggaaaggctatcaggcactcaaaaaggcggccgatgagcttattgtacaggcaaatcataatcctcaccttgccgatgtctatattgatggacttggtgagggaacaagcctttccctgcatgtcgacagggaaaaagcggaagccatgggggtttcgtttgatgaaataaatcaaaccatttccgttgcagcaggttccaattatgttaatgactataccaataatggtcgggttcagcaggttatcgtccaggcggatgcgccataccggatgcagcctgaacaacttttggctttgtctgttaaaaaccgtctggggcagatgcttccattatccgcttttgtgacgctttcgtggaatgttgcaccgcagcaactgatacgctatcagggatatcctgccatacgcataaccgggagttccgcacagggaaaatcgtcaggtaccgcaatggcggcaatggacaatctggctaagcacttaccaccggggttcgccggggagtgggcgggaagttcgttacaggaaaaagagtctgcatcacagcttccgggtcttattgtgctctcggtactggtggtattcatggtgctggctgctctttacgaaagctggtccattcccttcgcggtcatgctcgttgttcctctggggctgctcggcgctgtgctggccgtatccgttacaaatatgacgaatgacgtctttttcaaagtgggtctgataaccctgattggactttccgccaagaatgcgattctgattatcgagttcgcgagacaattgatgaaagaaggaaagagccttattgacgcgacattgacggctgcaaagctacgcttacggccaattctgatgacttctctagctttcacattaggtgttgttccgctgatgcttgccagtggagccagcgacagcacgcagcatgcgattggtaccggtgtattcggcgggatgattagcggaacgctactggccattttctttgttccggtatttttcgtgacgatcacacgatttacaggcatgcgaaaatacagactggggaatagccggaacggc

SEQ ID NO: 22927 - DNA, 426 bp, Klebsiella pneumoniae
atgcagtatgtgaatacatgcccggtcctgaatgttgaggagtccgaccgcctgtcttttatgccgtacctgttcggcacggatttcatgctcgcggaattacaggtgtacgctctggccaaaaaatggatgcccggctatgagggcggcttctggcattttattcgcctgccggaggggggcggctacatgatgccggattgtggccgggtacatctggtcagtagcgaaaactggtttgatcgcactgtcagcgccgacgcggcgggcattattctgaccagcctggcgattaatcgccgtctggcggcccatcatgacagcagtaacccggcgctgactcgcctttatatgctgcgtgatgcccagctctggaatcacatcacctttcaccccgaatgcagtgctatttacgccgcgctggac

SEQ ID NO: 22928 - DNA, 3741 bp, Klebsiella pneumoniae
atgagtaaattcctggaccggtttcgctacttcaaacagaagggtgaaacctttgccgatgggcacggccagcttctaaacaccaaccgggactgggaggatggataccgtcaacgttggcagcatgacaaaattgtgcgttccactcacggtgtcaactgcaccggctcatgcagctggaagatttatgtcaaaaacggtctggtgacctgggaaacgcagcagactgactacccgcgcacccgcccggacctgccgaaccacgaaccacgcggttgcccgcgcggcgccagctactcctggtacctgtacagcgctaaccgcctgaaatacccgctgatgcgtaaacgcctcatgaagatgtggcgggaagcgaaagttcagcatagcgatccggttgaggcatgggcgtcgattatcgaagacgccgacaaagctaaaagcttcaaacaggcccgcggtcgcggcggttttgtacgttcctcctggcaggaagtgaatgagctgattgccgcctccaacgtctataccgtcaaaacctacggtccggaccgcgtggctggcttctcgccgatcccggcgatgtcgatggtctcctacgcgtccggcgcccgttatctgtcgctgatcggcggcacctgcctgagcttctacgactggtactgcgacctgcctccggcttcgccgatgacctggggcgagcagaccgatgtgccggaatccgccgactggtataactccagctatatcatcgcctggggctccaacgtgccgcagacccgcaccccggatgcgcacttctttaccgaagtccgctataaagggaccaaaaccgtggccatcactccggactacgccgaaatcgccaaactctgcgatctgtggctggcgccgaagcagggtaccgatgccgcgatggcgctggcgatgggccatgtgatgctgcgtgaattccacctcgataagccgagccagtatttcaccgactatgtgcgccgctataccgacatgccgatgctggtgatgctcgaggagcgcgacggttattatgccgccggccgtacgctgcgcgcatccgacctcgtggattcccttggtcaggagaacaatccggaatggaaaaccgtcgcctttgacgagaagggcgacatgaccgtaccgaacggttccctcggattccgctggggcgacaaaggcaaatggaacctcgaacagcgcgacggtaaaactggcgaagagattgagctacgtctgagcctgctgggcagccatgatgaagtggcgaacgtcggcttcccgtacttcggcggcgaagggtctgagcactttaacaaagtcgatctggaaaacattctgctgcacaaactgccggctaaacgcctgcagctggccgacggctctaccgccctggtcaccaccgtgtatgacctgaccatggctaactacggcctggagcgcggtctgaacgatgacaactgcgccgccggctacgatgaagtgaaagcctacaccccggcgtgggcggagaagatcaccggcgtctcccgcgcgcatatcatccgtaccgcccgtgaatttgccgataacgccgataaaactcacggtcgttcgatgattatcgtcggggcgggcctcaaccactggtttcacctcgacatgaactaccgcggcctgatcaatatgctgatcttctgcggctgcgtcggtcagagcggcggcggttgggcgcactatgtgggccaggaaaaactgcgtccgcagaccggctggcagccgctggcattcgcccttgactggcagcgtccggcacgtcacatgaatagtacctcgtacttctataaccactccagccagtggcgctatgaaacggtgaccgcgcaggaactgctgtcgccgatggcggataaatcccgttacagcggccacctgatcgactttaacgtgcgcgcagagcggatgggctggctgccgtcggcgccgcagcttggcgtcaacccgctgcgtatcgctgacgaagcgaagaaagccggcatgaccccggtggattacaccgtgaagtcgctgaaagagggctcgattcgctttgcggccgagcagccggaaaatggcaaaaaccacccgcgtaacctgtttatctggcgttccaacctgctgggctcctccggtaaaggccatgaatacatgctcaagtacctgctgggtaccgagaacggcattcagggcaaagacctgggcaagcagggcggcgtgaagccggaagaagtcgaatggcgggataacggcctcgacggcaaactggatctggtggtgaccctcgatttccgtctgtcgagcacctgtctctactccgacatcgtgctgccgaccgccacctggtacgaaaaagacgacatgaatacctcggatatgcatccgtttattcacccgctgtcggccgccgttgatccagcctgggaatcgaagagcgactgggagatctataaaggtatcgcgaagaaattctctgaagtgtgcgtgggccacctcggtaaagaaaccgacgtggtaaccctgccgatccagcacgactccgccgcggaaatggcgcagccgctggatgtcaaagactggaaaaaaggcgaatgcgatctcatccccgggaaaaccgcgccgcatattattccggttgagcgtgattacccggcgacctacgagcgtttcacctcgatcggcccgctgttggaaaccatcggcaacggcgggaaaggcatcgcctggaacacccagagcgagatggatctgctgcgtaagctcaactacaccaaggcggaaggcccggcgaaaggccagccgaagctggaaacggccatcgacgccgcggaaatgatcctcaccctggccccggaaaccaacggtcaggtggcggtgaaagcgtggcaagcgctgagcgagatcaccggtcgcgagcatacgcacctggcgctgaacaaagaagacgagaagatccgcttccgcgatattcaggcgcagccgcggaagattatctccagcccgacctggtctggcctggaagatgagcatgtctcctataacgccggttacaccaacgttcacgagctgatcccgtggcgcacgctgtccggccgtcaatcgctgtatcaggatcatcagtggatgcgcgactttggcgaaagcctgctggtctatcgtccgccgattgacacccgttcggtgaaagcggtgatgggcgagaagtccaacggcaacccggagaaggcgctgaacttcctgaccccgcaccagaaatggggtatccactcgacctacagcgataatctgctgatgctgaccctgtcgcgcggtgggccgattgtctggatgagcgaagcggatgcgaaagatctgggtatcgaagataacgactggatcgaagtcttcaacgccaacggcgccctgacggcgcgtgcggtggtgagtcagcgcgttccagccgggatgaccatgatgtatcacgcgcaggaacgtatcgtgaacctgccgggctctgaaatcaccggtcagcgcggggggatccataactccgtcacccgtattacgccgaaaccgacccacatgatcggcggctacggtcacctggcctatggctttaactactacggcaccgtcggttccaaccgcgatgagtttgtggtggtacgtaagatgaagaacattaactggttagacggcgaaggcaacgaccaggtacaggagagcgtaaaa

SEQ ID NO: 22929 - DNA, 1063 bp, Klebsiella pneumoniae
atgatgcaggatttgcgtctgatattaatcattgttggcgcgatcgcataatcgctttactggtacatggtttctggaccagccgtaaagaacgttcttcgatgtttcgcgatcgcccactgaaacgtatgaagtcgcgcgacgatgagtcggaaaacgacgactttgatgataatgttgaaggcgtaggagaagtccgcgttcatccggtgactcacgccccgcacggcgcgcatggggagcatgaagcccctcgtcagtcgccgcagcaccagtaccagccgccttacgagcgccagatgcagcagcctgcgcgtcctgaagaaccggttcgccagccgccgcagccgccgcgccaggccccggttccaccgcagcaacagcctgcgccgcatgcggtccgcagcctggctggcaacagccgcaacctgcgcagccgcccgtacaaccgcaacaccagccgcagcctgttgtgcagcagcctgtcgcgccgcaaccggtgacgccgaccgtcgctcagccgcagccagccgccccgcagcagcctgcgccacagcctgttgccgcgtcgcagcccgccgtcgcggaaccgcagccggtagagccgcagcagcccgccgcgccgcagccgaaagagcgcaaagagacggtcattgtgatgaacgtcgccgcgcatcatggcgcccagcttaacggtgaagtgctgatcaacagtatccagcaggccggctttaagtttggtgaaatgaatattttccaccgccacctaagtccggacggcagcggtccggtgttgttcagtctggccaacatggtgaaaccgggaaccttcaatccggacagcatggcggatatgatgacccctggggtgactatctttatgcaggtcccttcctacggcgatgaattgcagaacttcaagctgatgctgcagtctgcgcagtatatcgctgacgaagtgggcggcgtggtgcttgacgatcagcgtcgcatgatgacgccgcaaaaactgcgtgaataccaggatcgtattcgcgaagtgaaagacgcgaacgcctgacgt

SEQ ID NO: 22930 - DNA, 2193 bp, Klebsiella pneumoniae
atgagcagtgcctacgatagcctcgatccccgcgtccgtaagtgggtttacaagcaggggtggtcgacattaaggcccttgcaggagagttctatcccggcaattttagcccgtgatcgagacgtgctaatcagtgcaggtacagcagcgggtaaaacagaggctttctttcttcctgcctgttcggcagttgcagatctcacgaatggatttggcatcgtctatatcagtccgttgaaggcattgattaacgatcagtaccgtcgtcttgggagccttggagatgcattggaaatgccagtgactccctggcacggggatgtaccacaaagcaaaaagaagaaggctcggacgaaccctgctggcattttactgattacacctgagtcacttgagtctttgctcataaattcaatgggctggctcaaacaggcgttttcttcagtcgcatacatcgttattgatgagtttcatgcttttattggttcagagcgtggtgtacagctgctttctctgctcaatagaattgaccatgtgctaggatgccaggtaaatccaattccccgcgttgcgttgagtgccacgctgggggaactggagaaagtgcccgaaatgttgcgcccggacaaacgactcccctgcgtaactgttacagatagtaatagcatggccactcttcaggtacaggtcaaagggtacctggagcgagtgatccaaaatgaggaagaacttcagagttcagctgaacatgacgtttgcgctgacatttttagactttgccgtggcgattctcatttggtctttgcaaacagccgaaaacgcactgaaagcattgcggcaacgctgagcgacatgtgtgaggaacaaattgttccgaatgaatttttcccccaccatggttcccttgccaaggaattacgtgaggtgcttgaatctcgtcttcagaaaggaaatttgcccacaacagctgtttgtacaatgacgcttgagttgggaattgatatcggtaaggttaaatcggttatccaagttacgcctccgcattctgtttccagtttgcgccagcgaatggggcgttctgggcgacgcgattccccgtcagtactcagaatgctaattacagaaaatgagcttactgtgagtagcagtatcgttgatcacctacgactccagttggtgcagtcgatggcaatgatcaggttgatgatctctaaacaatggtttgagcctgccgattcccggcagatgcattactccacgctgctacaccagattcttgcaattaccgcacaatggggtggagttcgtgccgaccagctctggtcacaactatgccagacagggccgttcagaaatgtagatttaaacgatttcaaaagcctgcttaaacatatgggagcatgtggcctactcactcaacttgctagcggcgaaatggttgttggggcagagggggagaaactgactaaccattacactttttatgccgtgttcaatacaccagaagagttccgcattatcaccggaaacagaacccttggaacagtgcctgtggactccccactgctaccagaccaacacatcatcttcggtgggcggcgctggaaagtgacagagatcgagacagagaaaaaagttatctatgtagaggcaaccaaaggcggtcagccaccacaatttagtgggggaggtatgtctgttcatgatgccgttcgtcaggaaatgctcgctatctatagggaaggtgattaccgcatagcaataggtagcaagaaagtagattatgccgatactgccgccagaaacctatttgcggaaggctgtagtaactttcagcgttttaaacttcaaaatgagtgttttattacgagtggacaacactgttacgtaataccctggatgggggataaagttgtcaatacgattacagccttgctcatacgttgtggttttaaagcaaattcatttgctggcgttatagaaatcgataactccagtgtagcttccgttcagcacgcgctgaaagaaatgctgttgtcaggcttgccatctgcatttgatcttgccacagatgttccagaaaagtacttagataaatatgacgagtatttaccagagtcccttcttgcgaaagggtatggtgcaaaggcgtatgaaacagaaggtacgcgcatctggttgcagaaacatctt

SEQ ID NO: 22931 - DNA, 2481 bp, Klebsiella pneumoniae
atgatgtctgcgctattcaatgctccagccatatcgtttgcggatgagttttttaatcctgctttgcttgaggttcgcgaaggagaaggtgcgccgacgacagacctctccgtatttgaagtcgtcaatggacagccagcaggaaactaccgggtagatatctacgtcaataacgaaatggtgaccgcagatgcccgcgatgtgatgttttcaaagaaccaggatgggaagctggagccctgcgtcacgttggcagaactcagccaatggggagttgatacggcctcatttccagaactcgccgtcagtgatagcgaatgcgccaatcttgcgggcatccctgatgcatttgccgacttccagtttaaccgccaaaagctgaatctgagtatccctcatgcggcaatgaatacgcgcagcctggatgaagtgcctattgaacgttgggatgaaggtattccagcccttctcctcaattacaacatgaatagctatcagagccgatataagggtgcagaaacttacgaaagcacgtatttgaacctgcgtcccggtctcaatatcggtccctggcgtctgcgcaactacaccacctttgagcatagtaatcagagtggaagtaaatgggacaacgtctatagctatcttcagcggaatattgtctctttgcgaagccaactgacgttaggcgacagttcagcaccagctgatgtcttcgatagcgtgccgtttcgtggttttcagatggcctcggatgatgacatgctgccttccagcgtacgtaactatgcgcctgtgattcgaggggttgcccgcagcaatgccctggtcaccatccgtcagaatggttacgttgtctatgagaccaaagtggcgccgggggcgttcgagatctccgatttggcctccaccggaggagcaggcgatcttgacgtgaccatcaaagaagccgacggcagcgagcagcacttgcgcatcccctacgcatctttgcctgttctacagcgtgaaggtaagtttcgctatagcgttacgggcggtcaattccgcgcctacgattctcacacggaaaaaaacctgtttgttcagggcaccggaatttatggccttccgtggggctttacgctctacggcggcgtgcaaaatgcaggcaataaatatcagtcatatgcgttgggggtgggtaagaatatcggtagctggggcgccttttccgccgacgccatccattcccgatccatgtcgaccgatgccggcaggcaacagggccagtcgctccgggtgcgctatagcaaaaatttcctgcagacgggaacaaattttaccatcgccggctatcgctattccacctccggatttcgctcgctggaagaaacgctgggtacctaccgtagcgataataacattccttcttatatcaccgatcgccggcgtaaccgggctgagctgtcgctgaatcaggatcttggcgataactttggggcgttgaatgcatccttgatcagcgaggattactggcagaacgaacgtaacagcctgtcggcaaatctgggctattacaaaaatttcaacgcgattggtatcagtctgaactactcctggaaccggaataccgggctctatggccatgccgaacaggataatgtggtctcctttgagatcaatgtgccgctggacaaattcctcaaccggacatacgcctcatacgggacaacccatgcgagtggaaacggaaccagccacaacctccgactgaatggttcagcctttgatgatgccagtcttgactgggggataaacgcgacgcttgcggggcgcagcgaacaacaagtcgtcgggggtaacgtcagctggaaggcaagccacggaacgttaaatggttcctacagccgcagccgcgacagccaacagctggggtatggcatagccggtggggtagtgattcatgagaatggtatcacgctgtcccaatccctgggtgaaactattggtttagttaaggctcctggcgcagaaggcattggcgtcaataactacgccggtatctctacggatagtcggggttacgcggttgttccgtatctgaccccctatcgccgcaatgatattagcctgaatagtaaaaccctgcgggacgataccgatatcacctatatgaccaataaagtcgtccccacccgcggggctatcgttagagcagagtataaaaccgccattggccaccgtgtcctgatgacgttaacgcggcctgggggaaaaccggtcccctttggcgcgatggcgtcgctgcttaaaagtgaagaaaacgcgtcaattgtcggtgacggcggagaagttctgctgagcggtttaccgcaaaaagggacgctgcaggtgaaatgggggaatggccaggggcaggaaaccacctgtcgggcggattatatagcccataaatctgctggcgcgtccggtctctggaacgcgacgagcgtctgtcaa

SEQ ID NO: 22932 - DNA, 986 bp, Klebsiella pneumoniae
atgagccatcaactcaccttcgccgatagtgaattcagcactaagcgccgtcagacccgaaaagagattttcctctcccgcatggagcagattctgccatggcaaaacatggtggaagtcatcgagccgttttatcccaaggcgggcaatggccgacggccctatccgctggagaccatgctgcgtattcactgcatgcagcattggtacaacctgagcgacggtgccatggaagatgccctgtacgaaatcgcctccatgcgcctgtttgcccgattatccctggatagcgccctgccggatcgcaccaccatcatgaatttccgccacctgctcgagcagcatcaactggcccgtcaattgttcaagaccatcaatcgctggctggccgaagcaggcgtcatgatgacccaaggcactttggtggatgccccatcattgaggcacccagctctaccaagaacaaagagcagcaacgcgatccggagatgcatcagaccaagaaaggcaatcagtggcactttggcatgaaggcccacattggtgtcgatgccaagagtggcctgaccacagcctagtcacaccgcggccacgagcatgacctcaatcagctgggtaatctgcttcatggagaggagcaatttgtctcagccgatgccggctaccaaggagcgccacagcgcgaggagctggccgaggtggatgtggactggctgatcgccgagcgtcccggcaaggtaaaaaccttgaagcagcatccgcgcaagaacaaaacggccatcaacatcgaatacatgaaagccagcatccgtgccagggtggagcacccgtttcgcatcatcaagcggcagttcggcttcgtgaaagccagatacaaagggctgctgaaaaacgataaccaactggcgatgttattcaccctggccaacctgtttcgggtggaccaaatgatacgtcagtgggagagatctcagtaaaaaccggaa

SEQ ID NO: 22933 - DNA, 435 bp, Klebsiella pneumoniae
atgatcagagactggttaaccccggataaaattaaagtcattaactcaatagatagctgggaaaatgccgttcgacttgcagcagaacccttgctgatgcaagggtatatagccgggtcgtatattgaggcgattttgcaaagccataaagaacttgggccctattacgtattagctcccggcttggcgatgcctcatgcccgtcctgaacagggggtgttaagaaatggattatcgcttcttcatattaaagaaggggtgtcgttcggctcgacagagaacgatccggtaaacgtggtaatcatactatgcgctcgttccggaaatgaacatatcacgatgattggtgaactggctgaaatctttagcgatcagcaaaagttacaccgattgttaaatgccgatgatagcaaggcgattcaggccgttattgac

SEQ ID NO: 22934 - DNA, 1363 bp, Klebsiella pneumoniae
cgttcgaacaagactatgacgttcttcgtctgtttcctcgccgcgctggctggcctgctgttcggccttgatatcggtgttattgcgggtgccttaccctttattgccaatgagttccagatttccgcccacacccaggagtgggtggtcagctccatgatgttcggggctgccgtcggcgcggtcggcagcggctggctctctttcaaactgggccggaaaaagagcctgatgatcggcgccatcctcttcgtcgccggttcgctgttctctgccgccgcgccaaacgtcgagatcctgctggtttcccgtgtgctgctcggcctggcggtgggcgtcgctcatatacggctccgctgtatctgtcggaaatcgccccagaaaaaattcgcggcagtatgatttccatgtaccagctgatgatcaccatcgggatccttggcgcctatctctctgacaccgctttcagctacagcggcgcatggcgctggatgctcggggttatcatcattccggcggtattgctgctgatcggcgttatcttcctgccggacagcccgcgctggttcgccgccaaacgtcgctttgtcgatgcggaaccgtgctgctgcgcctgccgagtaccagcgccgaagcgaaacgcgagctcgatgaaatccgtgaaagcctgaaggtaaaacagtccggctggtcgctgtttaaagacaacagcaacttccgccgcgcggtgttcctcggcatcctgctgcaggtgatgcaacagttcaccgggatgaacgtcatcatgtactacgcgccgaagatctttgagctggcgggttatgccaacaccactgagcaaatgtgggggacagtgatcgtcggtctgactaacgtgctggccacctttatcgccatcggtctggtcgaccgctggggccgtaaaccgacgctgatccttggctttatcgtgatggccgcgggaatgggcgtcctgggtaccatgatgcacatcggcattcactcctctaccgcccagtacatcgccgtcctgatgctgctgatgttcatcgtcggtttcgccatgagcgccggcccactgatttgggtactgtgctccgaaatccagccgctgaaaggccgcgacttcggtatcacctgctccacagcgaccaactggattgccaacatgattgtcggcgccaccttcctgaccatgctcaactcgctgggcagcgccaataccttctgggtgtacggcggtctgaacgtgctgtttatcctgctgacgctgtggctgatcccggaaaccaaaaacgtctcgctggaacatattgaacgtaacctgatgcagggtcgtccactacgcgagatcggcgcccgc

SEQ ID NO: 22935 - DNA, 1374 bp, Klebsiella pneumoniae
atgagtatgtcaaatagtgcgatgagcgtggttatccttgctgcaggcaaagggacccgcatgtattccgatcttcctaaggtgctgcataccctggccgggaagccaatggtgcagcatgtcattgatgccgctaacgatttaggcgcatgtgcggtacacctggtatacggccacgggggcgatctgctgcgtcagactctgcatgaagacaacctgaactgggtgctgcaggctgagcagctcggaaccgggcacgctatgcagcaggcggcgccattcttcaatgatgatgaagacatcctgatgctctatggcgacgtgccgctgatctccgttgagacgctacagcgcctgcgcgccgcgaaaccacagggtgggattggtctgttaacggtgaagctggatgacccaaccggctatggccgcattacccgtgaaaatggccaggtgacgggcatcgttgagcacaaagatgccagcgaggcccagcgccagatccaggaaatcaacaccgggatcctgatcgccggcggagcggatctaaagcgctggctggcgaaactcaccaataacaacgctcagggcgaatactacatcaccgatatcatcgccatggcgcaccaggaaggacaccagatcgtcgcagtgcatccgcagcgcctgagcgaagtcgaaggcgtcaacaaccgcctgcagcttgcgcgcctggagcgcgtctaccaggcggagcaggcggaaaagctgctgctggcgggcgtgatgctgcgcgatccggcgcgtttcgatctgcgcggtacgctgcagcacgggcgcgatgtagagatcgatactaacgttattctggaaggcaacgtggtgctgggcgatcgagtgaaaatcggcgccggctgcgtgatcaaaaacagcaccatcggcgatgactgcgaaattagcccctacagcgtggtggaagatgcccagctgcaggcggcctgcaccatcggtccatttgcccgtctgcgcccgggcgccgaactgctggaaggcgcccacgttggtaacttcgtggaaatgaaaaaagcgcgtctcgggaaaggctccaaggcgggtcatctgacctatctgggcgatgcggagattggcgataacgtcaatatcggcgcgggcaccatcacctgcaactacgatggtgcgaacaagcataaaacgattattggcgatgatgtctttgtcggctcggatacccagctggtggcgccagtcacggtaggcaatggcgttactatcgccgccggcaccaccgttacgcgcaatatcgccgataatgagctggtgttgagccgcgtaccgcaggtccacaaacagggctggcagcgtccggtgaagaagaaa

SEQ ID NO: 22936 - DNA, 257 bp, Klebsiella pneumoniae
gccaaatataccaagggattagccgatgcgaaattcaacctgaagatctgcagcgttgtattagctctggcaagcgcgggctgcgtgtcaaagcaaaatgtcccgcaaacggagcgaccggctccagcggcctgggcgatgcttccggccaccgacttgttgactccgctgaacgggattatttcaccctcagagagcgaatcgtcaaagtgacgaagcaggtcggatatctgcggtctacatcaaagagctgtgcc

SEQ ID NO: 22937 - DNA, 867 bp, Klebsiella pneumoniae
atgaaaccacgtcgcagtatgttgttcatccctggcgccaatgccgccatgttaagcacgtcattcgtctacggcgccgatgcggtgatgttcgacctggaagatgccgtttcgctgcgcgagaaagataccgctcgtctgctggtgtatcaggcgctgcagcatccactgtatcaggatatcgaaaccgtggtgcgcattaacccgctgaatacgccgttcggtcttgccgaccttgaagcggtagtccgcgcgggcgtggatatggtgcgtctgccgaaaaccgacagcaaagaagatatccatgagctggaagcgcatgttgagcggattgaacgcgagtgcggccgggaagtgggcagcaccaagttaatggcggcgatcgagtcggcgctgggcgtggtgaacgcggtggaaatcgcccgtgccagcccgcgtctggcggcgatcgcgctggcggccttcgattacgtgatggatatgggcacctcccgcggcgacggtactgaactgttctacgcccgctgcgctgtactgcatgccgcccgcgttgccggcatcgccgcctatgacgtggtgtggtcggatatcaataatgaagagggcttcctggcggaagcgaatctggccaaaaacctcggctttaacggcaaatcgttggttaacccacgacaaattgaactcctgcatcaggtctatgccccgacgcgcaaagaggtcgatcacgcgctggaagtgattgccgcggcggaagaagccgaaacgcgaggtctgggtgtggtatcgctgaacggcaagatgatcgatggaccgattatcgaccatgctcgcaaagtggtggcgctctcggcttccggtattcgtgat

SEQ ID NO: 22938 - DNA, 1599 bp, Klebsiella pneumoniae
atggaccgattatcgaccatgctcgcaaagtggtggcgctctcggcttccggtattcgtgattaaggggaataagatgaaagagacagtagcaatgcttaatcagcagtacgtgatgccgaatggactgacaccttatgccggcgtaacggcgaaaagtccctggctggcgagtgagagcgaaaagcgccagcgcaaaatctgcgattcgctggaaacggcaatccgtcgctccggcctgcaaaacggcatgaccatctcgtttcaccacgcgtttcgcggcggtgacaaagtcgtcaatatggtagtggcgaagctggcggaaatgggttttcgcgatctgacgctggcatccagttcgctgatcgacgcccactggccgctgatcgagcatattaaaaatggcgtgatccgccagatctacacctccggcctgcgcggcaagttgggcgaggagatctccgccggtttaatggaaaacccggtgcagatccactcccacggcggtcgcgtacagctgattcaaagcggcgagctgtcgattgatgtcgcgtttctcggcgttccttgctgcgatgagtttggcaacgccaacggctttagcggtaaatcacgctgcggttctctgggctacgcgcgcgtcgatgccgagcacgctaaatgcgtggtgctgctgaccgaagagtgggtggattatcctaactatccggccagtattgcccaggatcaggtggatctgatagtccaggtagatgaagtcggcaatccgcaaaaaattaccgcgggtgccatccgtctgaccagcaacccgcgcgagctgctgatcgcccgccaggcggcgaaagtcgttgagcactccggttactttaaagagggtttctcgctgcagaccggtaccggcggcgcctcgctggcagtaactcgcttccttgaagataaaatgcgccgtaacggcattaccgccagcttcggcctcggcggtatcaccgggacgatggtcgatttgcacgaaaaagggttgatcaaaacgctgctcgatacccagtccttcgatggcgacgcggcgcgttcgctggcgcagaacccgaaccatgtcgagatctccaccaatcagtatgccagcccgggctccaaaggcgcctcctgcgagcgcttaaacgtggtgatgctcagcgcgctggaaattgatatcgactttaacgttaacgtgatgaccggttctaacggtgtgctgcgcggggcgtccggtggccatagcgataccgccgccggtgcggatttgaccattattaccgcgccgttagttcgcggccgtattccctgcgtcgtggaaaaggtgctgacccgcgtcacgccgggggccagcgtggatgtgctggtcactgaccacggcattgcggtcaacccggcacgtcaggacctgatcgacaatttgcgcagcgcaggcattccactgatgaccattgaggaactgcagcagcgtgctgagctgttgactggcaagccgcagccgatcgaattcaccgatcgggtggtggcggttgtgcgctatcgcgacggttcggtcatcgatgtgattcgtcaggtgaaaaacagcgac

SEQ ID NO: 22939 - DNA, 693 bp, Klebsiella pneumoniae
atgttagaaccaccaaagagttataatgaaatgttacctatgctccataaggcaacttttattactacatttatattttatctgtcattggttatttatggctacatcccattggttggcattaatgccaagtacattccacccattaaagactacgaagagtttattaagtggatattaacattcggcatattaccaatcgcattttcaattttttggaccgtgattagtggagctttagatctacataataacgtggcaaaaatcattgggataagaaaggtatgggataattatttaattattaagccattggcgaagatagccggcgttacgagaaagttaagtggtgatgaatcctacaaggtaatgagtaaactttattatccagaagtaaaggagttgaaagataaacattatgttgagcttttttggaacaaagtatattacttttgggttttctttgaacatacagttattgcatttattactgttttgataatcagtttcgctaaattaactaatctattctctgttactggttctttaaataacctttggtcgtggtttattttccttgttgccttcaattttcttatttttatagcatcggttaagccaagaactgaaagtcaagtaagacagatacctgatgataaaataaaggaattctttaatagtaacaatattatt

SEQ ID NO: 22940 - DNA, 2473 bp, Klebsiella pneumoniae
tttggcgagcccgccgccgcaggttcgggtgcgccgcgccgtcgcggcagtgggctggccagccgcatcagcgaacagtcggaagccttgctgcaggaggccgccaaacacgctgccgaatttggccgctccgaggtggataccgaacatctgctgctggcgctggccgacagcgacgtggtcaagaccatcctgggtcagttcaagatcaaggtcgatgacctcaagcggcagatcgagtctgaggccaagcgcggggacaagcccttcgagggcgagatcggcgtgtcgccgcgcgtgaaggatgcgctcagccgcgccttcgtggcctccaatgaactcggccattcttatgtcggtccagagcatttcctgatcggtctggctgaggaaggcgaagggctggccgccaacctgctgcgccgctacggcctgacgccgcaggcgctgcgccaacaggtcagcaaggtggtcggcaagggcgccgaggatggccgcgctgagacgccgaccaacacgccagaactcgacaagtactcgcgcgacctgaccaagatggcgcgcgacggcaagctcgacccggtgatcggccgcgcgcaggagatcgaaaccaccatcgaggtgctggcccggcgcaagaagaacaacccggtgctgatcggcgagccgggtgtgggcaagaccgccatcgtcgaagggctggcgcagcgcatggtggcgggtgaagtgcccgagaccttgcgcgacaagcgcctggtggaactcaacatcaacgccatggtggccggcgccaaatatcgcggcgagttcgaggagcgcgtgcagaaggtgctgaaggaggtgaccgagcaccagggcgagctgattttgttcatcgacgaggtgcacaccatcgtcggtgccggccagggcggtggcgaaggcgggctggacgtggccaacgtgttcaaaccgatgatggcgcgcggtgaactcaacctgatcggcgccacgacgctgaacgagtaccagaaatacatcgagaaggatgccgcactggagcggcgcttccagccggtgacggtacccgagccgacggtggcccaggccatcatgattctgcgcggcctgcgcgacaccttcgaggcgcaccacaaggtcagcatctccgaggacgcgatcatcgcggcggccgagttgtccgaccgctacatcacggcgcgcttcctgccggacaaggcgatcgacttgctcgaccaggcggccgcgcgcgtgaagctgtcggccacggcccggccggtggccgtgcaggagctggagtccgaactgcaccagctgcggcgtgaacaggattacgtggccgcgcgcaagcagtacgaccaggccgccgagctcgggaagcgcatcgaagccaaggaggccgagctcaagaagctcgtcgaggactgggagcgggagcggcctccgcagtgccgaggtcaaggcggaacacgtggcgcagatcgtctcgcgcctgaccggcatcccggtcaacgagttgacggtggaagagcgcgaaaagctgctgcacttggaacaacggctgcacgagcgcctggtgggacaagacgaggcggtccgtgccgtggccgatgccgtgcggctgtcccgcgccggcctgcgtgaaggcagcaaaccggtggctaccttcctgtttctgggcccgaccggggtgggcaagaccgagctcgccaaggcattggccgaatcgatctacggcgatgagcacgccctgttgcgcatcgacatgtcggaatatggcgaacgccataccgtggcgcgattggtgggcgcgcctccgggctatgtcggttacgacgaaggcggtcagctcaccgagaaggtgcggcgcaagccctacagcgtgctgctgctcgacgagatcgagaaggcacaccctgacgtatacaacatcctgctgcaagtgttcgacgacggtcgcctcaccgacggcaagggccgggtggtggatttcaccaacaccatcatcatcgccacgtccaacctgggttcggacatcatccagcgacggctgaaggcgcgcggggcggccggcgaggagtacgaaaagaccaaggccggagtcatggacgtgctgcgcggccatttccggcccgagttcctcaaccgcatcgacgagatcatcgtcttccatgcgctgggcaaggaggagatccgccacatcgtcggcctgcagctcgatcgcgtggcgcgcagcgccgccagccagggcgtgacgctcactttcgatcagacgctgatcgaccatttcgcggaagaaggctacaagcccgagttcggtgcgcgtgaactcaagcgcctgatccgcagcgagctggaaactgcgctggcgcgcgagatgctcggcggcggcatcggcaagggcgatcacgccagcgcacgctgggacgacaaggccgaacgcgtggtgttcgaacgcaaagagccaccgcag

SEQ ID NO: 22941 - DNA, 1419 bp, Klebsiella pneumoniae
atggcacgtttaatgctcttcgcttgtataccgcaatgtggacaagaacgtatgccatatggccacaacaggtcgccagtctgcggtcgcaaccttcccctttctgtgaggcatccagggtggatgcgtttcacggaagcctgcttactgaaaacggagaacaacatgacgacactcagcgaaccgttggttaccccgaaatatggcaagtggcgccagctggtgctgggcctgatctgtatggccgccatctccagtccgcaatatgtctggacgctgttgacaaaacccttggccgccaaacttggcgtcggtctgccagaattgcaggtcaccttctcgctgctgatcatcctgcagaccttcttttccccttttcaggggcggttagtggaaaaatttggcccacggcggctgatcgctattggcacagtgatggcgggaatgagctgggtgctttccgcgcaggtgaatggcctggcaacgctctggctggtttatggctgcatgggcggcctcgggaccgggatcgtctacatcggtgttgtcggcctgatggtcaaatggttcccacagcagcggggatttgccgccggcgcggtggcggcgggctacgggatgggggccatcataaccaccttccccatctccctgtcgctgaccactaacggccttgaacatacgatgacgactttcgggatccttttcgccctcgtcggcttcctcgccagtcaggggctgaatctgccgccgcccgctgtctcccagcccgtcagtcagacggtggcgcagagcagcagatcgtttacttcccgggaaatgctgcgccagccgctgttctggctgatgttcgtcatgatggcgatgatgtcgacttccgggctgatggtcacttcgcagatggcggtgttcgccgaggatttcggcattagccaggcggtggtgtttggcatggcggcgctgccgctggcgttaacgatagaccgctttaccaacggcttaacccggccgctgtttgggtttatttccgaccgcttcggccgcgagcaaaccatgtttatcgcctttgcgctggagggggtagcgatgatgctctggctggcgtgccgggaagatccgctgctgtttgtcctgctctccggggtggtgttctttggctggggggagatcttctcgctcttcccgtcgacgctcaccgatacgttcggcagcgaacatgccgccagcaactatggctggctgtatatttcgcagggcatcgggtcaatctttggcggtccgctggcggcactgctctatcagtacactcacggctggcatgtggtcttcagctgcgcgattggccttgattttgtcaccgccgccctcgcgctgtgggtgctaaaaccgtggcgcgcgcgctttatccgccagcatagc

SEQ ID NO: 22942 - DNA, 1230 bp, Klebsiella pneumoniae
atgcacggctggacctcacgacagcgtaatgcggcgatagccagttttttaagctggacgctcgatgctttcgactttttcctgttagtttttttactgagcgatatcgcccactcgtttcatgtcgaccttgaggaggtcactctggcgattctgctgactctggccgtgcggcccgtcggcgcgctaattttcggcagggcggcggagaagtttggtcgcaaaccaatcctgatgctcaacattgtgttcttctcggcttttgagctgctctccgccgccgcgccgtcgttgatgctgtttttcctgctgcgggtgctgtacggcgtggcgatgggcgggatctggggcgtggcctcttcgctggcgatggagacgatccccgaccgctcgcgcggcctgatgtccggcctgttccaggcgggataccccttcggctatttgctggcggccgtcgcctacgggctgctgtttgaacaactcggctggcgcgggatgtttgtcattggcgccgcgccggtgcttctgctgccgtttatctatttctgcgtcgaggagtctccggtttggcaggcggccaggcagaataaagagagtacggccctgctgccggtactgcgtagccactggaagctgtgcctgtacctggtggtgctgatggcggctttcaacttcttctctcacgggacgcaggatctttacccggtctttttgaaagttcagcacggcttcgagcctaaaacggtcagcatcatcgcggtctgctataacatcgcctcgatcattggtggagtgttcttcggttcgctgtcggagaagattggccgacgcaaagcgattatgatcgccgccatgctggcgctgccggtcattccactgtgggctttcgccagcggctcgctggcgctgggggcgggggcgttcctgatgcagtttatggtccagggggcctggggggtgatccccacctggctcaatgaactggtcccggccaacacccgggcggtgctgcccggcttcgtctaccagctgggtaatttgctggcttcggtgaatgccactctccaggcatcaatcgcccagcatcatgggcataactacggcctggcaatggccctggtggccgggacggtggcgattgtcattaccgtcctgaccttttttggtcgcgaaggccgggtgatccaatccgcaggagcgggacatcaccagccgctctccaccagccgt

SEQ ID NO: 22943 - DNA, 138 bp, Klebsiella pneumoniae
atgcaggtcgtcaactcattacgtagcgctaaacagcgccacccggattgccagctggttaaacgcaaagggcggctgtacgttatctgtaagagcaacccccgcttcaaagcggtgcaggggcgcaaaaaacgccgt

SEQ ID NO: 22944 - DNA, 360 bp, Klebsiella pneumoniae
atgtatgatggcggctatctgccgccggctagagcccggcagcttgtttccccgaagtcactcagaatcatggcaaaagaacaaacggaccgtacgacattagatttgttcgcaaacgagcgtcgcccgggaagaccgaaaaccaatccgctgtcgcgcgatgaacaactgcgcatcaacaaacgtaaccagctgaaacgcgataaggttcgcgggctgaagcgcgtggagttaaaactcaacgccgatgcggtcgatgcgctcaacgagctggcggaagcgcgtaatatgagccgcagcgatctcattgaagagatgctgatgacccagttaaccgccctgcgcagccagggaaaagtc

SEQ ID NO: 22945 - DNA, 428 bp, Klebsiella pneumoniae
atgcagtatgtgaatacatgcccggtcctgaatgttgaagagtgtgaccgcctgtcttttatgccgtacctgttcggcacggatttcatgctcgcggaattacaggtgtacgctctggccaaaaaatggatgcccggctatgagggcggcttctggcattttattcgcctgccggaggggggcggctacatgatgccggattgtggccgggtacatctggtcagtagcgaaaactggtttgatcgaactgtcagcgccgacgcggcgggcattattctgaccagcctggcgattaatcgcgtctggcggcccatcatgacagcagtaacccggcgctgactcgcctttatatgctgcgtgatgcccagctctggaatcacatcacctttcaccccgaatgcagtgctatttacgccgcgctggactga

SEQ ID NO: 22946 - DNA, 780 bp, Klebsiella pneumoniae
atgaaagtactgctgatttacgcccatccggaaccgcgctcgctcaatggcgcgctgaaaaatttcgccatccgccatctgcagcaggccgggcatgaagtgcaggtttccgatctctatgccatgcgctggaaggccgggtatgacgcagacgacagcggcgcgccgccggtcggcgagttctggcggccgaccctcgattccaaacaggcctttgcccagggcacccaaagtgcggatatcgtagccgagcaggaaaagctgctgtgggccgatacggtgattttccagttcccgctatggtggttctcgatgcccgccatcatgaagggctggatcgacagggtgtacgcctggggctttgcctatggcgtcggggagcacagcgaccgccactggggcgatcgctacggggaaggcactttcgtcggcaagcgggcgatgctgatcgtcaccgccggcggctgggcggaacactattcaccacgcgggatcaatggccccatcgacgacatcctgttccccattcagcacggtatgctgttctaccccggctttgaggtgcttccgccgctggtgttctaccgcacggataaaaccgatgccgggcagttcgccgatcagtgcgccgccctggccgagcggctggacacgctgtggcaaaccgagcccattccattccgccggcagaatcatggcgattatctgatcccgtcgctgacgctgcgcccggagctggcgccagggcaaagcggcctggcggtgcatttgcgtagcgaa

SEQ ID NO: 22947 - DNA, 3327 bp, Klebsiella pneumoniae
gatgtgacgatagctgtcactggttcaacgttgctgagtctgcagtcagtactggcactggtggggcaactggtgggcggcgcttcatccattaccgccgatctgtcgatagtgaataccgacaccggtgaggtggtgcagattattccggatgccgtgagcctgacgccgtctctggcgctgctcaatctggtttactccggcagcgcgaccttcagcgacctgccagcagggaactacgcggtggtggtttcttcaccgcaggcttccggcggtctggccgcagtggttgatgaactggcgtcagcaaatctgctgtcggttgccctggcgacaatcacggattctacgcagtacacctcgacggcaattgccggcaatgtgctggttgcggatgcagggggtgatgtagcagacaccggtgacggcattacggtaagcaaaatcgcctccagcgtgcagaccacgccgcttgatgtgacggctgcaggtgttgtgataaatggtctttacggtcagctgacgatccatgcggacggcagctatacctacaaggcgactggcgatgcggatgctgttggccaggccgatatctttacctacacgatagtggatgcggatggtgatacggcgacggctacgctgacgattaatatcgtggcaggaagtgatatcggtgagtcggatgctgatgcagattccgacagcgactccgattctgacagcgattcggattccgacagcgactccgattctgacagcgattcggattccgatagcgactctgactccgacagcgactcggattctgacagcgactcggactccgacagcgactcggattcggacagcgactcggactccgacagcgactcggactccgacagcgactcggactccgatagcgactcggattccgacagcgattcggactccgacagcgactcggattctgacagcgattcggactccgacagcgactcggattctgacagcgactcggattccgacagcgattcggactcggacagcgactccgactcggacagcgattctgactccgacagtgactccgattcggacagcgactcggattcggacagtgattcggattccgttgaggcaatacctgataccaatagttctgaggttgtgcagcagtacggcaatcttaatggtactgaaggtaatctctcgcaactggttggcgtctcgctgctgagcacgattaatgtgtcgctgttgtctggcagtagcttccgcttcaacgtggacaacaacacaacagaggatatgacggttgatgtcagcggcgtgtctctgctttcaacggctgggctgttaacgtcgatagtcaatctgctgggggctggaaatacgctgacagccgatctgtcggtgattgatatcgcgactggacgcgtagttgctatcgacgcgggaagcgtgagtattagcgcaacgttgcttggtgggttggtctatagcggaacagcttcctttgagaatctgcctgctggtagctatgcgctggcgatatcctcaccaaattccgatggagttctggtgagcctgatcaacacgctcgcaggtgcaggagtagccacctttgtagaagcaacggtaaccgattcgctcggttatagcggaagtaccgttacaggcaatgtgctggagggatcggataacggcgatatggccgatagcggtaccgaccttacggtaacgtcggtaacggccaccactgctgcaggtgagactttctcagtgaatggcggcaccatatcggtaacgggtgcttacggcgtactgactattaacgctgacggcagctatagctaccaggcatcaggaaaggccggatcggcaggtaatgcggatgtatttacctacaccattacggatggtaatgggctgcaatcaaccaccaccctgactatcaatatcggtcaggaggtcgagaccgcccaggctaatccggatacgcaggcttattacgtcggcaacgtcgaagataatcttgatatccaggggggcaatgtcgttcaggtggcgggcctgtcgctactgaataccgtgaatgtcgcgcttccgaccaatggctttaagtttgtcgtggctgaagggactgaacaggatgtgacgttaggcgtttcggggtccactgcccttagcatcgcgctaggcgccgttaccctggatctcattctgatcaataccgacactaaccagatagtcggcgttattaaggatggaattacagcaacgccgacaggtttccttggattaagccttgaatacgcgggaggaggggaatttgaaagaattggcgccggtaactatatggttgttatttcgtcgccgactactgaaggattgattggttcgatactgaatctgaatttgggcaccagcattagtatggaggtgacagattcgactaaatacgtgacggggaatgttctgcacaccgatagcgatggcgatgttggcgatacaggtaatgaaattaccgtaagcagcattcagtttggatcgcagatcgaaacagtcactgccggcggcgtcacgattaacggtacatacggtactctgataatcaagtctgacggtagttatagttaccatgctaatggaacaacaggggtgggtcagagtgatgtcttcacctacacgataacggatgggctgggtcatacatcgtcgactacgctgacgatgaacattgagtcaacgccaccggtagcggttgatgatatcgcctccctgtcggcggcaacggcaatgcagtcggtaacctggacgcaaagcgtcagcaatcttgcagtgccaaacacggcagtagcggctaatgcgacatcggcggcgaaagtcaccagtcagaactttaccatcgctgaaggccgggaggtggatggagcatctatcactctcaacttgagtggtaaccgaaccagtggtctctcactactgaatggcgatctttctgggacggtctctcttatccatcatgtcactgttgatggtgtcacaacagatgtaacggtgtggacgagttctctgacgatggctctggatggttctctccttagcccgtcatccgatacagatactgtgacgctgaacatggttaacggcggcattccgctacaactggcggcaggtgattatactctgagtattagtcatacgatgcatgctggcacggcgttgtcctacaacctgtcagcgagcgtagcaggaacagagatccttaccgatgcgcatctgacggtcgggcaatctgtggtagggaatattctcgacggttccgatgcgaatggaaca

SEQ ID NO: 22948 - DNA, 219 bp, Klebsiella pneumoniae
atggtaactattcgtttagcacgtcacggcgctaaaaagcgtccgttctaccaggttgttgtcaccgacagccgtaatgcacgcaacggtcgcttcatcgagcgcgttggtttcttcaacccgatcgctaacggtgcggaagaagaaactcgcctggatctggatcgtatcgctcactgggttggccagggcgctactgtttccgatgcgttgccgcgc

SEQ ID NO: 22949 - DNA, 2145 bp, Klebsiella pneumoniae
atgagcgaacaaccccagcgcagcgatattccgcatttacaggattgggctaacgctatggcttttgtcgccagccattatcggcaaagttactcaccggggacgcttcatgccgcggcggagtgggcgacgcaaaaaacgctgcctgatgcgcttaaacatttatgccgtcatgccggattgcattgccaatttcttaatggcaatgaccggaaaatgtcggcctggcggctgccgcttgtggtacagctcaaagatggccagattggcattattgaaagcttcgatctacataactcagtcgggatccgttttgtcaaagagcttacattactaagccactgtccgcttgactccttgttagatgaaattgaattcactgtggcttttcgtccggcctcgccggagaaagatattagaactgtaagctacctcacacgcttccagccggattggttacgtaagatcgttttaaaagattggcgtccctatacacatgtcatgctggcgtcgctggcgatcaatattttggcattagccggtatcctcttttccatgcaggtatatgatcgggtaattccggcccaatcctatcccacgttatatgtcttgtttagcggcgtattaattgccgcagtgttcaatttcgttctgaaaattactcgcggtcacgtgaccgacctgctgggaaaacgtggggatattcgtatctccgatcgcgtatttggtcacgcattacggctgaaaaataccgcggtgccgcgctcgacgggcagctttatttcccagattcgcgagctagagcaggtacgggaaatgatgacctcgaccatgatgacggtcattgccgatttaccttttttcctgctttttcagcttgtgctatttatcgtctcgccatggctgagttggatcgcgcctgttgcgactatcctgatgctgttaccgggattgttactgcagaaaaaactggctgagctggcaaataaaaatcagcatgaaagcacgctacgcaacgccattttggtggaaagcattcagggcctgccggatataaaaatgatgcaggcagaaagtcgctttctgcaacaatggaacagctatgtggcgattactgcggaatcgggagttcaaacccgaaaagtcactcatgggctggtgagctggggcatgtcgatccagaacctgttgtatgccaccgtagtggccgttggggcgccgctggtgattaatggcgacatcacgaccggcgccatggtggcggcatcgatgctgtccagtcgaatggttgctccgatgacggcgctctgcggggtactggctcgctggcagcaggtgaaagtagcgaaagcaagcctggataatttaatggcgctgccggtagaaggggggctggatgagccgcggatcaatcgagcggttctgcacggtaattatgaatttcgcaacgccgagtttcgttacggcaaagacaatggccccgcaccgctgcgaattaaacagctttctatcaaagccggggaaaaaatagctgttctggggcgcattggcgccgggaaatcaacgcttttgcaggcaatgatgggtaatgttgagttgacgtcaggcgaactaaggcttgacgatctttcgctgccgcaaatcgatctggcggatattcgccgtaatgccacgctactgacgcaggaggctcggttatttcatgggacattaagggaaaatgtgaccctgggacggcctatggcgagcgatgatgaactggtgaaagtgctggagctgtgcggtgcgctggagtttgtcaacaaactgcctatggggcttgaacatctggtgatggagggagggcttgggctttccggcgggcagcggcagtcactgctgctggctcgagcgctcatccgcgatcccaatattattctgctggatgaacccacctcattctttgatgaacgaacagaaaaagcgtttgtcgagcagctggcccgttgggcaggagagcgtacgttaatcatcgccactcacaaagcggcggtgctcaatatcgtcgatcgtatactggttattcaggacgggcagctggcgctggataagcctaaagcgacggtatttgagcaagaaaaagcgcgtgctcaggtggtgaacata

SEQ ID NO: 22950 - DNA, 2541 bp, Klebsiella pneumoniae
atgccaaataagaataatggattattcaaactatccaccatcttctttgcaatgcttccggcattgctttctggtttgaataataaagcgcaagcacgtgactttttcgatccctcattcattagctcattgaatggtagcgatccatcaaccactcctgacttatccgtatttcagacccagaacgcgcaggcgccgggggattatcgggtcgatatcatgtttaatggccgctacctggataccaggacgataaagtttgtcgccaacaatcgcgccagcagcgataaccgcgaacccgctctggttccctgcctgagtctaaaagctctcgcggaatatggcgtaaggataaaatcctttccagagttagccgaggatcaaaacggctgtgcaaacttttctgtcattccggacaccaaagcggattttgactttaccgcccagcgcttaaatatttctattccgcaggcggccttatccaccaccgcgcagggatatatcccaccggatcagtttgatgatggcatcaacgccctgctggtgaactaccagttcagcggctcgaacgacatgcaggccaatgatgaatactacagcttgaacctgcagtctggcctcaacgttggcccatggcgtatccgcaacctcagcacatggaataaaaacaatagcgatgccggggactgggactccgcctatctctatatgcagcgaagtattcgctcgatcaacagtaacctggtgatgggcgaaagttcatcgctctcaaccatcttcgacagcgtgccgtttaccggtattcagctggccaccgataccacgatgttgccggaaagtatgcgcggctatgcgccgattattcgcggtatcgccaaaaccaacgcccgcgtcgtcattaaacagaacggctaccaggtttaccagacctacgtggcacccggggcatttgaaatcaccgatatgtacccgagcggcggtagcggcgacctttacgtcagcgtggaagagtccgacggatccaagcaagaatttgttgtgccgttcgccaccctaccggtcatggtgcgtgaaaatcaactggagtatgagattacttccggtaaatatcgtccttacgatggtggagtcgatgaaacgccatttactcaggccaccgcgacctatggcgtctccagcagcctgacgctttatggcggtatgcaggcggcctcgcgctaccaggcgctgtcgacgggcctcggctataacctgggcgagcttggcgccgcctcggcagacgtcacccaggcatggtcgaaaaagaaagacgatgaaaagacctcaggacagtcctggcgggtccgttatggtaaaaacattgtcgaaactggcaccaatgtcaccatcgcgggctaccgctattccacccgcggctttaataccctctcggaggtgctggatagctactctaatgacggtaattatacctctcgctcactgcgcaatcgcaccaacctgacggttaaccaaagcctgggtaaaggcctcggtagcctgtcgataagcgggttgattgaagattactgggacgataagcgaaccaacaagtcaattagcgtaggttacaacggcggtttccgtaatgtgaactactatctgggctacagctataaccgctacacctggagcggaaataactcaggtaaggatgcccaggacgatcggcgcatcaccctgacggtgacgctaccgctgagcaactggctgccgggtacctataccagctatcaattaaccaacagcaatccgggatctaccgatcagtcggtctccattggtggcgtcgggctagataacgacagcctggaatggagcctgcagcaagggtacagcaaccgggaatattacagaggcgatatgcgtgggacctataacggtgcccgcggcagccttaatgccggctatagctatgacaataacagccaacgtattgactacggcgccaacggcagcatcgtcgctcatgccgatggcattacacttggccaggacatcactgacgccgccgtgctggttaaagcgccgggcctggataacgtcaagttgaccaacgataacaccatctccaccgactatcgcggttacgctatcgtcccgtacgttacaccttaccgtcgtaccgacatcacccttgacagcacttcactgggtgaagatatggagcttccagaaactacgcaaagcgtcgtgccgacccgtggtgccatcgtgcgtgctaattatgacggcaatatcggccagagggcctttgtgcatctgaaaaccgccagcggtcaggacgtgccttatggcgcgatggttctactcgccggcgacagcaaatcgcagccaagcatcgtcagcgacgccggtatggtctatatgtccgggttgcagcagaccgggatccttaacgtccagtggggcaaaagcgccgcgcagcagtgcaatgcttcctttactttaccagccagggaaggcaaagcgtctggcatcagtcaaatcgaaacggtttgtcgc

SEQ ID NO: 22951 - DNA, 423 bp, Klebsiella pneumoniae
atgtatcatgcccgtcaaaccatgctgaatgtagaggagtccgaccgtctctcgttcctgccggatctgtttggtaacgattttctggccggagagatgcaggtctatgcgctcgctgagaaacacatcaccgattactgcggaggcttctggcatttcatccgtattccggagggcggcggctacatgatgcctgacggtgaccgtttccatctgactaacccggataactggtttgatcggtccgtcagcgcggatgcggccggagttatcattacggcgctggcgatcaaccgccgtatctggctgcaccatgaacgcggtgatgctgccctgacacgccacctgatgctgcgggaatcgcagctgtggaatttcattgactctcatgacgaatgcgctgctatttacgcggctctggac

SEQ ID NO: 22952 - DNA, 1193 bp, Klebsiella pneumoniae
atgaaacgacttcaagccttcaaattccagttaagaccgaatggtcagcaggagcgcgatatgcggcgcttcgctggggcttgtcgcttcgtctttaaccgtgcgctggcgcttcaaaacgaaaaccatgaagcggggaacaaatatgtttcctacaccaaaatggcttcatggctcattgagtggaaatcacaccctgatacccagtggctaaaagacacgccatcactgccgttgcagcagtcgctcaaagatctggagcgcggctacaagaatttcttccagaagcgtgcagcattccctcgtttcaagaaacgcggccaaaacgatgcccgcaaggcgtgaagctcgatcagaccaacaatcgtatatcgcttcctaagttgggctggatacgctatcgcaatagccgtgaagtcatcggcgaagttaaaaacgtcacggtcatccagtcatgcggcaaatggtacgttagcatccagacggaatacgaagtgcctgaacaggttcataaggcagcgtcaatggtcggtttggacgccggagtcacgaaacttgccacgctttctgatggcaccgtataccagccagtcaacagcttcaaagcaagccagcgtaagctggctatgcttcaacggcagttaagccgcaaagttaaattcagtgccagttggcagaaacagaagaaaaaaatccagcgtctgcactcacacattgccaatatccggcgcgactaccttcacaaagtcaccagtgaaatcagcaaaaaccacgcgatgatcgtcattgaggacttgaaggtcagtaacatgtcgaaatcggcaaaaggtacggcagagcggcccggacgaaacatcagagccaaatcaggcttaaaccgttcgatactggatcagggctggtacgaaatgcgcagacagcttgagtacaagcagctctggcgtggtggtcaggtactggcgatacctccggcatacacaagccagcgttgtgcctgctgtggtcatacggcgaaagaaaaccgtcaaacgcaaagtaaattcgtgtgtcaggtatgcggctataccgagaacgccgatatcaacggagcacgtaacattttagcggcaggacatgccgtgcttgcctgtggagggatgatacagtcgggccgcccgctgaagcaggaacccaccgaggcgagtcaggctccg

SEQ ID NO: 22953 - DNA, 1305 bp, Klebsiella pneumoniae
tacaaagcgtatacctcatacaaagattcaggcgttgagtggattgggcaggtgccggagcattgggaggtgaaaaggttacgtcatgtcgggcgttactctaatagtggcgttgacaagaagagctacgaagaccagcagacggttgagctttgtaactacacggatgtctattacaacgagttcatcagtgatgatatgcctttcatgcaggctactgccagcgcccacgagattgagcagttcactctgaaaaaaggcgatgtcattatcacgaaggattcagaagacccatccgacatagggattcctgcctttgttccacatgatatgcccggagtggtttgtggctatcatctcactatgattcgtgccttaaatgataactatggaagctatatccatcgctcgatccagtcggatcatacaagagctcacttctttgttgagtcgccaggaataacccgatatggcctgaatcaaaatactattggtaatgccccagtagcgctccctccaccagaagaacaagccaccatcgcggccaccctcgaccgcgaaaccgcccgtattgatgcgcttgtcgagaagaaaatccgctttatcgagctactgaaggaaaagcgccaggcgctgattacccatgcggtcaccaagggcctagaccccaacgtgaagatgaaggattccggcgttgagtggattgggcaggtgccggagcactgggaggttaaacccttcttcgcgttggtgtcagaactgaaccgaaagaatgtgggcctagctgaaaccaatatactgtccctcagctacggaaacatcatccagaagcctgaaaccagaaatatgggattaacaccagagtcttatgaaacctatcaaattgtagagtctggcgaagttgtatttaggttcaccgatctgcaaaacgacaaacgtagcttgcgttcagcccaggttacgcaaagaggaatcattacctctgcgtatatggccgtgaaaccgcacagtattggttctacatattttgcatggttgatgcgttcatatgacctttgtaaagtcttttatgcaatgggtggaggattgaggcagtcattgaagtttgaagacgtcagaaggcttcctgtacttatccctccagtcggtgaacagagtgaaattaccaatacaattaatgcaggaactgctcgcattgatgctctagtcgagaaaacagaacaaagtatcaccctgctcaaagaacgtcgcgctgcctttatcaccgccgctgtcaccggccagattgatttgcgaggaaaacaa

SEQ ID NO: 22954 - DNA, 2001 bp, Klebsiella pneumoniae
tcacaggctgactttatttggaagaatgcggaagacctgtggggtgacttcaagcatacggactttggcaagatcatcttgccgtttaccctgctacgccgtctggagtgtgcgctggagccgacccgcgaggcggtgagagaagcgcatgacgctttcaaggatgccgatgttgagctggataccattctgcgctcaaccgctgaataccccttctacaacacctctgaatactccctcggcaccctgggtagcaccaagacgcgccgcaatctggaagactacatcgccctgttttcggataacgcccgcgctatcttcgaggagtttgagtttggcaatacggtgatccggctggagaaagcgggcttgctgtataagatttgccagaacttcgccaagatcgacctgcacccggacgtggtgccggatcgggtgatgagtaacatctacgaacacctgatccgccgctttggtgctgaggtcaatgaaggagccgaggacttcatgacgccgcgtgacatcgttcacctggcgaccgcattgctgcttgacccggatgatgccctgtttgaggccagcccaggtttgattcgtaccctgtatgacccgacctgtggcacgggtggcttcctcaccgatgctatgaaccatgtgggggactacggtaaccgcgacaagatcccgccagtgctggtgccgcacgggcaggagttggagccggaaacccatgcggtttgtgtggccggtatgctgatccgccgtttggagtcggaccctggccgagatctgtcgaagaacattcgtcagggcagcacgctgtccaacgaccagtttgccggtgagcgtttccactactgcctgtccaatccgcctttcggcaagaaatgggagaaggacaaaaccgctgtcgaagcggaacacaaaaaaggcgagctgggccggtttggtccgggcctgccgaaaattagcgatggctccatgctgtttttgatgcacctggcgagcaagctagaactgccgatcaacggcggtggccgcgccgctattgtgctgtccggttcgccactgtttaacggcggtgccgcgtctggcgaatcggaaatccgccgttggttgctggaagacgacctgattgaagccattgtagctctgccaacggatctgttcttccgcaccaatatcgccacctacctgtggattctgtccaacaagaagcctcaggagcgcaaaggcaaggtgcagttgatcaacgccaccgacctgtggacttcaatccgcaacgagggcaacaagcgccgtattgtcagcgatgagcagcgccgccagattctggacatctacgcagcaggcgaaaccggtgcgctttcccggatgctggactaccgtacctttggctaccgccgtatcagggtcctgcgcccgctgcgcatgaccctagagctggataaggtgggtatggagcggttggaagccgaagctgcctgggaaaagctctctgacgcgcatcagacattctggcgcgaagccctcaagccgctgatcgggcaaacgcagccctatagctgggcagaaacctttgttagcaactcgatcaagtccgatgaagccaagcagctcaaggtcaaatccaacaagacattgatcaccgcgctaatcaacgcctttggtcacaaagacccgaaagccgagccagtcacggattcaaacggcgagctggtgccagacacagatttaactgattacgagaacgtcccctatctggaggacatcgacgactactttgcccgcgaagtgcttcctcatgtgccggatgcctggctggatgagagctttaccgatgccagggatggtcaattgggccgcgttggctacgagatcaacttcaaccgcttcttctaccagtaccagccgccgcgcaagctgcatgatattgatgaagacctgaagcaggtagaagccgagattgccgcgctactggcggaggtggccagcgaatga

SEQ ID NO: 22955 - DNA, 1634 bp, Klebsiella pneumoniae
cagtagcaactcaggctgagaaaaaatatcaggatctgcagcaaagcattaaaggcctcactctaaataataacggccaatacggtacccaaaaatgggaggttatcagttcgaataaagagcatgaccactggggataccggttctatccatctgggatcacaaaagctcaggttgatgcagcgcagaatgatgcggtgaacaaacgaaatgctgctaccagtcttgccagtcaggcaacggccgctgagcaggccagtctgcaggcatcagctgcctataatgctgcagaaacgcgccgtcaggctgcccaggctgcattagcgtccgcagaacaagccgccgctgctgaacgtaaacgccaggaggcggaagcagcagccgccgctgcggcagaaaaaaaacgacaggctgatgcagcagcgaaagccgctgaggaggccagagccattgctgaaaaagcaaaagcgctgcaggcccgttgtacagccgcagataaactgaaatcttcagagattcaggctgtcaggggtatcccggctacagcggcaccttttgctattcctctgacctggtcaactgcgtcacgtggaggttttactctgtcggctgatgctgcggccagcctgggagctttcatcagcgaggctctggcgacgttaagtgtcgctgtggtggctaacccagtagcattaaccattgccggtcttgtgttatcgaaatcagttggcgtcggtagtgatatggtgcccggtcgggatatcagttcgatgatgcctggcgatgcgtttggtctgcctgataccgcggcattgaataaagcagcagatcagaaaacatctgtcagtatgccggttcgtggccgtctggttatgaatgatagcggcattctggatgttcagctggtcaaaaccaatactgccggtgccgtgaaggtcgctcgtgctgtactggataaggaaaccggctactggggctatactcttcccgctgtcgcagatgtaccggcgcaaactatttttgtcagcccggctgacgcacttggtgcaaatggaccactgacgctaagcgggccggtaccactaccggagcgtattctgcataccggtgatcagatttcggcgccacaggctacagataaaaccgtgacgccggtagcggatgacctcgattttgacgatattattctggtgtttccaccggagtccggcctaaaaccgctgtatgtgatgtaccgtagccctcgtaacatgcccggtacagtaagcggcaaagggcagaacgttggcaataactggatggggggggccagtaccggggatggtgctcctgttccttcccagattgcggataaattacgcgggaagactttcggtagttttgattcttcccgtcgggcgttctggaaagcggttgctgacgattctgcactaagcaagcaatttagtgaagctgatattaatcagatgaaagctggaagggcacctactgcggactttttagaatcagtagggaaacgtgttaaaattgaattacaccacgaaaaagaaatatctcaaggaggggctgttatggatgtcgataacattaaggcgctaacacctaaaaatcatattgagacacataaaggaaaa

SEQ ID NO: 22956 - DNA, 138 bp, Klebsiella pneumoniae; identical to SEQ ID NO: 19174

SEQ ID NO: 22957 - DNA, 213 bp, Klebsiella pneumoniae
atgccggtaattaaagtacgtgaaaacgagccgttcgacgtagctctgcgtcgcttcaagcgttcctgcgaaaaagcaggtgttctggcggaagttcgtcgtcgtgagttctatgaaaaaccgactaccgaacgtaagcgcgctaaagcttctgcagtgaaacgtcacgcgaagaaactggctcgcgaaaacgcacgccgtactcgtctgtac

SEQ ID NO: 22958 - DNA, 1470 bp, Klebsiella pneumoniae
atgaagaaattgctccccattcttatcggcctgagcctgaccgggttcagcgccatgagccaggcggaaaacctgcttcaggtttaccagcaggcacgcatcagcaaccccgatctgcgtaaatcggcagccgatcgtgacgccgcgttcgaaaagatcaacgaagcgcgcagtccattactgcctcagcttgggctgggagcggattatacctataacaatggctatcgcgacagcaacggcatcaattcaaacgtcaccagcggctcgctgcagttaacgcaggttctgtttgatatgtcgaaatggcgcgccctgacgctgcaggaaaaaacggcagggattcaggatgtcacgtatcagaccgatcagcaaacactgattctgaataccgcgacggcctattttaaagtgctggccgccatcgacacgctttcctataccgaagcgcagaaacaggctatttaccgccagttggatcaaaccacgcagcgctttaacgtaggcctggtggcgatcaccgacgtgcagaacgcccgttcacaatacgatgccgtgctggcgaacgaagtcaccgcgcgtaacgatctcgacaacgccgtcgaagaactgcgtcaggtcaccggtaattactatccggagctggcctccctgaacgtgaatggcttcaaaaccaacaagccgcaggcggtcaacgccctgctgaaggaagcggagaaccgcaacctgtcgctgctgcaggcgcgtctgaaccaggacctggctcgcgagcagattcgccaggcgcaggacggccatttgccgacgctcagcctatccgcgtcgagtgggatatcgaatactagctacagtggttcaaaaacccataataatcctcagcaataccaggataacgatgccgggcagaaccaaatcggcctgaacttctctctgccactgtatcagggcggcgcggtgacctcgcaggtcaaacaggcgcaatacaacttcgtcggcgccagcgagcagctggaaagcgcccaccgcagcgtcgtgcagactgtgcgttcatcgtttaacaacgtgaacgcctccatcagcagcatcaacgcctacaaacaggcggtggtctctgcgcaaagctccctggatgccatggaagctggctactcggtgggtacgcgtactatcgttgacgtcctcgacgccaccactacgctgtataacgctaagcagcagctctcgaatgcgcgctacaactacctgatcaacgagctgaacattaagtcggcgttaggtaccctgaacgagcaggatctggtcgccctgaacaacacgctgggtaaacccatctccacctccgcagatagcgtcgcgccggaaaatccgcaacaggatgccaccgctgatggctacggcaacactaccgcggcggtgaagccggcgtccgcacggaccacccagagcagcggcagcaatccgttccgtcag

SEQ ID NO: 22959 - DNA, 639 bp, Klebsiella pneumoniae
atgaagccgtatcagcgccagtttattgagtttgcgcttagcaagcaggttcttaagtttggcgaattcacgctgaaatccgggcgcaagagcccctatttcttcaacgccggcctgtttaacaccgggcgcgatctggctctgctgggccgtttttatgccgaggcgctggtggattccggaattgagtttgacctgctgtttggcccggcctacaaaggaatcccaatcgccaccaccaccgcggtggcgttagccgagcatcatgaccgcgatctgccttactgctttaaccgcaaagaggcaaaaaaccatggcgaaggcggcaatctggtcggtagcccgctgcagggccgggtaatgctggtggatgacgtgatcaccgccggtacggcgattcgcgaatccatggagattatccaggcccagggcgcgctgctggcgggcgttctgatctccctggatcgtcaggaacgcggccgcggcgagatctccgccattcaggaagtggagcgggattacggctgccaggttatctcaatcatcactctgaaagagctgatcgcttacctggaagaaaagccggagatggcggaacacctggcgtcagttcgcgcctatcgtgaagcctacggcgtc

SEQ ID NO: 22960 - DNA, 456 bp, Klebsiella pneumoniae
atgaaaacaatcgctattggtgcggatgatgccgcctatgcttttcgcgattccatcgtcgcttatttgaatgggttgggaattaacgtcgcggattacagcagcgataaacgccaggggagtaccgtttatccggatgttgcccatgcggtggcgatgtcgattaaacagggcgaacacgagcgtgggatcctgatctgcggtaccggcattgggatgagtattgtggccaataaagtccccggggtccgcgccgcacagtgtcacgataccttctccgccgagcgagcgcgtaaaagtaacaacgcgcagattattacccttggcgcgcgggtgattggcgctgagctgggcaaaaaaattattcaggcgtggcttgagtccgaatatgaaggcggcggatccgcgcccaaagtggaacgtattgattattacgaacaccagcatgccagagat

SEQ ID NO: 22961 - DNA, 252 bp, Klebsiella pneumoniae
atgaccgataaaatccgtactctgcaaggtcgcgtagttagcgacaaaatggagaaatccattgttgttgctatcgaacgtatggtgaaacacccggtttacggtaaattcatcaagcgtacgaccaaactgcacgtacatgacgagaacaacgaatgcggtatcggcgacaaggttgaaatccgcgaatgccgtccgctgtccaagactaagtcctggacgctggttcgcgttgtagagaaagcggttctg

SEQ ID NO: 22962 - DNA, 171 bp, Klebsiella pneumoniae
ttgctcctgaagccaccattttttgataaaccgcaccagcagtacgaaaccgataaatggctgtcttgccctgttctcgtgaaattccatcctctacctcctcaccttgccagaggctttatcttcacggatttgggggtaaggaatacagattcacaaaacgcttttctt

SEQ ID NO: 22963 - DNA, 2160 bp, Klebsiella pneumoniae
atgtcatcagttacaaacaaagctacatctaaagatgcggatgaaattgatttaggtcgccttattggtgagtttatagatcatcgcaagcttattatttctgttacttctctattcacattagtcgcattaatttatgctatttttgccacgcctatatatcaagctgatgctctaattcaggttgaacagaaacaagcgaatgccatacttagcaatcttagccagatgcttccggatagccaacctcaatcggccccagaaattgcgttgattcgttcccggatgattttaggaaaaacagttgatgatcttaacctgcaggcgagggtaaaacaaaaatacttcccactattagggcgtggttttgcacgcttatcgggagataaacctggtagtctatctatttctcggttgtatataccggaaaatgataatgatactcctgagatcatactaactgttaaagagagaaatagtttttctatctccgtaggtgactttattatcaatggtaaagttggagagctacttgatgagcggggaatttcgctcaaagttgatgaaatcagcgcaaaaccagggactgagttttcaattgtctatgttagtcgattgaaggctataacagatcttcaggacgatatagccgtagctgatcagggaaaagatactgggatgctaacactctccttgaccggcgataatccagtattaattgaacgtattcttaatagcattagtgaaaactatttagctcagaatattgcacggcaagccgcacaagacgcgaaaagtctggagtttttgagtaagcaactaccccaggttcgtagtgatttggatcaggccgaagataaattaaaccaatatcggagaaagagtgattccgttgatttatctcttgaggcaaaagccgttcttgatcaaatagttaatgtcgataatcagcttaacgaattaacttttcgtgagtcagagatatcccagctctataccaaggaacatcctacgtataaagcattgatggaaaaaagaaagactctacaagatgaaaaagctaagcttaataagcgcgtttctgctatgcctgaaacgcagcaggaaatattgcgtttaagtcgtgatgtagaatctggtcgtgctgtatatatgcaattattaaaccggcagcaagagttaaatattgctaaatccagtgccattggtaatgtgcggattattgataatgccgtcactcaacctaaacctgttaaaccgaaaaaagtatttattgttctttcagggattatattcggtattgtgttctctgcaggaattgtactacttagagttttcttgcgtagaggaatagaaacccccgagcagcttgaagaacttggtattaatgtctatgcaagtatcccagtagcagaaaaatttacgaaaagtgtggtgcagagaaaagggtggaataaaaagtctgttgatgaaattcagggcttcctggcagttgataacccagcggatctggcaattgaagctatccgcagtttgcgcaccagtctccatttcgccatgatggaggcaagaaataatgtgctaatgatttctggtgcaagccctaatgcagggaaaacctttgtaagttcgaacttagccgcagtgatttctcagacagggaaaaaagtattgtttattgataccgatatgcgcaaaggctatacgcataagttgttcaatgaaagcaataccaatggcctgtctgatattctgtcaggtaaaattgaaattaataaagcaataaaaacgatcacatcagctggttttgattatatttcacgaggaatggctccaccaaacccagctgaattattaatgcacaggcgttttggtgaactgctgaattgggccagtgaaaactacgatattgttgttctcgatactccaccgatattagccgtcacggatgcagcagtaattggtaattatgcgggaacaacattaatggttgcccgatttgagctgaatacggcgaaagaaatagaggtcggtattaaacgcttcgagcaaactggtgtagtcgtaaaaggttgcattcttaatggtgttgttaaaaaagcaagtagttattatggttatggatataaccactatggttattcctacaaggataacaaa

SEQ ID NO: 22964 - DNA, 504 bp, Klebsiella pneumoniae
atgaaagatacaaatcagctgatcggcatctttaatactctgatggttgccaataattatccggtagccaatccagtagcctcggatgtaatggcggacctcatgcgcgaagcagcgccagctgaatgggacgctcagaagagatgggtttacgaggatatccagcgcctgatgatcaaccgtctggactactctgatatgttcaaaatcatggatgggcttgagtacaacggtttgatgctgtatagcatggtacaagcagaaaacggcgaaccagtatggtcgaatatctacatccgcaactttgagacgcgtgataacgagatctatgtcgatccgaacctttctgacaaggtactgattggcgaagatggtatgtccgtgtttgcctacagcttcacagataactgtttcgagatccgcgataaagcatctacgggttatgttattgagtcacataccaacttcagcgcattgttgtccgcgcttattgatatggtgagc

SEQ ID NO: 22965 - DNA, 484 bp, Klebsiella pneumoniae
agtttactcacgctgtccctcggcgttgcgctgctgccgttagcgcaggcggcgacgacgcctgcccaggagcatctgctggagcaggtccgcctcggcgaggccagcaatcgtgaagacctggtgcgccagtcgctgtaccgtctggagctgattgatcccaacaacccggagctgattgccgcgcggatgcgctatctgctgcgtcagggggatgccgccggggcgcaaaaagagctggaacgactgacgaagctggcgccggactccccggagctgaaggcgtcgcgcaatgagatgaaaagcaacaccggcgagggccgccaggcgctgcagcaggcgcgactgctgggcgtggccgggaaggtcgatgaagccatcgccgcctatgaaaaactgtacggcggggtgccggatgacgttgacgtcgccattgaatactggacgctggtggcgcgcctgccggcccgccatagcgaaggcg

SEQ ID NO: 22966 - DNA, 363 bp, Klebsiella pneumoniae
atgtctatcactaaagatcaaatcattgaagcagtatccgctatgtccgtaatggacgttgttgagctgatctctgcaatggaagaaaaattcggtgtttccgctgctgctgctgtagctgtagctgctggcccggttgaagctgctgaagaaaaaactgaattcgacgtaattctgaaagctgctggcgctaacaaagttgctgttatcaaagcagtacgtggcgcaactggcctgggtctgaaagaagctaaagacctggtagaatctgctccggctgcactgaaagaaggcatcagcaaagacgacgctgaagctctgaaaaaatctctggaagaagctggcgctgaagttgaagttaaa

SEQ ID NO: 22967 - DNA, 261 bp, Klebsiella pneumoniae
ttggctaatatcaaatcagctaagaagcgcgccgttcagtctgaaaaggctcgcaagcacaacgcaagccgtcgctctatgatgcgtactttcatcaagaaagtatacgcagctatcgaagctggcgacaaagctgctgcacagaaagcatttaacgaaatgcaaccgatcgtggaccgtcaggctgctaaaggtctgatccacaaaaacaaagctgcgcgtcataaagcaaacctgactgcacagatcaacaaactggct

SEQ ID NO: 22968 - DNA, 189 bp, Klebsiella pneumoniae
atgaaagcaaaagagctgcgtgaaaaaagcgttgaagagctgaacgctgagctgctgaacctgctgcgtgagcagttcaacctgcgcatgcaggctgcaagtggccagctgcaacagactcatctgctgaagcaagtgcgtcgtgatgttgcacgcgttaagactttactgactcagaaggcgggtgcg

SEQ ID NO: 22969 - DNA, 135 bp, Klebsiella pneumoniae
gtggccgcgataagtacgagtcggtgcgaattcacccagtttgtgaccgaccatttcgtcggaaacaaatactggaacgtgctgacgaccattatggacagcgatggtcaaaccgatcatgttaggaaagatcgt

SEQ ID NO: 22970 - DNA, 1539 bp, Klebsiella pneumoniae
agtgattccgactccgacagtgattcggattcggacagcgactccgactccgacagcgactcggactctgacagcgactccgattcggacagcgactctgactccgacagtgactcggattctgacagcgattccgactccgacagcgactcggattccgacagcgactcggactcggacagcgactccgactctgacagcgactctgactctgacagtgattccgactctgacagcgattcggactccgacagtgattcggattcggacagcgactccgacactgacagcgactccgattctgacagcgactccgactcggacagcgactccgactccgacagcgattcggactccgacagcgattcggattcggactccgattccgactccgactccgattccgacagcgactctgactccgacagtgattcggactctgacagcgattcggactccgacagcgactcggattcggacagcgactccgactccgactccgactctgactctgactccgactcggacagcgattcggattccgacagcgactcggactccgacagcgactccgactctgacagcgattcggattccgacagcgattccgactccgacagtgattccgactccgacagcgactccgattcggacagcgactctgactccgacagtgactcggattctgacagcgattccgactccgacagcgactcggattccgacagcgactcggactcgaacagcgactccgattccgacagcgactcagactctgacagcgattcggattccgacagcgattcggactccgacagcgattccgattccgacagtgattcggactctgacagcgattcggattctgacagcgactccgattcggacagtgattccgactctgacagtgactcggattctgacagcgattctgactcggacagcgactctgactccgacagtgattcggactccgacagcgactctgactctgactccgattcggacagcgattccgatgctgacagcgattcggactccgacagtgattcggattctgacagcgattcggattccgacagtgactccgattctgacagcgactccgattctgacagcgactccgactcggacagcgactccgactccgacagcgactcggactccgacagcgattccgacagcgacagcgactccgattccgacagtgactcggattcggacagcgactccgattcggacagtgattccgactccgacagcgactcggattctgacagcgattcggattctgacagtgattccgattcggacagtgattcggatgctgacagcgactctgactccgacagcgattccgattctgacagcgactcagactcggacagcgactccgattctgacagtgattcggactctgacagcgactcggattctgacagcgattccgattcggacagtgactcggatgctgacagcgactccgattcggacagtgattccgactccgaattccaccacatggagctcagctccgag

SEQ ID NO: 22971 - DNA, 1425 bp, Klebsiella pneumoniae
atgacgcttctcgtcaggaattttattgtcagtatagcattggcaatatctgatttttttagttttgttatttcattatatttagcgataggtgtcttatctattacaattagcgattatgaaacagtcatctcagtcaatcaacttgaaggatggaaagcacttcattggctattaggtttatgctgcatagcttggtattcaatgagactacgccattatttttaccgtaagaccttttggtttgaactaaaagaaatattacgtacattagtcatttttgcaatcattgaaattgcggttatggcatttgcaagctggtccttttcaagatatttgtgggtactaacgtggttttttgttttgttactggtgcccttggcaaggatggtgaccaaacgggtgttagacgtattcggattatggcatagagacacatggataattggcagtggggctaatgcgcaagaggcctataaagcaataaatagtgagcgtaaccttgggcttgttattgtaggattcattgcagtaaccggggagcgttcggaaaataaagacattaatggtgttcctgttctggcacatgatcctgactggttatcatcaatggacaaaaaaacgcaatttattgtggccgttgagtcgcaccagagcgaagtccgtaatgcttggttgcgtaattttatgattaaaggctatcgatatatctctgttattccaacattgcgtgggatgcctctcgacagtacagatatgtcttttatttttagtcatgaagtgatgatatttcgtgttcaacagaatcttgcaaaatggtcatcgcggattcttaagagagcctttgatatcgttggatctttagccattattatcattctttcgcctgcattaatatatataagtaggaaagtaaagagggatggtggtccttctatatatgggcatgagcgtattggcaaaggtggtaaatcatttaaatgcctcaaatttcgttcaatggtaataaattctaaagaagtccttgaaaaattactagatagtgattctgaagcgaaaaaagaatgggatgcaacttttaaattaaaaaacgatccgcgaattacaaaaataggggcattcctacgtagaactagtttggatgaattacctcagttgttcaatgtcttgaaaggtgagatgagtctggttgggccgaggccaatcattactgctgaattaataaggtataacgatgaggtagattattatctgctgagcaagcctggtatgactgggttatggcaggttagtgggcgaagcgatgttgattacgaaactcgtgtatatcttgatgcgtggtatgttaagaactggtcaatgtggaatgatattgcgattctgtttaaaacaataagtgtagttctgaagaaagatggtgcgtat

SEQ ID NO: 22972 - DNA, 873 bp, Klebsiella pneumoniae
atgaataaaaaaccattggtttcagtatatataccaactcataatcgtgctgagttgcttagtaatgcagtgaaatctgtgattaatcagacttataagaatattgaaattattatatgcaatgatgggtcaggcgataatactgatgatgtggttaataagttgcaaaaagaatataaagacattccctttgtatatttgaaaaatgatagccctatgggggcatgtttcagccggaatagatgtattgctgcagcatctggatattatttgactggactagatgatgatgattattttttaccaaatagaattgaatcattaattaaggtttgtaatgaacgtaaaatagatctggtttgttctaatttgatatttaaggatgggaacaagcttaagcgaggtaaaaataattctggtgtaattacgagtattgatatgggttatgaaaatctagttggaaaccagttactaacccgtttatcttattttgaagatgttggtggctttgatacaaatttccctgcatggcaagattatgatttgtggtatcgcattataatgaaatttgggccatgtattaaaacaaatgaagcaacttatgtaatggatgttgaaaatgatagaaaaagaatatcaacatcaagtaaggcccatattggatatagatcatttattgaaaaacattctgaaacattaagtgaagaaatgaaaagttctttatttataagggatttaattaacaggaataaaaaaatacctttaaaaacacttttatcctccgggagaaaagtggcaagttttaagcacaatatgaggctttgctttcctgtcgttaattctattgcagcctttgtccgggaaataaaaaaa

SEQ ID NO: 22973 - DNA, 1119 bp, Klebsiella pneumoniae
gtgattataaagtatatttctaataaattaggtatagaactaatcaattcgggccgctttacagcaattgatgggttaagagcatatttatcattattcgttttttttcatcacttttttattttttataaatggaaagaatctggcaaatgggaaaagccagaaattttatttattgatgatttagggcaggtttccgtcgctatttttttcataattactggctttttgtttataggaaagatcacttcaggtagacattttgattttttttctgtctatatttctagattttttagaataatgcccctttaccttcttgttgttatgattactttgttttattcatttttgcttactggtctttctattcaaataccgcatagtgagcttttaaaagatatcgttaggtggttgctttttgttggtgattctgtaaatggctatacagatgcgaagagaataacggcaggtgtgacatggacgttaaagtatgagtggctattttatttttctttgccactcctgtttcttattttaaaaaataaagttgctacaacattaattataatcgtctgtatgctccttcttattaataatttcaagttccattctattattgactctagatattttatcttctttatgattggtggcattagtaactatatctgtaagttacttgagaataatataaaactcatagagattcttcgcaacagattaatttccataattttaatggtcttgttaatctatgtctttttctcaggggtaggtatatttaatatttttagcataatcagtttgctgctattctttattgcaattgtttgtggaaataatctttttggtgctttaactttaaaaggagcaaggttgcttggtgaaataagttatagtatttatttaattcacggttgtgttatcttttcaatttttatattaatgaataaattctctggcttatctttgtctgaatatttaattcttatgccttttgtcaccattgctgtggtatttatttcttcactcacatatagatttatagaggcaccctgtataaatataggtaaaaaaatccaaaatatatataggttcaatggaaaaaaagcattg

SEQ ID NO: 22974 - DNA, 441 bp, Klebsiella pneumoniae
gtgatagaaatgtttgattcaattcttgtggtttgcacaggtaatatatgccgctctccgattggagagcgatatttacgaaacttattacctgataaaaaaatcgattcagcagggactggagcacttattgagcatgcggctgataatagtgcgattaaggttgctcagctccatgggctttctttggaggggcacctctccaggcagtttacatcctctcttgggcgtcaatacgatttgatattagcaatggaaaaatcccatattgagcagatcgggcatatagcaccagaagccagggggaaaacgatgctatttggtcactggttggagcaacgcgatatacctgacccttatcgcaaaagtgacgaagccttcttatcagtttataaacttattgagcaggccggtagactttgggctcagaaattaggtgca

SEQ ID NO: 22975 - DNA, 276 bp, Klebsiella pneumoniae
gtggatgtgaaactgctgatcgccgagcgtcccggcaaggtaaaaactttgaagcagcatccgcgcaagaacaaaacggccatcaacatcgaatacatgaaagccagcatccgtgccagggtggagcacccgtttcgcatcatcaagcggcagttcggcttcgtgaaagccagatacaaagggctgctgaaaaacgataaccaactggcgatgttattcaccctggccaacctgtttcgggtggaccaaatgatacgtcagtgggagagatctcag

SEQ ID NO: 22976 - DNA, 523 bp, Klebsiella pneumoniae
ctgtcggcacatccggtctccacccgcctgagccttaacggcaccattatcgtggcccgcgacatcgcccacgccaagctgaaggagcttatcgacaacggcgaggcgctgccgcagtacgtcaaagatcacccgatctactacgcgggcccggcaaaaacgccagccggttacgcttccggctccctcggcccaaccactgccggccgcatggactcttacgttgatctgctgcagtcccacggcgcgagcatggtgatgctggcgaaaggcaaccgcagccagcaggtgaccgatgcctgccataaacacggcggcttctaccttggaacatcggcggcccggcggcagtgctcgcccagcagaaaaacaagagcctcgagtgcgtggcctatccggaactggggatggaaactatctggaaaatcgaaatgaaaaaattttcggcgtttatcccccgtaaagataaaggcaacgacttcttccccaaatccagaaaaaacagtgcgccggctgtaacagc

SEQ ID NO: 22977 - DNA, 177 bp, Klebsiella pneumoniae
gtgatatttcatcatgcaaagttgccaggcgttgagcgggacacttttgtgaaaaaaggcgtagtcgatcacaccttgcgccggagggcgcaaaggcacatcttttttctcgcccacaaggtagggtatatttcgcttttacaggagaatctatgctgcccgactcatcaacccgat

SEQ ID NO: 22978 - DNA, 285 bp, Klebsiella pneumoniae
atgaaaatcctcagtctgcgcctgaaaaacctcaactccctgaaaggggaatggaagatagactttaccgccgagccgttcgccagcaatggcctgttcgccattaccggcgccaccggggccgggaaaaccacgctgctcgatgccatttgcctggcgctctatcatgagacgccgcgcctgaacaaggtctcccagtcgcaaaacgacctgatgacccgcgataccgccgagtgtctggcggaagtcgagtttgaagtaaaaggcatcgcctaccgcgctttc

SEQ ID NO: 22979 - DNA, 1164 bp, Klebsiella pneumoniae
atgggactcatggatacactcaaccagtgcataagtgctggtcatgaaatgacgaaagcaatcgccattgcgcagtttaatgatgacagtccggaagcccggaaaataacccggcgctggaggattggtgaagcagctgatttagttggcgtgtcatctcaggctatcagggatgccgagaaagctggccggctgcctcaccctgatatggaaacccgtggaagagttgagcaacgcgttggttataccatcgagcaaatcaatcacatgcgggatgtatttggtacacgactgcgccgtgctgaagatgcgtttccgccggtgattggtgttgctgctcacaaaggtggtgtttacaaaacctccgtttctgttcacctggctcaggacctggccctgaaaggattacgcgttctgcttgtcgagggtaatgatcctcagggcacagcctcgatgtatcacggatgggtgcccgatcttcatatacacgcggaagatactctcctgcccttttatcttggtgaaaaggatgatgccagttatgcgataaaaccaacctgctggcctggccttgatatcattccgtcctgcctggcactgcatcgcattgaaactgaactgatgggcaaatttgatgaaggaaaactgcccaccgacccgcatctgatgctccgccttgctattgaaacggtcgctcatgactatgatgtgattgttatcgacagcgcaccgaacctcggtattggcacgatcaatgtcgtatgcgctgctgatgtgctgattgttcccaccccggcagagctgttcgattacacttctgcactgcagtttttcgatatgcttcgtgatctgctcaggaatgtggatcttaaaggctttgagccggatgtccgtattctccttaccaaatacagtaataacaatggttcgcagtcaccgtggatggaagaacaaattcgcgatgcatggggaagcatggttcttaaaaatgtggtacgtgaaaccgatgaagttggtaaaggccagatccgcatgagaaccgttttcgaacaggcgattgatcaacgttcttcgaccggcgcatggcgaaacgcactttcaatctgggaacctgtttgtaatgagatttttgatcgtctgattaaaccacgctgggagattaga

SEQ ID NO: 22980 - DNA, 180 bp, Klebsiella pneumoniae
gtgggtgctgtggttgtagcgggtgatggtgtagaagttcggcagcgcgtaccagtactcatagccggtccgacgtccagccgcagagctggcctgctgatgttacccagcggctgggtcgcggtacagcctgcggccgccagctgcgacacgctgtatgtagtcttgaaaccattctcc

SEQ ID NO: 22981 - DNA, 279 bp, Klebsiella pneumoniae
gaggtcgctctagaggatccccgtcttgggagccttggagatgcattggaaatgccagtgactccctggcacggggatgtaccacaaagcaaaaagaagaaggctcggacgaaccctgctggcattttactgattacacctgagtcacttgagtctttgctcataaattcaatgggctggctcaaacaggcgttttcttcagtcgcatacatcgttattgatgagtttcatgcttttattggttcagagcgtggtgtacagctgcttcctctgctcaaa

SEQ ID NO: 22982 - DNA, 315 bp, Klebsiella pneumoniae
atggactcttacgttgatctgctgcagtcccatggggcgagcaagatcatgctggcgaaaggcaaccgcagccagcaggtcaccgacgcctgccacaaacacggcggcttctacctcggcagcatcggcggcccggcggcagtgctggcccagcagagcatcaagagcctcgagtgcgtggcctatccggagctgggtatggaggctatctggaaaattgaagtggaggatttcccggcctttatcctcgttgatgataaaggcaatgacttcttccagcagatccagacctcgcagtgcgcccgctgcgtgaag

SEQ ID NO: 22983 - DNA, 1120 bp, Klebsiella pneumoniae
gaagccagcgaaaacgataaatacgtcgcgctgcagttcctgcgcaactcggatatcgccgccaaaggtattctgcccacctgccaggacaccggcaccgcgatcatcatgggtaaaaaaggccagcgcgtgtggaccggcggcggcgatgaagccgccctggcgcagggggtgtacaacacctatatccaggacaacctgcgctactcgcagaacgcgccgctggatatgtataaagaggttaacactggcaccaacctgccggcgcagatcgatctctatgctaccgatggcgatgagtacaaattcctctgcatcgccaagggcggcggctcggcgaacaaaacctatctgtaccaggaaaccaaagcgctgatcaccccggcgaagctgaaaaattacctcgtcgagaagatgcgcaccctcggtactgccgcctgtccaccgtaccatatcgccttcgtgatcggcggtacctcggcggaagcgacgctgaagaccgtgaagctggcgtccaccaaatactacgatggcctgccgaccgaaggtaacgagcacggccaggcgttccgcgacgtgcagatggagcaggagctgctgctggaggcgcagaaccttggtctcggcgcgcagttcggcggcaaatactttgcccacgatatccgcgtgatccgtctgccgcgtcacggcgcttcctgcccggtcgggatgggggtttcctgttccgccgaccgcaacatcaaagccaaaattaaccgcgacggcatctggatcgagaagctggagagcaacccggggaaatatatccctgagcatctgcgccaggccggggaaggcgaagcggtgaaggtaaatcttaaccagccgatgagcgagatcctggcgcagctgtcgcagtatccggtgtccacccgcctgtcgctgagcgggactatcatcgtcgcccgcgatatcgcccacgctaagctgaaggagcttatcgacaacggcgaggcgtgccgcagtacgtcaaagatcacccgatctactacgcagtgtcggccaagacgccggacggctctcctccggctctttggggccgaccaccgcaggccgcatggactcttacgttgatctgctg

SEQ ID NO: 22984 - DNA, 3255 bp, Klebsiella pneumoniae
atgcaatcagcagcacatcaggaaaaacacttccagcaatacatcatcgaccggttggtagagcagggctggaagctgggtgattccaagttctacgacaccgagcgggcggtgtaccccgaagacctggaaagctggatcaaaaccagcggccagcaggaaaaatgggacaagctggaacggctcaacggggccaaaacccttgaagtgctgatggatcgcttggataaagcactggagaaacaaggcaccatgcaggtgttgcgccagggtttttccattgccggttgcggcctgatcgagatgaccgaggctgcaccggaagacaagcgcaatgcagcagtcattgagcgctaccaggccaatatcctgcgcgtggtgccggagctgaagtatcacccggcccgtgaatttgccattgatctggtgctgtttatcaacggtctgccggtggcaaccgtcgaactgaagaccgacttcacccagtcctgcgaagcggccatggatcagtaccgcaatgatcgcctgccgtatgacgccaagaccaaacgccgggagccattgctgaccttcaagcgtggggcggtggtgcatttcgccatgtccgactctgaaatcatgatggcgaccaagctggatggagaaaacacctttttcctgccgttcaataaggggcgcaaggacgaaagtggcacggtacatgcgggtaacccgccaggtgagattaaggccgatggtacccaggaatacccggtagcctacttctgggaggcggtctgccagccggatgcctggctgcggattttccatagctttgtctacgtcgagaaaaaggacgttgtggatattcagggcaactggtcgaagaaagaaaccctgattttcccgcgcttccaccaatggacggcagtgaaccagatgctgaccgatgcccgcgaaaacggcgcaggcatgacctacctgtgtgaccacagcgccggttccggcaagaccagcaccatttcctggacggcccatgacttggtgaaactgcgcgaagataacggcgattcggtatttaacagcgtgatcattgtcaccgaccgcaatgtgctggacggccagcttcaggacgcggtgaagcagattgaccatcagtttggggtgatcgccgccattgaccggcagaagtcatccaagtccaagagcaagcaactctcggaggccttgttgtctggcacgccgattgtggtggtcacgatccagaccttcccctacgcgatggaagccatcatcactgacaaggccctgaaagggaaaaactttgctgtgatcattgatgaggcgcataactcgcagacaggctctaccgccgctaagctgcaagccgcgctggggatgagtgggcaaggcaagatgtccaccatgacggtggatgaattgctggaacaactgcaaaaatctcgggctcgcccggacaatatcagctatttcgcctttaccggtacgccgaagcactccactttgatgctgttcggtcgcccaacagacccgagccagccagcctctaacgataaccctccacaagccttccacctgtacaccatgcgccaggccattgaggagaaattcattctcgatgtgctgaaaggctatgtgccctacaaaacggccttcaacctttccaagcagcttgaagacagcaagcgggtaagcggcaaggccgccaaacgcgccctggcacagtggatgtcattgcatcccaccaatgtgacccagaaggtacagtttatcgttgagcacttcaccaaaaacgtcgcccaccggctggatggcaaggccaaggcgatggtcgtgaccagctcccgcgccgctgccattcgctacaagaaggcgtttgaccgctatatcgagcagcacagcgagtacggctttattcattcactggtggccttctccggcaagatgaccggtaagcaggtgatgcaccaggatgacagcgagttcaaggatgatgtgtttatcgtcgatgagaacgaagagttcaccgagcagagcatgaacccggatgtccaagggcaggatttgcgctttgcctttgaccgacctgaataccgggtgatgttggtggctgacaagttccagactggctttgatcaacccaaactggtcgccatgtatgtagacaagaaaatcgctaaccatgtggagattgtgcagaccttctcccgtctcaaccggacggcgcccggtaaggatgaggtctttatcatcgactttgtgaacgacccggagaacgtgcgtcaggcctttaccacctatgacaagggtgctcacatcgacgaagtgcaagacctcaatgtggtctacgagatcaaggagcgcttggacgagcacggcctgtacgacgagaaggacttggctgcgttcaaggaagcacgcttcaagaccatccgcgacatcacccataccaaatcgccacagcacaaggcgctgtatgccgccactgctggagcgacggccttgtataacgacaagatgaagatgctgcgcgatggcatggcgacctgggaggcggcttttgagaaggcccgcgccaagggtgatgaggcgggcatgaagtctgctgaccaccatcaggatgagtacgccgagcaaatcaaggcactgattggcttcaagtcggatttggggcgtttttgtcgtacctactcctatatcgcccaactgattgattttggcgacccggagctggagaacttcgccgccttcgccaagctattgcaaaagcgccttcagcacgaagcacctgaaaccgtggacttgaccggcctggtgctcaccggttttgacatcaatgctcgttcagataacgcggaggacgaaggcgaaaccccggtactgcaaccggtaggtgcaggcggtggtggtgtggcgggcgacaagccgaaattcgtcaaagagattattgagcgactcaacagcctgtttggtgaggcaacgccgatccaggatcaggtggccttcgtgaatcagatcttttcaatcgccggcgaaagcgatgtggtgatggctcaggtggaaagtaacacccgcgaacaggccatgaaaggcaatttgcccggcgctgttcagcaagcggtggttcgtgctttgtccagtcatcagaagctggcaacccaagtgctcaagtctgaccgtcagggcatgaccgcattggttgatatggtgtatgacctgctgcgcgaaggcaaagacatcgatctgggtatggat

SEQ ID NO: 22985 - DNA, 405 bp, Klebsiella pneumoniae
gtgctggaaagaatcattagctactccagcctggcggcggtgctgttaacggcgacgctgaccgcggcgggagcgatctctttcccggtggcgctgtgtctggtgattggcgccaacctgggatcggggctgctggcgatgcttaacaacagcgcggcgaacgcggcggcgcgccgggtggcgctgggcagcctgctgtttaagctggtggggagcctgattattctgccgttcgtccatccgctggccgcggcgatgcacaagctgccgttggccgagtccgagctggttatctacttccacgtcttttacaacctgctgcgctgcatcgcgatggtgccctttgccggaccgatggcgaagctgtgccagcgtctgatccgcgatgagcccgagctggataac

SEQ ID NO: 22986 - DNA, 303 bp, Klebsiella pneumoniae
ggctactccgtctccgagcgccagcagtttgtcggcgaattcaccggagagcgtaacggcccgctggcggccgtggcggtcaaaaataagttcagcgtcggcgacagccttgagctgatgaccccgcagggtaacgtcaacttcacccttgagcatatggagaatggcaaaggcgaaaccatgccggtggccccgggcgatggctataccgtctggttgcctgtgccggacgacctgcccctgcagtatgccctgctgatgcgcaactttactggtcaaacaaccagaaatccgcacggtaac

SEQ ID NO: 22987 - DNA, 546 bp, Klebsiella pneumoniae
aatgcaggttaacctggcttatcgaaattaatacgactcactatagggagaccggcagatctgatatcatcgccactgtgctggaaagggttccagaaccgccaagcaagctgctgaaagtcagccgtctggggccgaaagcctttgaacacgtgcgcgggcttcctgcgtatcaaccacggcgacaacccgctggatgcctccaccgttcacccggaagcttacccggtggtcgaacgtattctggccgccacccagcaggcgctaaaagatctgatgggccatagcagtgcgctgcgccacctgaaggcagtggacttcaccgatgagaagtttggcgtcccgacggtcaccgacattatcaaagagctggaaaaaccgggccgcgatcgcgtccggagtttaagaccgcgaagttcgccgatggtgtggagaccatgaatgacctgctgccgggaatgattctggaaggtgccgtcaccaacgtcaccaacttcggcgcgtttgttgatatcggcgttcatcaggacggactggtacacattt

SEQ ID NO: 22988 - DNA, 415 bp, Klebsiella pneumoniae
gtgctggaaagcattgacctgtcacttatcaccaagcaggcacactggaatatgcgcggtgcgaactttatcgccggtgcacgaaatgctggatggcttccgtaccgcgctgaccgaacatctggacatccatggccgagcgcagcggtgcatctgggcggcgtcgtccctgggtaccactcaggtcattaacagcaaaccccgctgcagagctacccgctggacatccatcacgttcaggatcacctgaaagccctggctgaccgctacgcggtagtggcgaacgatgtgcgtaaggcgatcgacgagagcaaaagacgaagacactgcagatatcttcaccgcggcttcccgcgatctggataaattcctgtggttcattgaagccaacatcgagtaaggctttgccgccggc

SEQ ID NO: 22989 - DNA, 474 bp, Klebsiella pneumoniae
tcgccatcgctctattttgattatcaccatcatcgtgatatccaggaagatttccgtccacaccgcttcgccaacgagtttgcccgcagcaaggcggccagcgaggaggtgatcaacctgctggcgcaggctaacccgcatacccgttttaccattctgcggccgcagagcctgtttgggccgcacgacaaagtctttatcccccggctggcgcaaatgatgcagcattatggcagcgtcctgctcccgcgcggcggcagcgcgctggtcgacatgacctattatgaaaacgccgtacatgcgatgtggctggcgagccagccggcctgcgatcatcttccctccgcccgcgcgtggaatatcagcaacggcgaaccgcgcaccttgcggagcatcgtgcagaaattgatcgacgagctcggcatcaaatgccggatccgctcagttccctatccctttccagcacagtggcga

SEQ ID NO: 22990 - DNA, 391 bp, Klebsiella pneumoniae
atgagcacgtctaacgacccatccaacaatgcatccgccgggaagtgccctttccacgccgagacgccaaaacagagcgccggcagcggaccgccaaccgcgactggtggccgaaccagctgcgtgtcgatctgttaaaccagcactccaatcgctccaacccgttgggtgagaattttaactacagggaagagtttaaaaagctcgattactccgcgctgaaggctgatctcagagcgctgctgaccgattcgcaagagtggtggccggcagactggggtagctatattggcttgtttattcgtatggcctggcacggcgccggacctaccgcaccgttgacggtcgcggcggcgcaggtcgtgggcagcagcgcttttgcccccctgct

SEQ ID NO: 22991 - DNA, 362 bp, Klebsiella pneumoniae
atgagtgcgatagaagtgaaaagcctggtaaaaaaattccatggccagacggtgctccatggtatcgacctggaggtacagaaaggggaagtggtggcgatcatcggccccagcggctcgggcaaaaccaccctgctgcgtagcatcaacctgctggagcaaccggagagcggcactatccgcgtcggcgatgtgacgatcgacgccggtcgcagcctcgggccgcagaaagggctcattcgccagctgcgccagcacgtcggctttgtcttccagaactttaatctgtttccccaccgtacggtctttccagcacattggagcttcagctgctcgagttctatagtgtcacctaaatcgta

SEQ ID NO: 22992 - DNA, 482 bp, Klebsiella pneumoniae
ccaatgtgctggaaagcgactttaccgaagatgcgctgatcgtcaacggcaaaccattacggtgtatgccgaaaaagaggcgcagcatattccatggcaggcggcaggcgccgaggtgattgtggagtgtaccgggttctacacctcggccgagaaatcgcaagcccatctccaggccggcgcgcgcaaagtgctgatttccgcccccgccggcgagatgaaaaccatcgtctacaacgtcaacgatgacaccctgaccccggatgacaccatcatctccgtggcctcctgcaccaccaactgcctggcgccgatggccaaagttctgcaggatgccttcggcatcaccgtaggcaccatgaccaccatccacgcctataccggcacccagtctctggtggacgggccgcgcggaaaagatctgcgcgcctccagggcggcggcggaaaacgttatcccgcacactaccggcgcggcaaagc

SEQ ID NO: 22993 - DNA, 495 bp, Klebsiella pneumoniae
ggcgcgaagcttattcgcatccgcgataacggcagcggcatcaaaaaagacgagctggcgctggccctggctcgtcatgcgaccagcaagatcgcctcgcttgacgatctggaagccattattagcctcggctttcgcggcgaagcgctggccagtatcagttcggtggcgcgcttaacgctgacttcgcgcacggcggagcagcaggaagcctggcaggcgtatgctgaaggccgcgatcaggcggtgacggtgaagccggcggcgcacccggtcggtaccactctggaagtcctcgatctgttctataacaccccggcgcggcgcaaatttatgcgcaccgaaaagaccgagttcggccacattgacgaggtggtgcgccgcattgcgctggcgcgcttcgacgtcactatcaacctcagccataacggcaaggtgatgcttggaaagctttccagcacagtggcgatgatatcagatctgccggtctcccta

SEQ ID NO: 22994 - DNA, 171 bp, Klebsiella pneumoniae
ttgccgctacaaaccagcggtggggaggggcggcgctggtggtttattaatggcgacccgttagaggccgccggcgcaagaaccacgctaatgctggataaacccggcgagtggcagttggtggtgatggatgaagcgggtcagacggcggccgccagcttcaccctgcaa

SEQ ID NO: 22995 - DNA, 491 bp, Klebsiella pneumoniae
ctgctgttctcctccagcctgggcgtcacatcgcttgggatccgcgccttcagcgcctcttccgtaagccacgtcgcgctgtatgttggcgaaggtcaggttgcggaagccaccggtgccggcgtacaagtgattagccttcagcaggcgctggcgcacagcgataaactctttgctctcagggtgcctgacctgacgccggaccaggcgacggcgatgaaaagttttgcctggcaggtcaaagacagcgggtataactatcgcggcattattcagtttatcccttatatggtcaccaaaccgctctgctcgctcaaccccttctcacgagactttcgccagcagtgcgtcagtggcctggctaaagcgcagctgggcgatgcggcaagcggcgacaagaaagcgtggttttgctcggagttgtcagcgaggcctttgtccgagccgggcatccgctgacgctcgcgcaggcggcgtggatcagtcccttt

SEQ ID NO: 22996 - DNA, 507 bp, Klebsiella pneumoniae
cagcccggcgatgccgtcgcctgcgtgccgctgctgccttgcttccagtgcccgcaatgccagcgcgagtattgctctttatgtaaacagtatcagttcgtcggctcacgcagcgaaggcggcaacgccgaatatgtggtggtaaagcgcgccaacctgttccgcctgccggaccagatgccaattgatgatggcgcgtttatcgaaccgataaccgttggcctgcacgcttttcatctggcgcagggctgtgaaggtaaaaacgtgattattatcggcgccggcaccatcggcctgctggcgctacagtgcgcccgcgaactgggcgccaacagcgtcacggcgatcgatatcaatccgcagaagctggagctggccaaaaccctcggcgcaacccatgtgttcaacagtcgcgagatgagcggccaggctttccagcacagtggcgatgatatcagatctgccggtctccctatagtgagtcgtattaatttcgataagccaggt

SEQ ID NO: 22997 - DNA, 348 bp, Klebsiella pneumoniae
atgctccatgatggcgataagcagaaagcgcgtctgctgcaacgcttcacgccgatggcggcgcagaccacgaagcagggggtacccccggagaaagtgaatatcgccaccggcaaaaccagcggtcaggggccagtgggcttctccgcggcaatgctgccgtttttacaggacgacgaggcccggtcggtgcaacgccagcgcgtcgccgataactatcccggcgcggatgcctactacagcgcagttctgacgctgttcggccagggttgggatcaacaccgttttcgtttcacggcgagtggcgaattacaacctgactggaaccaggaatgcgcaagctctcac

SEQ ID NO: 22998 - DNA, 341 bp, Klebsiella pneumoniae
gaaattaaaaccgactatcaggcggtggtcaccgggattaacgaaggctacaaacgcttcgccaccggcacctacgccctgtggtacccggtggttctgcgcgcgcaaatcaaacgcatgatcaaagagttagaagccaccggcattcgcaaatcctgcagattgagctggcggtgcgtccggacagcgaccagcgcggcatgaccgcctccgggatgatcgtcatcaacccgccgtggaagctggagcagcagatgaataacgtgctgccgtggctgcacagcaaactggttccgaccggcaccggccacgccaccgtcagctggatcgtaccggagtaa

SEQ ID NO: 22999 - DNA, 228 bp, Klebsiella pneumoniae
gtgccgcgtagccaaccgggcgcgctgattgagagcgaagagcaggcgctggcgcaaacgctggaaatggtgcagcacaaccgggtgcgcagcctgagcggcgaatgggcgcatgtaaaggcggaaacggtctgcctgcatggcgatggcgctcacgcgctcgatttcgcccgacgcttgcgcgccgcgtttgccgggcggaatatcgacgtcagcgcggacctcgag

SEQ ID NO: 23000 - DNA, 417 bp, Klebsiella pneumoniae
gtgggtaacccggagctgctcaggcagttcgatatcccggtggtgcacgatctccccggcgtgggtgagaacctgcaggaccatctggagatgtatctgcagtacgagtgcaaagagccggtatcgctctacccggcgctacagtggtggaaccagccgaagatcggcgccgagtggctgttcggcggcaccggcatcggcgccagcaaccagttcgaagcgggcggttttatccgcagccgcgcagagttcgcctggccgaacattcagtaccacttcctgccggtggcgattaactacaatggctccaacgcggtgaaagagcacggcttccagtgccacgtcggctcgatgcgttcgcccagccgcggccacgtgcgcctgaagtcgcgcgacccgcacgcccatccggcgatc

SEQ ID NO: 23001 - DNA, 321 bp, Klebsiella pneumoniae
caggccgtggcgattggcgcggatgacgccgccctgacgctgcatcgtaagctgtgcgccgccgccactgagctgctgagccgggcgctgccggcgatcctcgccggcaccaccgatgagcgtccgcaggatcacagccaggcaacctatgtggggcgtcgtaccccggaagatggccggctggactgggagctgccggcgcagaccctgcacaatctggtgcgtgcggtctcggatccgtggccgggcgccttcggctacgccggagcgaacaagctttccagcacagtggcgatgatatcagatctgccggtctcccta

SEQ ID NO: 23002 - DNA, 141 bp, Klebsiella pneumoniae
atgggccatggcacatgtaaaaacgccattctgatcgtcgagtttgcccgcgagctggagatccaggggaaaggcatcatggaagccgccctggaggcgtgccgcctgcgtctgcgcccgatcgtgatgacctccatcgcc

SEQ ID NO: 23003 - DNA, 287 bp, Klebsiella pneumoniae
gtggtggcagtgtggttgagcatctgcgcctcgcactttatgttccgccgccgccatctgcagcagggtaaggcgctgagcgatctccagtatcgcgctcctggtatccggtggtgcccgttctgggctttgtgctgtgcctggtggcctgcgtgggcctcgcttttgacccgagccagagaattgcgctgtggtgcgggatcccctttgtggccctgtgctatggtgcctggtatcttactcgttcacggaatatgactcaggagccccaacatgtcgcagactaa

SEQ ID NO: 23004 - DNA, 723 bp, Klebsiella pneumoniae
atgttgcgcgatggcctggaggcggcgctgattgtcagcctgatcgccagctatctgatacgcacccagcgcggcaacgtggattggcgtgatgtggattggcggtgatcctcggcggtgggctgctgtgtcttggcttaggcattttgtatcgaacggaaagccaccggtgaagtttccgtcatgcgtgaacaggagctgttcgaatgggatcgtcgctggatcgattgctcggtggtcgcatcctgagcgtgcgatcggtcttcttggattgccgcaatgtctcacgcaatctgtccaagctgcagctggagcaggccgtggtacacaggcgcgtgcacgcgcctgtgtaattcaccaccggcatgggcgctggtgactgattggtctttcttcgcgggtcgctccgtgaggggctggagctcgggtcttctttctgctggcggccttccatgcaggagtgtcggcatctggccgccgcttggggcgcgctgctgggtctggccaccgcgtatcgtgctgggtcgttcctgatctactggtggcggtatcctgccttaagccttgagcgtgttcttcaccctggaccagcctgtttattctgctggtgggcgcctggcctggccgcctggggcgatccgcgccttccacgaggtcgggcctgtggaacctgtcccaggataccgccttcgatctgagcgatgtgctgtcgacgcatacagc

SEQ ID NO: 23005 - DNA, 382 bp, Klebsiella pneumoniae
atggataagatcgaagttcggggcgcccgcacccataatctcaaaaacatcaacctcgttatcccgcgcgacaaactcattgtcgtcaccgggctttccgggtctggcaaatcttcactcgctttcgacaccctgtatgccgaaggccagcgtcgctacgtcgaatcgctctccgcctatgcgcgacagttcctgtcgctgatggagaagccggacgtcgaccatatcgaagggctgtcgccggcgatttccatcgaacagaaatcaacctctcacacccccgctcgacggtgggtactattaccgacaattcacgactatctgcgtctgctgtacgcccgcgtcggcgaaccgcgctgtccggatcacgacgtgccgctgg

SEQ ID NO: 23006 - DNA, 443 bp, Klebsiella pneumoniae
cgcgccctgcgtcaggtccgcagatcgtcgtcggtaccccgggtcgtctgctggaccacctgaagcgcggcaccctggacctctccaaactgagcggcctggtactggatgaagcagatgaaatgctgcgcatgggctttatcgaagacgtagaaaccattatggcgcagatcccggaagggcatcagaccgcgctgttctccgccaccatgccggaagctatccgtcgcattacccgtcgctttatgaaagagccgcaggaagtgcgcattcagtccagcgtgacgactcgcccggatatcagccagagctactggactgcctacggcatgcgtaaaaacgaagcgctggtgcgtttcctggaagcggaagactttgatgcggcgattatcttcgtccgtaccaaaaacgcgaccctggaagtagctgaagcgctggacttt

SEQ ID NO: 23007 - DNA, 416 bp, Klebsiella pneumoniae
gtcagctgccgctttgaaaaagcctgctccagctatctacccaaccgcacgcttgaggcggcgatgtatcaggcggtctgtcattacggtacccccgcctggagcgacgaggaacgcgcttttgccgcggcgatccgcgccaccctcagcgccaacgatattaacaacagcctgaacaatattgccggcaccagtggcgaggaaggcaaaacgttcgctcgtcgccaccgcgacaccttggctgattgatgaggtggcgccctgggcggccacgggataacgtcctcgccggatccaccgacgtcggcgatgttagctggaaagcgccggtggcccagtgcttcagcccgtgcttcgcggtgggtaccccgctgcacagctggcagctggtgagccagggcctttccagcacattg

SEQ ID NO: 23008 - DNA, 487 bp, Klebsiella pneumoniae
atggtcgccgtctcgctgggctttggcgcgctgatcggcgtcccgctggggattgtgctggtggtttgccgtcccggcggcatcgtggccaacccggtggtgcatcacggcgctgaatccgctgattaacgtgctgcgctcgctgccgtttatcattttgctgattgtgatcctgccctttaccagactgctggtgggcaccactatcggcaccgcgggagccatcgtgccgctgatcgtctttgtcgccccctatattgcccgactagtggagagctcgttgctggaggtggatgaggggatcctcgaggccgcggacgccatgggcgcaacccccctacagactgtctggcactttatgctgccggaggcagcggcatcgctgattctggccctcaccacggcgaccatcggtctgctcggcgccacagccatggcgggtacagtgggcggcgggggaatcggggatctggctattacctacttt

SEQ ID NO: 23009 - DNA, 418 bp, Klebsiella pneumoniae
ccggccttccatcagatcagcgagctggtgaaatcccagtcacgcgagggcgatccaagactttgccgcgtactataaggagccgtcgaagcaaatcgacaatccgcagctgaacctggtctatatctatggcgaaagtctcgagcgcacctattttgataacgacgccttccccaacctcacccctgagcttggcagaattaaagatgaggccattgatttcagcaataccatgcagctgccggggaccgattacactatcgccggcatggtcgcctcacagtgcggcattccgctgttcgcgccgttcgaaggtaatgcctcagcctcagtctccagcttctttcacactagaatatttgccttggcagatattctgaagaactccggttacgagaattactttgtgcagggggct

SEQ ID NO: 23010 - DNA, 491 bp, Klebsiella pneumoniae
gaagtgaacgatgaagtccacgccgcactactggaagtgatcgacatgcgtcgcgaactgcttgatcagttcaacaaacagttgggtaaccagctgatgatggccatcaacctgcagatcaaccagcagcagctgatgagcgtctcgagcagtctgaaggaaattctgacccagcaaattttctgggtgaacagcaataaaccgatggactgggagtggattaaggccttcccggaggcgctgaaaggtcagtttaaggcgatgaaaatcaccgtgaactgggaaaaagcgtggcctgcggtgtttgtcgctttcctggccggtttaccgctgctgttgattgccggcctcatccgctggcgtctgcagtggctcaaggattatcaggcaagcttgcttcccaggtgggacagctgcgcaacgatacccagctgcatacgccgaaggcgatcctgatcgatctgatccgcgccttaccggtggtgctgttg

SEQ ID NO: 23011 - DNA, 123 bp, Klebsiella pneumoniae
ggcgttgagctgggcaaacagctggctaaccgcatcctgccggagctgaaagacggcagcgaagttagcagccacgacagctctactaacggcctgattaaccgttataaagcctggcgcgca

SEQ ID NO: 23012 - DNA, 336 bp, Klebsiella pneumoniae
aatcagaccggcagcgcctggagatgaaaccatcgccgcctgcgtgctgggcgggatctcgctgctcgcggtaccggcacgctgctggcgcgtttctcggcgcctttttcctcacccaatcgacaccgtactggtgctgttccgccttcccgcctggtggaacgactttatcgccggtctggtgctgctcggcgtgctggtgctcgatgccgtctgcgtcaggcgctggcccgccatcagcgggcgctgaagtacagccgtttccagcccggtaacacaggggggaaacaggttgcccgctttcctgaacgcaaagcaagaggtggcttaaatgaa

SEQ ID NO: 23013 - DNA, 341 bp, Klebsiella pneumoniae
gtcttgtctattatccgcctcaccctgctggcgctgctcgcctgcgtccctctgctggctcaggccgcgccgtaccagctcaccaccgcctggccggttaacgtcggcccgctgaatccccatctctatacgcccaaccagatgtttgcccaaagcatggtctatgaaccgctggtgaagtatcaggctgacggcagcgtacagccctggctggcaacccgctggcgtcactccgccgacggcaaacctggtggttcaccctgcgcgacgatgtggccttctccaacggcgaaccgtttaatgcccaggccgcggcggccaattttcaggcggtgctggcc

SEQ ID NO: 23014 - DNA, 456 bp, Klebsiella pneumoniae
atgtgctggaaagcggtccgcgataccgccgtgctggtggagcgccagcagaccatcggcgcgctgcaggagcgctataccgagctgcagccggtgctgcgccaggtcggcgatctggagcgtattctggcgcgtctggcgctgcgtaccgcccggccgcgcgatcttgcccgcatgcgtcatgccctgcagcaactgcctcttctgcgtgagctgctggccgacgttgacagtcagccggtgcaaaaattgcgcgagaaaatgggcgagttcaacgaactgcgcgaactgctggagcgcgcggtgatcgacgccccgccggtgttggtccgcgacggcggggtcatcgccccgggctatagcgaagagctggacgagtggcgggcgctggccgatggcgccaccgattatctcgataagctggagatccgcgagcgcgagcggctgggcctcgat

SEQ ID NO: 23015 - DNA, 361 bp, Klebsiella pneumoniae
atgagcacgtctaacgacccatccaacaatgcatccgccgggaagtgccctttccacgccgagacgccaaaacagagcgccggcagcggcaccgccaaccgcgactggtggccgaaccagctgcgtgtcgatctgttaaaccagcactccaatcgctccacccgttgggtgagaattttaactacagggaagagtttaaaaagctcgattactccgcgctgaaggctgatctcagagcgctgctgaccgattcgcaagagtggtggccggcagactggggtagctatattggcttgtttattcgtatggcctggcacggcgccggcacctaccgcaccgttgacggtcgcgcggcgcaggt

SEQ ID NO: 23016 - DNA, 421 bp, Klebsiella pneumoniae
tacgccgcaaccctcagggtcagtaccgtcaccgccgccgcgtcaatctctaccgcacgcgcaatgagataaaacgcgataacgacgcctggttctataccgtgtttcagctcgccggcgaagccatcatcgaacaggacgatcgccaggtgacgctggcgcaggcgatatcacgttaatcgacgccgcccgcccatgctccatcgtctggcagcagacctcgcgtcagcctcgctgctgctgccgcgccagcggtggcgcccacaggggacatcactaccgcctgccggctggacaaatctctgccaatggtccagctcagccagcgactgctgctggaaagcatgggcggcacgacgctctccgccagcgagagcgaagccgcgctggaggcgatcgcctgcctgttgcgccccgtgct

SEQ ID NO: 23017 - DNA, 168 bp, Klebsiella pneumoniae
atgattaagaaaatcggtgtgttgacaagtggcggtgatgcgccgggcatgaacgcagcaattcgtggcgttgtgcgcgcggcattaacggaaggtctggaagttttcggaatctatgacctttccagcacattggagcttcagctgctcgagttctatagtgtcacc

SEQ ID NO: 23018 - DNA, 519 bp, Klebsiella pneumoniae
gcggtggcggcggagctgcacgaccgcatgatggagagcgtcttcgacgcgctggaagcgggcgaaaagctgttcgctcaccatcagccgacgccggtgaccagcgttgacctgctgggcgaagggcgtcaggcgctgattgacgccaacctccgtctgggtctggcgctggccgacgacgaaattgactacctgcaggatgcgtttacccgcctgggacgcaacccgaacgatatcgagctgtatatgttcgcccaggcgaactcagagcactgtcgccacaagattttcaacgccgactggatcatcgacggcgaacagcagccgaagtcgctgttcaaaatgatcaaaaacacctttgaaaaaacgccggactacgtgctgtcggcctataaagataatgccgcggtgatggaagggtctgaagtcgggcgctatttcgccgaccatcagaccgggcgctacgacttccatctttccagcacagtggcgatgatatcagatctgccggtctcccta

SEQ ID NO: 23019 - DNA, 453 bp, Klebsiella pneumoniae
gtgcaactgccttatccgctgctgcattttatcggcaccagcgctggtcgcctttcccgtcgctttcttaaacgccgcgaacatatcgcccggcgtaatatcgaactctgcttcccggacatgtcgccagcggcgcgcgagacgctgatcgatcaaaactttatgtcgctgggaatggggcttatcgaaaccggcatggcctggttctggagcgacgagcgggtcaaaaaatggtttgatgtcgaggggttcgccaaccttaatcacgcgcttagcggtgggaaaggggtaatggtcgtcggcgtgcactttatgtcgctggagctgggcggccgcgcgatggggctgtgtcggccaatgatggccacctaccggccgcacaacagcccgctgatggagtgggtgcaaacccgcggtcgcctgcgttcgaacaaagcgatgatcgatcgcaac

SEQ ID NO: 23020 - DNA, 540 bp, Klebsiella pneumoniae
ctgctgtgggtcgtccactttctggtcctgcgcggtgtccagacggcagcggggattaacctggtggccaccctcgccaagcttctgccgctgggcgccttcgtcgcgctcgccgccctggcctttcagctggatacgttccgcctcgattttagcggcctggcgctgggcgtgccggtatgggagcaggtcaaaaacaccatgctgatcaccctgtgggtgtttatcggcgtggagggggcggtagtcgtgtccgcgcgggcgcgacacaagcgcgacgttggccgcgcgacgctgctggcggtgctgtcagccctcgcggtgtatctgctggtcaccctgctgtcgctgggcgttgtgccgcgcagcgaactggccgaaatgcgcaacccgtcgatggcgggactgatggtcaggctgatggggtcatggggggagatcgtcattgccgccgggctgatcgctttccagcacagtggcgatgatatcagatctgccggtctccctatagtgagtcgtattaatttcgataagccaggt

SEQ ID NO: 23021 - DNA, 306 bp, Klebsiella pneumoniae
atgcaaaccgttttagcaaaaatcgttgccgacaaagcgatttgggtggaagcccgcaaacaacaacaaccgttagccagttttcagaatgagatcgtcccgacgcagcgcaatttctatgacgcgctggccggcacccgcaccgcgtttattctcgagtgcaagaaggcctcgccgtcgaaggggttgattcgcgaggatttcgatccggcagcgatcgccagcatctacaagcactacgcctcggcgatctcggtgctgtgtgatgagaaatatttccagggcagcttcgatttcctgccgatc

SEQ ID NO: 23022 - DNA, 411 bp, Klebsiella pneumoniae
gtgaagcgcgactgggagatcatcagcctgctggccagcgaattgggctatccgatgcactatgagaacaaccagcagatctgggacgagatgcgcgagctctgcccgctgttctacggcgtgacctgggagaaaatgggcgatatgggccatgtccagtggccgtgcccgaccctcgatcatcccggcacgccgtggctgtataaagacaaccgcttcgacaccccctcgggtaaagggcagctgttcgccaccgcctggcgcgcgccggcggagcgcccggatgacgagtggccgctggtgctctgcaccgtgcgggaagtcgggcattattcctgccgctcgatgaccggcaactgcgccgcgctgcagtcgctggccgacgagccgggacgggtgcagatgaatccc

SEQ ID NO: 23023 - DNA, 162 bp, Klebsiella pneumoniae
ggcttcggcttcatcactcctgacgatggctctaaagacgtgttcgtacacttctctgctatccagaacgatggctacaaatccctggacgaaggtcagaaagtatccttcaccatcgaaagcggcgctaaaggcccggcagctggcaacgtaacttctctg

SEQ ID NO: 23024 - DNA, 302 bp, Klebsiella pneumoniae
cttcagaccttgtagcccagccggccgacctatcgcaaagccaatccgtcagatgcgccgatcatgatcctgacgctgacctcggacacctactcccagggtgagctgtatgatttcgcctccacccagctggcgcagaccatcgcgcagatcgacggcgtgggcgatgtcgacgtcggcggcagctccctgccggcggtgcgcgtcgacctcaacccgcaggcgctgtttaaccagggcgtgtcgctggacgcggtgcgcacgccatcagcgacgccaacgtgcgcaaaccgcagggggcg

SEQ ID NO: 23025 - DNA, 378 bp, Klebsiella pneumoniae
gtgctggaaagggagaagatcgtcgccctcggcgtgggggtgcataccagcaaagcgaccaccgccatcgtgcgcgaggccgacggcctgcggctgaactttgccgacggcggcgcgttgcggaccgacatggtggtcttctcggcggggatccgcccgcaggacgcgctggcccgcggctgcgcgctgcaggtgggcgaacgcgggggaattcacatcgacgaccagtgccgcacctctgacccgaacgtgctggcgataggcgaatgcgccctgtgggacaataaaatttacggtctggtggcgccgggctatcagatggcgcgcatcgccgcggccactctcgcaggagaggacgcctgctttagcggcgccgac

SEQ ID NO: 23026 - DNA, 321 bp, Klebsiella pneumoniae
atgagtaactggccttatccccgcatcgtcgcccatcgcggcggcggtaaactggcgccggagaacaccctggcggctatcgacgtcggcgcccgctacgggcacacgatgattgaatttgacgccaagctgtcgaaggacgggcagatctttctgctgcatgacgataatctcgaacgcaccagcaatggctggggcgtggcgggcgagctggcgtgggacgatctgctgaaggtcgatgccggtagctggttcagccgtgaatttaagggcgagctttccagcacagtggcgatgatatcagatctgccggtctcccta

SEQ ID NO: 23027 - DNA, 198 bp, Klebsiella pneumoniae
gtgttcgtctccccggcgacgctgatcccccgcccggataccgaatgtctggtagagcaggcgctggcgcgtctgccaaccgcgccgtgccgtattctcgacctcggcaccgggaccggcgccattgccctggcgctggccagcgaacgtccggactgtgaggtcaccgcagtggacgtgatgccggacgccgtggcg

SEQ ID NO: 23028 - DNA, 217 bp, Klebsiella pneumoniae
atgatccagtatctgaacctcttcttttacgatatctacccttacctgtgcggcaccgtctttctggtgggcagctggctgctgctacgattacgggcagtatacctggtgcgcctcatccagccagatgctggataagcgcgggatggtgctatggtcgaacttatttcatatcggcattctcggcatcttctttgggccatctctttggcatgct

SEQ ID NO: 23029 - DNA, 311 bp, Klebsiella pneumoniae
atgagccaaacatcaaccttaaaaggccagtgcatcgcagagttcctcggtaccgggttgttgatctttttcggcgttgggtgcgtggctgcgctcaaggtcgcgggagccagcttcggacaatgggaaatcagcatcatctggggtctgggcgtcgccatggcgatctacctgaccgccggggtctccggtgcgcaccttaacccaagcggtgactaatcgcagcatgtggcttgttcagccctgcttcgaatggccgcaaagtggttccctttccagcacagtggcgatgatatcagatctgccggtct

SEQ ID NO: 23030 - DNA, 438 bp, Klebsiella pneumoniae
cgtttaggcgacgtgcaggcgatcccaggccgtccggtcccggccgatgccctgaccgatgcggatgccctaatggtgcgttcggtcacccgggtcaatgaagcattgctcgccggcaaggccattaagttcgtcggcaccgctaccgccggcaccgatcacgtcgatcaggcgtggctgcagcaggcggggattggtttctctgcggcgcccggctgtaacgccattgcggtggtagagtacgtcttttcatcgctgctgatgctggctgaacgcgacggctttgcactgcgcgaccgcaccgtcgggatcgtcggcgtcggtaacgttggcgggcgactgcaaaagcgcctggaagcgttggggatcaaaactctgctctgcgacccaccgcgcgccgatcgcggcgacgaaggtgactttccagcacagtggcga

SEQ ID NO: 23031 - DNA, 454 bp, Klebsiella pneumoniae
gtggtgttgatcactcaatcttcttccgagtacagcatcagtttctgcgtgccgcagagcgactgcgcacgtgccaaacgggcgatggaagatgagttttatctggagctgaaagaggggctgctggagccgctggcgattatggagcgtctggcgatcatctccgtggtgggcgacggaatgcgtaccctgcgcggtatctcggcgaaattctttgcggcgctggcccgcgccaatatcaatatcgtggcgatgcccagggctcttccgagcgctcaatttcggtagtggtcagcaatgacgacgccaccaccggcgtgcgcgtgacccatcagatgctgttcaacaccgaccaggtgattgaagtgttgtcatcggcgtcggcggcgtcggcggcgcgctgctagagcagatcaagcgccagcaggggtggctctttccagcacattggagc

SEQ ID NO: 23032 - DNA, 465 bp, Klebsiella pneumoniae
atgtgctggaaagagcagaccacgcagactacgaccacagcagcgggtagcgccgccgaccagggcgtaccggccagtggccaggggaaactgattacggttaaaaccgacgtgcttgagctgactatcaacaccaacggtggcgatattgagcaggcgctgcttctggcgtatccaaaaacgctgaaatcgaccgaaccgttccagttactggaaaccacgccgcagtttgtctaccaggcgcagagcggcttaaccggccgtgacggtccggataacccggcaaacggcccgcgtccgctgtacaacgtcgataaagaggcgtttgtgctggccgatggccaggatgagctcgttatcccgctgacctacactgacaaagccggcaacgtcttcaccaaaaccttcaccctgaagagcctttccagcacagtggcgatgatatcagatctgccggtctcccta

SEQ ID NO: 23033 - DNA, 598 bp, Klebsiella pneumoniae
ggcagatctgatatcatcgccactgtgctggaaagcttccgtgctaataccgtggaaaaaaccggcgaaaaccgttatcgggtatggccgaacgagatgccagcggatctgcataaagtgcgcccccatcagccgctcaaccgcaacctcgatcataactggcaacaggcgctgctaaagacctccagcgaacgccgcatcgcggtagacgtgacgttgagcggctggcaggagcagctggttctcaccatgacctgtgaagatggcgtcagcgtgacccacacccttgacggggagttcgccgaagctaaccaggcggagaaagcgttggccaacctgcgtgacggtgtcacaaaactggggcaaaccatctactatgcgcgcgaggtgcaggttaatctgccgccgctgtttgtgcccaacagcctgctcaaccagctgcgtcgggaaactgcggagatgctggatgaagcgcgcctcaacgcctggcagcgtggcacccgcaagccggtctccgtaccgcgccggtctacccggagacccatctctccttctttccagcacattggagcttcagctgctcgagttctatagtgtc

SEQ ID NO: 23034 - DNA, 519 bp, Klebsiella pneumoniae
atgggtaacaacgtcgtcgtactgggcacccaatggggtgacgaaggtaaagggaagatcgtcgatctcctgactgaacgggctaaatatgttgtgcgctaccagggtggtcacaacgccggccatactctcgtaatcaacggtgaaaaaaccgttctccatcttattccatcaggcattctgcgtgaaaacgtcaccagcatcatcggtaacggcgtcgtgctgtctccggccgcgctgatgaaagagatgaagggcctggaagaccgtggtatcccggttcgcgagcgtctgctgctctctgaagcctgcccgcttatccttgactatcacgtggcgctggacgtggcgcgtgaaaaagcgcgtggcgcgaaagcgatcggcactaccggtcgcggcattggcccggcttacgaagataaagtcgctcgtcgcggtctgcctttccagcacagtggcgatgatatcagatctgccggtctccctatagtgagtcgtattaatttcgataagccaggt

SEQ ID NO: 23035 - DNA, 318 bp, Klebsiella pneumoniae
ttgttcatcctgtttgctgacctgactccgaaacgcatcggtatgattgcgcccgaaacagtggccctgcgcatcatcaacccgatgcgcttctgcctgttagtcttccgcccgctggtgtggttgtttaacggcatggccaacatgatcttccgcatcttcaaactgccgatggtgcggaaagacgatatcacttccgatgatatctatgccgtggtcgaggccggtgcgctggccggggtgctgcgcaagcaggagcatgagctgattgagaacgtgttcgagctggagtcccgcaccgttccttcctccatgaca

SEQ ID NO: 23036 - DNA, 747 bp, Klebsiella pneumoniae
atgaaattaaatagccgagcgcaatctgcacagaatccgcacaaccactccccgatcgtgctggtccacggtctgtttggcagcctggacaacctgggcatcctcgcccgcgacctgatcgccgaccatgatattgtgcaggtcgatatgcgcaaccacggtttgtcgccgcggtcgccagagatgacctaccccgccatggcgcaggatctgcttgatacgctcgacgcgcaccagatcgagcgcgccacctttatcggccattcgatgggcgggaaagcggtaatggcgcttaccgccctggcgcctgaacgcatcagcggtctggtggctatcgatatcgcgccggtggattatcacgttcgccgccatgatgagatcttcgccgctatccgcgccgtcagcgaatccgccgccagcacccgccagcaggcggcgcaggtgatgcgcgagcacctgcaggaagaaggcgtgattcagttcctgctgaaatcattcgtcgacggcgactggcgcttcaacgtgccggtgctgtgggaccagtatccgcatatcgtcggctgggaaaccatcccggcctggccgcacccgacgcagtttattcccggcggcaactcgccctatgtgaccgacgcctaccgcgacgcgctgctggcccagttcccgcaggcccgggcccacgtcatcgccggcgccggacactgggtccatgccgagaaacccgaggcggtgttacgcgccatccgc

SEQ ID NO: 23037 - DNA, 528 bp, Klebsiella pneumoniae
gtgctggaaaggggcgcctgcgatatgggcgtgctgccgaacctgtttcccggctatcaggaggtcaccgaccccgccgtgcgggcgaaattcgccgccgcctggggcatcgacccggcgctgatggacgaccaggtcggcacccgcatcaccgaggtgccgcataaagcgctgaccggcgagatcaaagcctattatattatgggcgaagatccgctgcagaccgaagccgacctcggcctggtgcgcaaaggcatcgaggcgctggacttcgtggtcgtgcaggacatcttcatgaccaaaacagcggaaatggccgatgtcctgctgccggccacctcctggggcgagcacggcggcgtcttcacctgcgccgaccgcgggttccagcggtttgaacaggcgatccctccggcggggaatgtgaagcgcgactgggagatcatcagccctttccagcacagtggcgatgatatcagatctgccggtctccctatagtgagtcgtattaatttcgataagccaggt

SEQ ID NO: 23038 - DNA, 549 bp, Klebsiella pneumoniae
atgtgctggaaagagccggcgcagcggctgattaccgatctctacgacgcaggcgtcgatgcgctgatcgtccaggatatggggatcatggagctggatctgccgccgattgagctgcacgccagcacccagtgcgatattcgcagtgtggaaaaagcgaagtttctctccgacgccggcttcagtcagatcgtgctggcgcgcgaactgaacctcagtcaaatcaaagccatttacgaccacactgacgccactatcgaattctttatccatggcgcgctgtgcgtggcctattccgggcagtgttacatttcgcacgcccagaccggacgcagcgccaaccgcggcgactgctcgcaggcttgccgcttgccgtataccctgaaggacgatcaggggcgggtggtggcctatgagaaacatctcctgtcgatgaaggataacgatcagaccgccaacctggcggcgctgatcgacgctggcgtacgctccttcaaaattgaaggccgttacaaagacatgctggaaagctttccagcacagtggcga

SEQ ID NO: 23039 - DNA, 234 bp, Klebsiella pneumoniae
atgtctgtaattaagatgaccgatctggatctggctggtaaacgcgtttttatccgtgcggatctgaacgtaccagttaaagacgggaaagtaaccagcgacgcacgtatccgtgcatctctgccgaccattgaactggcgctgaagcagggcgcgaaagtcatggttacttctcacctgggtcgtccgaccgaaggcgagtacaacgaagaattctttccagcacagtggcga

SEQ ID NO: 23040 - DNA, 369 bp, Klebsiella pneumoniae
atggcgctggtaaatgccttcggctatgtgctgctggaggaggagctgtacaacaaaacctatgtcgaacgctataccgaagggctggatgcttaccgcgaggcggtgaaggattacgccccggaagcggtggaagggattgtcggggtcagcgcgcgggaaatccgggaggcgatgcgcatgttcgccgccgccccatccgccaccattatgtggggcatgggggtcacccagtttggccaggcggtggacgtggtgcgcggcctggcaagcctggcgctgctcaccggcaacctgggacggcccaacgtcggcgtggggccggtccgcgctttccagcacattggagcttcagctgctcgagttcta

SEQ ID NO: 23041 - DNA, 677 bp, Klebsiella pneumoniae
ttgccgatcactcacgtgatccgcgccgaagatcatatcaacacacgccgcgccagatcaacatcctcaaagcgctgaatgcgccggtgccggtttatgcgcacgtgtcgatgatcaacggcgatgacggtaaaaaactttccaagcgccacggcgcagtgagcgtgatgcagtaccgcgacgacggctacctgccggaagcgctactcaactatctggtgcgcctgggctggtctcatggcgatcaggagattttcactcgcgaagagatgattgagttcttctcgctgggcgcggtgagcaaatccgccagtgcctttaacaccgataaactgctgtggttaaaccatcactatatcaataccctgccggcggaatatgtggcaacgcatctgcagtggcatatcgagcaggaaaatatcgacactcgcaacggcccgcagctggctgagctggtgaaactgctgggcgagcgttgcaagacgctgaaagagatggcccagagctgccgctacttctatgaagagttcgctgaattcgatgccgacgccgcgaaaaaacatctgcgtccagtggcgcgtcagccgctggaagtggttcgcgataagctggcggcgattagcgactggacggcggaaaacgtccatcacgcgattcaggcaactgctgatgactga

SEQ ID NO: 23042 - DNA, 605 bp, Klebsiella pneumoniae
gtcgagctggcgatcgaagccggctgtaactgcgtggcgtcgacctacggcgtgctggcctcggtgtcgcgccgctacgcgcatcgcatccctttcctggtgaagctcaaccataacgaaacgctgagctaccccaccgaatacgaccagaccctctacgccagcgttgagcaggcgttcaatatgggggcggtggccgtgggagcgacgatctatttcggctcagaacaatcgcgtcgtcagatagaagagatttccgccgcctttgagcgggcccatgagctgggcctggtcaccgtgctgtgggcctatctgcgcaattcggcgttcaagaaagacggcgtcgactatcatgtttccgctgacctgaccggtcaggccaaccacctggcggctaccatcggcgccgatatcgttaagcaaaagatggcggagaataacggcggctacaaagcggttaacttcggctataccctttccagcacagtggcgatgatatcagatctgccggtctccctatagtgagtcgtattaatttcgataagccaggttaacctgcattactgaatcggcatgcagtacccgggaattcaacccgcctaatg

SEQ ID NO: 23043 - DNA, 680 bp, Klebsiella pneumoniae
cagtgggggatgcaaccctcggaactgccggcatctattcttaaacgtcttcctgttcgttttaactatgatgataattattttaaccacaaatttcagggtatgccgaaatgtggttatacgcagatgattaagtccattctcaatcatgagaatatcaaggttgacttacagcgggaatttatcgttgaagagcgaactcattacgatcacgtattctatagcggtccattagatgcgttttttggctaccaatatggccgtctgggctatcgaacattagattttaagaagtttacctatcagggtgattaccagggatgcgcagtgatgaactattgttctgttgatgtgccctatactcgcatcactgaacataaatatttttctccctgggaacaacacgacggctctgtttgttataaagagtatagccgttcttgtgaagaaaatgatattccttactatcctattcgccagatgggagagatggcccttcttgaaaaatacttgtcactggccgagaatgaaaccaatatcacttttgtcggtcgtcttggaacctaccgttacctcgacatggatgtgaccatcgccgaagcattgaaaacggcagaagtctatttaaattcactcactgaaaatcagccatgcctgtgtttacggtttctgtacgatga

SEQ ID NO: 23044 - DNA, 501 bp, Klebsiella pneumoniae
gtggtggtaaagcgcgccaacctgttccgcctgccggaccagatgccaattgatgatggcgcgtttatcgaaccgataaccgttggcctgcacgcttttcatctggcgcagggctgtgaaggtaaaaacgtgattattatcggcgccggcaccatcggcctgctggcgctacagtgcgcccgcgaactgggcgccaacagcgtcacggcgatcgatatcaatccgcagaagctggagctggccaaaaccctcggcgcaacccatgtgttcaacagtcgcgagatgagcggccaggcgattcagcaggcgctggaatccattcagttcgaccaggtagtcctcgagaccgccggtacgccgcagaccgtcgcgctggcgattgaggccgccggtccgcgggcgcagctggcgttggttggcacgcttcatcacgatttaaccctcccggcagccaccttcgggcctttccagcacattggagcttcagctgctcgagttcta

SEQ ID NO: 23045 - DNA, 756 bp, Klebsiella pneumoniae
atgagtaaacttgggattaatggatttggtcgtatcggacgtctggtgttacgtcgtttattagaagtcgacagcagcctggaagtggtggctatcaacgacctcacttcgccaaaggtgctggcctacctgttgaagcatgattcaaactacggccccttcccgtggagcgtcgactttaccgaagatgcgctgatcgtcaacggcaaaaccattacggtgtatgccgaaaaagaggcgcagcatattccatggcaggcggcaggcgccgaggtgattgtggagtgtaccgggttctacacctcggccgagaaatcgcaagcccatctccaggccggcgcgcgcaaagtgctgatttccgcccccgccggcgagatgaaaaccatcgtctacaacgtcaacgatgacaccctgaccccggatgacaccatcatctccgtggcctcctgcaccaccaactgcctggcgccgatggccaaagttctgcaggatgccttcggcatcaccgtaggcaccatgaccaccatccacgcctataccggcacccagtctctggtggacgggccgcgcggaaaagatctgcgcgcctccagggcggcggcggaaaacgttatcccgcacactaccggcgcggcaaaagccattggcctggtgatccctgccctgagcggtaagctgactttccagcacagtggcgatgatatcagatctgccggtctccctatagtgagtcgtattaatttcgataagccaggt

SEQ ID NO: 23046 - DNA, 132 bp, Klebsiella pneumoniae
cgcgaatatgccgccgagcagatcgatggccagcgtaaagactttatccgtctcggcgtgctgggcgactggtcgcatccgtacctgaccatggacttcaaaaccgaagccaacatcatccgcgcgctgggc

SEQ ID NO: 23047 - DNA, 360 bp, Klebsiella pneumoniae
atgaccgtacgctttggccgcgggccggtgatgcttggctttacagcggtgatgctctgcggcctgctgctgacactcttttcttccctgtggcttattttcatcggcatgctgctgttttccgctggcttcttcgccgcgcattccgtcgccagcagctggattggcccacgcgcccgccgcgcccgcggtcaggcatcatcgctgtatttgttcagctattatttgggttcaagtcttgccgggacgttaggcggggtattctggcatcactacggctggaacggcgtcggtgggtttatcgcgctgctgctccttgccgcgctgttgaccggcacctgcttacatcagcgactgaaa

SEQ ID NO: 23048 - DNA, 354 bp, Klebsiella pneumoniae
atgtgctggaaagacgataccccggattacagtaaagatcctaacggcgaagtcattgcgctggatagccatattcgtctggccaatccccgcacgccggaaacccagtccagcctgatgatgcgccgcggctacagctattcgctgggggttactaacgccggacaactggatatggggctgttattcgtttgctatcagcacgatctggaaaagggttttctgacggtgcagaaacggcttaacggcgaggcgctggaggagtatgtcaaaccgatcggcgggggctacttctttgttttacccggcgtagttgatgaaaaacactatctgggagagtcgctgctgcaggcc

SEQ ID NO: 23049 - DNA, 426 bp, Klebsiella pneumoniae
atgtgccagccgctggccatggaccgcctggtatgcggcgatgtgggcttcggcaagaccgaagtggccatgcgcgccgccttcctcgccgtggagaaccacaagcaggtggcggtgctggtgccgaccaccctgctggctcagcagcactatgacaatttccgcgatcgtttcgccaactggccggtacgcatcgaaatgctctcccgattccgcagcgctaaagagcaggcgcagatcctcgagcaggccgcggaaggcaaaatcgatatcttgatcggcacccacaagctgctgcagagcgaggtgaagctgcgcgatctcgggctgctgatcgtcgacgaagagcaccggttctttccagcacattggagcttcagctgctcgagttctatagtgtcacctaaatcgtatgtgtatgataca

SEQ ID NO: 23050 - DNA, 519 bp, Klebsiella pneumoniae
gatttaaatgccgacctcggcgaaggctgcgccagcgatagcgcgctgctgcagctggtctcttccgccaatatcgcctgcggctttcacgccggcgatgcggttctcatgcagcaaatgcagtgcgacgaggcgctgaaaatacggccgtcagctattggcgcaacacacacgagcttcccaggaccagggaaaatttcaggtcagaaccagcgatgcaagttaccagccagagacaggtctacagccacaggtgctgtatcaaattggcagcagctggcaggcaatcgtacacagccacaggggggcagagctgcaggcacagtcaaacacagcatggcatgttgtacaaaccaggcaggcagaaagagccagcacatttggcacgacagctatcagcccagtgcggtgcggcagatgcacgacagccagacacatggtgcatggttgggctggcagggcagcgagcttatccgcgccagacagcattatcagttgacacgcgccaggaagtcttcg

SEQ ID NO: 23051 - DNA, 537 bp, Klebsiella pneumoniae
gtgctggaaagcgtcgaaacctggatccgtctggcgcgggaagcaggctgcgcgcagctattcaactgtccggtctcggctattcatcaccatgctgacgggatcaccatcgataccctcgacggtgaatatcatggtaaaaagctgctggtcagcgccggcacctgggtcacccgcctgcttccggacctccctatccagccggtacgcaaggtgttcgcctggtaccaggccgatggccgttacagcagcaagaatcacttcccggccttcaccggcgagttgcccaatggcgatcaatattacggtttcccggcggaagataatgaactgaaaattggcaagcataacggcggccagccgatctccaccccgcaggaacgggtagcgtttggcgctgtcgccagcgatggttccgaatccttcccgtttttgcgtaacgtcctgcctggcatcggcggctgcctgcacggcgcctcctgtacctacgacctttccagcacagtggcgatgatatcagatctgccggtctcccta

SEQ ID NO: 23052 - DNA, 510 bp, Klebsiella pneumoniae
tatagggagaccggcagatctgatatcatcgccactgtgctggaaagctggaaaggcatcactgcgaagcgaccgcttactttcttctgctacggcgtgggcgtgctggagggcggcgagctgccggccagccactcggctcggttgctgcagttcaaagcatgggggctgccggtgagcgatcgcgtcaccctgtgccacacccccgaggaagtgcttacttactatcgtaaagtcgaggaagagcgtccccacctgggctttgacattgatggcgtggtgatcaaagtcgattcgctggcgctgcaggaacagctgggtttcgtcgcccgcgcgccgcgctgggccgtggcctttaagttcccggcacaggagcagatgaccttcgtccgggacgtggagttccaggtgggccgcaccggggcgattacgccggtggcgcgtctggagccggtccatgttgccggcgtgtctttccagcacattggagcttcagctgctcgagttcta

SEQ ID NO: 23053 - DNA, 588 bp, Klebsiella pneumoniae
gtgctggaaaggaaagagatgcctctcaccggtcagcataactacagcaacgccctggcggcgctggcgctggccgatgccgcgggtctgccgcgggccagcagcctgaaggcgctgaccacctttaccggtctggcgcaccgtttccagctggtgctggatcacaacggcgtacgctggattaacgactcgaaggcgaccaacgtcggcagcaccgaggcggcgctgaacggcctgcagctggacggcacgctctatctgctgctgggcggcgacggcaagtccgctgattttaccccgctgaagcgctacctcggcggcgatcgtattcgcctgtactgctttggtcgcgatggcgccgagctcgctgagctgcgtcctgaggtggcggtacaaactgagactatggaacaggcgatgcgtcagattgctcccctggtgaaagcgggggacatggtgctcctgtcgccggcctgcgccagcctggatcagtttaagaactttgaacaacctttccagcacagtggcgatgatatcagatctgccggtctccctatagtgagtcgtattaatttcgataagccaggt

SEQ ID NO: 23054 - DNA, 525 bp, Klebsiella pneumoniae
gtgctggaaaggtccaagctgggcctgccgggcagccgctgcgggattatcatcgccaacgaaaaaatcatcaccgccatcagcaacatgaacggcattatcagcctcgcccctggcggcatcgggccggcaatgatgtgcgaaatgattaaacgacaggatctgctgcgcctgtcagagacggtgatcaagcccttctattaccagcgggtgcaggaaaccatcgccattattcgccgctatctgccggaggagcgctgccttattcacaaaccggagggggcaatcttcctctggctgtggtttaaggatctgccgatctccaccgagctgctgtatcagcggctgaaaaagcgcggcgtgctgatggtgccgggggattacttcttccctggtctggataaaccgtggccgcacacccaccagtgtatgcgcatgaactatgtaccggacccgcaaaaaatcgaagccggagtgaaaatcctcgccgaagaggttgaatttgcctggcgcgaacaggaagca

SEQ ID NO: 23055 - DNA, 303 bp, Klebsiella pneumoniae
gtgaaagcggtagagtatttcctgaaagaaaaagtcgctgacgtcgccgagctgcacgcggtatcagagtttattcacttcgcctgtacgtctgaagacatcaataacctctcccacgcgctgatgctgaaaaccgcccgcgacgaagtggttctgccttactggcgcaaactgattgacgcggtaaaagatctggcgacccagtaccgcgatgtgccgctgctctcccgtacccacggccagccggcaacgccgtccaccatggctttccagcacattggagcttcagctgctcgagttcta

SEQ ID NO: 23056 - DNA, 189 bp, Klebsiella pneumoniae
aaactggttgatgagtccgccgtcatgtcgctcgccatcaacagtattctccagtccgagggtcacctgaacaataaggccattattttatggctgattcaggcgctggaaaccaccgatgacgtggtgaccgcggacgtgatccgaaaaacgctggagattgtcgttggctacaccatggacgatatc

SEQ ID NO: 23057 - DNA, 375 bp, Klebsiella pneumoniae
atggtggccctgacgctggcccggggcgatgaacagcaggcgcggcagctgacggaggagatactcagcggccgctttcagcccgccacaccgaccttccttaacgctggcaaacagcagcgcggggagctgatctcctgcttcctgctgcgtattgaggataatatggagtccatcggccgggcggtgaactcggcgctacagctgtcgaagcgcggcggcggggtggcctttttactctccaacctgcgcgaggccggggcgccgatcaagcgcatcgaaaaccagtcttctggggtggtgccggtgatgaagatgctggaggacgccttctcctatgccaatcagctcggcgcctttccagcacagtggcga

SEQ ID NO: 23058 - DNA, 516 bp, Klebsiella pneumoniae
gtgctggaaagttatgtcaatgactttaaccagttcgggcgtacctggcgcgtgatggcccaggccgatgggccataccgcgagagcgtggaagatatcgccaatctgcgcacccgcaataatcagggcgaaatggtgccgatcggcagtatggtgaatatcagtaccacctacgggccggatccggtgatccgctacaacggttatccggcggcggacctgattggcgatgccgatccgcgggtcctctcttcttcgcaggcgatgacgcatctggaggagctgtcaaagcagatcctgccgaatgggatgaatattgagtggacggatctcagcttccagcaggccacccagggcaacacggcgctgatcgtcttcccggtggcggtgctgctggcgttcctcgtgctggccgcgctgtatgaaagctggaccctgcctttccagcacagtggcgatgatatcagatctgccggtctccctatagtgagtcgtattaatttcgataagccaggt

SEQ ID NO: 23059 - DNA, 783 bp, Klebsiella pneumoniae
gtgctgagcgatgacgcggtcgccgcgcagctgcagtccgccactaccgcggaagagctgcgcgcgctgctgatgggagagaagcagagcgaagcgctgaagctggataacgagaccctcagtctcgacgtcgcggccagcgatctgctgaccctgcaggcgctgaacgcggcgcgtctgaaagaagttggcgctgtcgatgccgccttcgttagccacgtcattaacgatacgccgctgaacctcggtcagggcgtctggctgaacgacagtgcggaaggcaatttgcgcagcgccgtggcggtcagccgcgcggctaacgcctttacccgcgacgagcagccggtttccctgctggtcacggtagcgatggccgacgagcagccgaccgcagtgctgaaccgtctgagcaagctgctgctggacaagaaagctgaacatttgctgaaagccgacgccgccaccgtgctggcgctgctgaccagcgacgacgccattgccgaagatgtgctgagcgccgaattcgtggtgcgcaatgaacacggcctgcatgcccgtccgggcaccatgctggtcaacaccattaaacaattttccagcgacatcaccgtcaccaatctcgacggttccggcaagccggctaacggtcgcagcctgatgaaggttgtggcgctgggtgtgaaaaaaggtcaccgtctgcgttttaccgcgcagggtgaggatgcgcaacaagcgctggatgcgattggcgaagcgatcgccgcaggccttggggagggcgca

SEQ ID NO: 23060 - DNA, 444 bp, Klebsiella pneumoniae
gtgctggaaaggtatctgttcctcagccggacttataaaaacgtcgacgtggtctatatccgccaccatacccaggcaaaagaggtggatgagcacgaattcttctattctcaggaaaccggcggcaccattgtctccagcgccctgaagctgatggatgaagtggtgcaggcccgctatgatccggcgcagtggaacatctacgccgcccaggcgtcggatggcgacaactgggccgatgactccccgctgtgccacgaactgctggcgaagaaaattctgccggtggtgcgttattacagctatatcgaaattacccgccgggcgcatcagaccctgtggcgcgagtatgaacacctgcaggcgacctttgataatttcgccatgcagcatattcgcgaccaggaggatatctacccggtattctttccagcacagtggcga

SEQ ID NO: 23061 - DNA, 447 bp, Klebsiella pneumoniae
ttggcgacggctatcgccttcgcgctggcgattggcgcgctggccggagcttttaacggcctgctggtcgtggggctgcgcatcccggcgatcgtcgcgacgctcggtacgctggggttgtatcgcggggtgatgttgctgtggaccggcgggaaatggatcgaaggcttgcccgacagcctgaaatcgctctcggagcccgcgtttatcggcgtgtcgccgctgggctggctggtgctggcgctgctgctggcgggcggctggctgctgtcgcgcaccgcctttggtcgtgatttttacgccgctggcgataacctcgccgccgcgcgccagctgggcgtggcggtcaaccgcacgcggatgctggcctttaccctcaagggtatgctggcggacctctttccagcacatttggagcttcagctgctcgagttctatagtgtcacc

SEQ ID NO: 23062 - DNA, 501 bp, Klebsiella pneumoniae; identical to SEQ ID NO: 19919

SEQ ID NO: 23063 - DNA, 474 bp, Klebsiella pneumoniae
atgatgctggaagacgcccggccgtcgctgctgatcgccacggaggaccagctggcccgcttcagcgatattccggggctggaaagcctctgctaccagcagccgctggccgccggggatgaggcgccgctggcgctgtcaaaaccagaccataccgcctacatcatctttacctccggctccaccgggcggccgaaaggggtgatggtcggccagaccgccatcgtcaaccgcctgctgtggatgcaggatcgctatccgttatctgccgacgacgtggtggcgcagaaaacgccgtgcagtttcgacgtgtcggtgtgggaattctggtggccgtttatcgccggcgcgcagctggtgatggccgagccggaggcgcaccgcgacccgcaggcgatgcagcagttcttcgcccgctacggcgtgaccaccacccctttccagcacattggagcttcagctgctcgagttcta

SEQ ID NO: 23064 - DNA, 333 bp, Klebsiella pneumoniae
atggcggagaataacggcggctacaaagcggttaacttcggctataccgacgatcgggtgtacagcaaactgaccagcgataaccccatcgatctggtgcgctaccagctggccaactgctatatgggccgcgccgggctgatcaactccggcggcgcggcgggcggggagaccgaccttgccgacgcggtgcgcacggcggtgatcaataaacgcgccggcggcatggggctgatcctgggccgcaaagcgtttaagaaatcgatggccgacggcgtgaagctgatcaatgccgtgcaggatgtttatctggatggcaaagtgactatcgca

SEQ ID NO: 23065 - DNA, 594 bp, Klebsiella pneumoniae
gtgctggaaagaggctacgctattgagtacgatttcttcgacccgcgcgatctgaagccaacgcttgagagcaaatttattcagggtctgttcttcgccggccaaatcaatggtaccaccggttatgaagaggcggcggctcaggggctgctggccggacttaacgccgcccgcttctctgcggaaaaagagggctgggcgccgcgtcgcgatcaggcttacctcggcgtgctggtagatgacctctgcaccctgggtaccaaagaaccgtaccgcatgtttacttcccgcgctgaatatcgtctgatgctgcgcgaagacaacgccgatttgcgtttgaccgaacaggggcgcgagctgggtctggtggatgacgaacgctgggcgcgctacaacgagaagctggaaagcatcgaacgtgaacgccagcgtctgaaatccacctgggtgaatccgcaggcagagagcgccaacgaagtgaacgctcacctgaccgcgccgttgtcgcgtgaagccagcggcgaagatctgctgcgtcgtccggaaatgacctacgctttccagcacattggagcttcagctgctcgagttcta

SEQ ID NO: 23066 - DNA, 246 bp, Klebsiella pneumoniae
atggaactgaccccccgagaaaaagacaagctgttgctgtttaccgccgcgctggtggcggagcgtcgcctggcccgcggcctgaagctcaactatccggagtccgtggccctcatcagcgcctttattatggaaggcgctcgggacggcaaaagcgtggcctcgctgatggaggaaggccgtcacgtcctgacccgcctttccagcacattggagcttcagctgctcgagttctatagtgtcacc

SEQ ID NO: 23067 - DNA, 522 bp, Klebsiella pneumoniae
gtgctggaaagggatcagccgggcgtggttggcccaatcaaacagatcgaagccctgcagcagaaaggctacccgctggcctacgtcggcgacgtggtcgggaccggttcttcacgtaaatccgccaccaactcggtgctgtggtttatgggcgacgatatcccgaacgtgccgaacaagcgcggcggcggcctgtgtctgggcggtaaaatcgcgccaattttcttcaacaccatggaagatgcgggcgcgctgcctatcgaagttgatgtgtctaacctgaacatgggcgacgtaatcgacgtttacccgttcaaaggcgaagtgcgtaaccacgagaccaatgaactactggccagcttcgagctgaaaaccgatgtgctgatcgacgaagtgcgcgccggcggccgtattccgctgatcatcggtcgcggtctgaccaccaaagcgcgtgaagcgctgggcctgccgcacctttccagcacattggagcttcagctgctcgagttctatagtgtcacc

SEQ ID NO: 23068 - DNA, 438 bp, Klebsiella pneumoniae
gtggctcgcgaagcggtggacctggtggacctggtggaaaacgtcgtggcggcgcacagcctgcccgcgcgggctaaactgatgcataccgaactgacgctgcaggcgcggcgttgcctggcagagcctgcgctattgataagcgtaatggataatctctactccaatgcggtgcactatggcgctgaatccggtaacatccgtatccatagctaccggcacggagagcaggtgcgtattgatgtcgccaacagcggcgaaccgatcccggccgcggaaaaaaacatgatattcgagcctttttaccaggggagtcaccagcgtaaaggggccgttaagggcagtggactggggttgagtatcgcccgcgactgcgtccggcagatgcaaggggagctcagcttagttgatgcgcccgcctttccagcacagtggcga

SEQ ID NO: 23069 - DNA, 378 bp, Klebsiella pneumoniae
atgaatatgcgcattatcagcgccaaagatcatggcgactctttccgcaccctggagagcggacgcgccgtggcctttatgatggatgatgccctgctggctggcgaacgcgccaaggcgaagaaaccggataactgggaaatcgtcggcaccccgcagtcgaaggaagcctatggctgcatgctgcggaaggacgatccgacgttcaaggcgctggttgatgaaaccgtcgcccaggctcagacctctggcgaagcggagaagtggtttgacaaatggttcaaaaacccgattccgccaaaaaatcttaacctcaacttcgagctgtcggacgacatgaaagcgctgttcaaatcacctaacgacaaagcactgaac

SEQ ID NO: 23070 - DNA, 471 bp, Klebsiella pneumoniae
atgccagtgttacacaaccgcatttcaaatgagacgttaaaggcgcaaatgctggctgaaaccgagccgcgcacgacgatctcgttctataaatatttcactattgtcgacccgcaggcgacccgtgatgcgctgtgggttgccttaacccagctgaaggtctttggccgcatctatctggcccgggaagggatcaacgcgcaaatcagcgtgccgcaaagcaacgttgaggctctgcgtgagtttctctatggcttcgatccggcgctggcggggctgcgtttcaatatcgctgtggaggacgatggtaagtctttctgggtgctgcgcctgaaagttcgcgatcgtatcgtcgccgacggcatcgacgatccctcgtttgacgcctccaatgtgggggagtatctcaaggcggcggaagtcaacctttccagcacagtggcgatgatatcagatctgccggtctcccta

SEQ ID NO: 23071 - DNA, 555 bp, Klebsiella pneumoniae
gtgctggaaagcccgggctactggggtaccaagccgaagatcgatcgtctggtcttctccatcaccccggacgcttccgtgcgctatgccaagctgcagaaaaacgagtgccaggtgatgccgtacccgaacccggccgacatcgcgcgcatgaaggaagataagaacattaccctgctggaacagccgggtctgaacgttggttatctctcctttaacaccgagaagaaaccgctggacgacgtcaaagtacgtcaggcgctgacctacgcggtcaacaaagaagcgatcatcaaagcggtttaccagggcgcaggccaggcggcgaagaacctgatcccgccgaccatgtggggctataacgacgacgttaaggactacacctacgatccggagaaggcgaagcagctgctgaaagaagcgggcctggaaaaaggcttcaccatcgatctgtgggcgatgccggtacagcgtccgtacaacccctttccagcacattggagcttcagctgctcgagttctatagtgtcacctaaatcgtatgtgtatgataca

SEQ ID NO: 23072 - DNA, 372 bp, Klebsiella pneumoniae
  misc_feature (314)..(314): n=g, a, t or c
gtgacgctgaacaccattctgcatgacgatgaactggagccggcgcagcggctgattaccgatctctacgacgcaggcgtcgatgcgctgatcgtccaggatatggggatcatggagctggatctgccgccgattgagctgcacgccagcacccagtgcgatattcgcagtgtggaaaaagcgaagtttctctccgacgccggcttcagtcagatcgtgctggcgcgcgaactgaacctcagtcaaatcaaagccatttacgaccacactgacgccactatcgaattctttatccatggcgcgctgtgcgtggnctattccgggcagctttccagcacagtggcgatgatatcagatctgccggtctcccta

SEQ ID NO: 23073 - DNA, 315 bp, Klebsiella pneumoniae
atgaactcgaaagatctgcgggctatcgcccacgttgagcgtctgacccagatgggcgttcactcgctgaagatcgaaggccgcaccaaatccttctactactgcgcgcgcaccgctcaggtttaccgcaaggcgatcgacgatgccgccgccggcaaaccgttcgataccagcctgctggagaccctggaggggctggcccaccgcgggtacaccgaaggcttcctgcgccgccatacccatgacgattatcagaactacgagtacggctactccgtctctttccagcacatggagcttcagctgtcgagtcta

SEQ ID NO: 23074 - DNA, 447 bp, Klebsiella pneumoniae
atgaaggcgcttcgtgagccgctgtggtggcttatcgcgctgtttatcggcctgctggcagggctgccctacagcgcgccgctgttcagtcggctgttcccggaactgccgcggccggtctaccagcaggagagcttctgggcgctcactctcgatcacggctggctggtggtggcgtccagcctcgcggcaacggcaatcgggctgggggctggggtggcggtcacccggcccgccggcagcgcgtttcgtccgctggtggagaccatcgccgctatcgggcagacctttccgccggtggcggtgctggcgatggcggtgccggtgctgggctttggctggctgccggcgctcatcgccctcgcgttgtatggcatactgccggtgctgcaggggacgcctttccagcacattggagcttcagctgtcgagttctatagtgtcacc

SEQ ID NO: 23075 - DNA, 560 bp, Klebsiella pneumoniae
ggaaagcgcattttccgcgtgctgcaaaaccgccgcgacgccctaagcctgctgtttttctcgctgtttggcgcgctaaccgtgcagttcacctttctgatgaccattgaaaaatccaatgccgccacggccacggtgctgcagtttctgtcgccgacgatcatcgtcgcctggttcgccctcgcccgcaagcgcgtcccacaccgctggtgctgggagctatctgcacctcgctggcgggcacctttctgctggtgacccacggcaacccaacgacgctgtcgatttcgccggcggcgctgttctgggggatcgcctcggcgtttgccgccgcgttttataccacctatccttcaacgctgattgcccgctacgggacgctgcccatcgtcggctggagcatgctgttcgtgctgtgctgctgatgcttgtttgcctgttttactgtgctgtgccatgtgcaccgcatttttgttggttaactggcatgcctgctgttatgcttttttctacctgtgtggtgatctggtacttcgctgaccttcagcctctatctcaac

SEQ ID NO: 23076 - DNA, 1064 bp, Klebsiella pneumoniae
tattacttcggccgtccggtggaagagctgagcctcgaccaagcaggcgctgctggtggggatggtgaaaggggcgtcggtctataacccgtggcgtaacccgaaactggcccttgaacgacgcaatctggtgctgcgtctgctgcagcagcagcaggttatcgaccaggagctatacgacatgctcagcgcccgtccgctgggcgtgcagccgcgcggcggggtgatttcaccgcagccggcgtttatgcagatggttcgtcaggaactgcaggcgaagctgggcgataaagtgaaagatctctccggcgtgaagatcttcaccactttcgactcggtggcgcaggatgcggcggaaaaagcggcctccgaagggatcccggttctgaagaaacagcgtaagctggcagacctggaaaccgccatggtggtggttgaccgcttcaccggcgaagtgcgggcgatggtcgcggcgcggagccgcagttcgccggttataaccgcgcgatgcaggcccgccgatcgattggttctctggccaagccggctgacctatctgagccgcgctgagccagccgaatcagtatctgcctgaatacctgtgatctgcctgatgcgcctggtgactgattctgcctgtccaacggtcagactgtgtgtcccctgcagaacgactgatcgtcgtttcagctggtcagtgtgatgctgtgttggatgccctgactcgctcgatgaactgtccctgacggttaacctcgtgtgatggctgctgggcttacctggctggttagtcgatacctggactaaactgtggtggctgcctgaagaatcagctcaactgcggtgcctgtctgatgcttgcttgtgctgcgctgaacctgactgccgattgacagtggcccaggccttccagaccatctgccatgcggtgggaacctgtgcgcctgctttccgcgctgcggtcagttgatttgccgaagatggcactgtgctctaccagagctatccgcagggtggagtgcgctggtgcctgcccaggcggcctacatgaccgctgtggacta

SEQ ID NO: 23077 - DNA, 504 bp, Klebsiella pneumoniae
atgtgctggaaagccgaaaacctggcctacgccacgctggttgacgaaggtattccggttcgtctgtccggcgaagactccggccgcggcaccttcttccaccgtcatgcggtgatccataaccagaccaatggttcaacctacacgccgctgcagcatgtccataacggccagggccagttccgcgtttgggactcggtactgtctgaagaagcggtgctggcgttcgaatatggttacgccaccgccgagccgcgcactctgaccatctgggaagcgcagtttggcgacttcgccaacggtgcgcaggtggtgatcgaccagttcatctcctccggtgagcagaagtggggaaggatgtgcggcctggtgatgctcctgccgcacggttacgaaggccagggcccggagcactcctccgcgcgtctggagcgttatctgcagctgtgcgctgaacaaaacatgcaggtctgcgtgccgtccacctttccagcacagtggcga

SEQ ID NO: 23078 - DNA, 369 bp, Klebsiella pneumoniae
gtgatccacaccctgacactgaataccgcgatcgatatgaatatcttttgcgatccgctccagccggcggcagtcaaccgcacccggcaaacggaatattgcccgaatggtaaaggggttaacgtctcgctggtattacatcattaccagcagccaacccatgtcatgggcatattcggcggttttaccggccgctatatcgttgaggaactacgcaaacagcatattaatgtcacaccggcatgggtcgctgaaccgacccgtataaatatatttattaacgacggcagtgatgaatacaaactggtaaatcccggcgcgcggctttccagcacagtggcgatgatatcagatctgccggtctcccta

SEQ ID NO: 23079 - DNA, 510 bp, Klebsiella pneumoniae
atgtgctggaaagtggcgggtcacagcctcggcgaatactccgcgctggtatgcgcgggcgttatcggtttcgctgatgccgttcgcctggttgagctgcgtggtaaattcatgcaggaagctgtaccggaaggtaccggcgccatgtccgcgattatcggtctggacgacgccgctatcgccaaagcctgtgaagagtctgccgaagggcaggtggtctctccggtgaactacaattctccgggccaggtggttatcgccgggcacaaagaggccgttgaacgtgcgggcgccgcctgtaaagccgccggtgccaaacgcgcgctgccgctgccggtgagcgtgccgtcccactgcgcgctgatgaagccagccgcagaaaaactggcggtagagctgcagaaaatcaccttcaacgcgccgacgattccggtggtgaataacgtcgacgtgaagtgcgaaaccctttccagcacagtggcgatgatatcagatctgccggtctcccta

SEQ ID NO: 23080 - DNA, 630 bp, Klebsiella pneumoniae
gtgccgccgggcctgctggagcagttcaccaaagagaccggcatcaaggttatctattcgacctacgagtcgaacgaaaccatgtacgccaagctcaaaacctataaagacggcgcgtacgacctggtcgtcccgtcgacctactttgtcgacaagatgcgcaaagaaggcatgctgcagaagatcgataagagcaagctgactaacttcagcaacctcgatccgcagatgctgaataaaccgttcgatccgaataacgactactccatcccctatatctggggggcgacggccatcggcgtcaacagcgaggcgattgacccgaaaactatcaccagctgggccgacctgtggaagccggaatacaaaagcagcctgctgctgaccgacgacgcgcgcgaagtgttccagatggcgctgcgtaagctgggctattccggcaacaccaccgacccgaaagagattgaagccgcctataacgagctgaaaaagctgatgcccaacgtcgcagcgtttaactctgataacccggcgaacccgtatatggaaggcgaagtgaacctcgggatggtatggaacggctcggcttacgtcgcccgccaggcaggtggcgtgaccattttttcattt

SEQ ID NO: 23081 - DNA, 474 bp, Klebsiella pneumoniae
gtgcgccatgccctcgtgctgtttggcggcatcgtgccgcgtaaggcgaccacccacctccgcgcgttgctgaacgacgccgacgccgttctgctggctgcggacaccgccgacgaagcgttattccgcaccgaggtcgttggcgccaaactggccctgaccgaatggctggtccagcgcgggtggcgtccgttcctcaacgaggcgggagagaaaaaaatagccggatcgttcaaacggtttgccgatattcacctctcgcgggtggcggccgagctgcgcagcgccgtgcagcatctggcggtagaagatgccgctgaccagttgccgaagctgtcccgcgacatcgacagcgtccagctgctggcgggcgcctatggcgacgccgtcgcgccctggctggagaactggcaggaacttcagcgtgcgatagagcatgacgaccgcagcgtgttctttccagcacagtggcga

SEQ ID NO: 23082 - DNA, 527 bp, Klebsiella pneumoniae
ggttttaccggaatgggcttgagcgaacttctgaagacggcggaggtgcccaagggctctttctaccactactttcgctctaaggaagccttcggcgtcgcgctgcttgaacatcactacaccggatatctgcagcgcctggtcgaccacttcgatcatggcgacggtaactatcgcgatcgcctgctggcctactatcagcacacgctgaatcagttctgccagcaggggattattagcgggtgtcttactgtcaagctatccgcggaggtttgcgatctgtcggaagatatgcgcgccgccatggatcgcggagccagccagattatcgccctgctgggcgacgcgctggagaaaggacgtcaggaaggcagtctcgcatttgacggcgaggccatgaccctgtcgcaggtgctgtattccctgtggctcggggcaacctgcaggccaacattacgcgtagcgcaacgccgctggaaagcgccctttgcaccacgccaaacagattattgcggctgcctgcaggt

SEQ ID NO: 23083 - DNA, 416 bp, Klebsiella pneumoniae
gtgatgaatacattcggcatatcaatacctgggctgcgtatcgccggcggattgattgtgcctttatcggtttccgcatgctgtttccccagcaaaaagcccacgattcgatggaagcgaagatcaaatcggaagaactgcaggatgaaccgaccgccaatatcgcctttgtgccgctggcgatgccaagcaccgccggtccgggcaccatcgcgatgattattagctccgcctcgaccgttaagcacggcgtggacttcccggagtgggtggtgctggcggcgccgccgatcatctttttgctgttaggggtgattctgtgggcttgtctgcgcagttccggcgcgattatgcgtctggttggcaaaggcggcatcgaggccatctcgcgactgatgggctttctgctggtctct

SEQ ID NO: 23084 - DNA, 204 bp, Klebsiella pneumoniae
atgcagggactctggtggttgggtaagcgttcggtgacgccgctgccgccctccattcttaactggttctatgaagtgcgcggcaaactgcaggaggcggggcaggcgctggcaccggtcgaaggcaagcccgattatcaggcgctggctgacacgcttaagcgcgccttcaaacaactggataaaactttccttgatgatttg

SEQ ID NO: 23085 - DNA, 531 bp, Klebsiella pneumoniae
atggcggaagcgctgggctggcatctgttagattcaggcgcgatctaccgcgttctggcgctggcggcgctgcatcatcatgtcgacgtggagtccgaagaggcgctggtgcccctggctgcccatcttgacgtgcgttttatttctactgacggcaacctggaagtggtgctggaaggggaagatgtcagtagcgaaattcgcactcaggaggtcgcgaacgcggcctcgaaagtggcggcttttccgcgcgttcgcgaagcgctgctgcgccgccagcgcgccttccgcgaactgccggggcttatcgccgacggtcgcgatatgggaacggtagttttcccggacgcgccggtgaaaattttcctcgatgcctcggccgacgagcgggcgcatcgccgcatgcggcagttgcaggaaaagggctttgatgttaactttgaacgtcttttgtccgagataaaagagcgtgacgatcgcgaccgaaatcgcgccgtggcgccgcttgtcccggctgccaatgcattagtt

SEQ ID NO: 23086 - DNA, 393 bp, Klebsiella pneumoniae
acgactcactatagggagaccggcagatctgatatcatcgccactgtgctggaaagtctcggagtcagcgaggaggggcgcttcctgctctatctgggcattttgctgcacggcgtgtgctatgactttttctttgtcgttggctttatctacaccgaccgcgtggcgggcgagaaggtaaaaggccaggcgcagagcatgattgtgatgttcacctacgggatcggcatgctgctgggctcgcagatctccggcgcgctgtataaccatctggtggccggccagagcgtgcctcaggcctgggtgaccttctggtggatcccggcggtggccgccgcggttatcgcgctgattttccttttctctttccagtacaacgagaaagagccgcac

SEQ ID NO: 23087 - DNA, 513 bp, Klebsiella pneumoniae
atgacgccggttatcgaaggtggcgacgttaaagagccgctgcgcgatcgcgtactgggtcgtgtgactgcggaagatgttctgaagccgggtaccgcggatattctggttccacgcaacacgctgctgcatgagcactggtgtgacctgctggaagcgaactccgttgactccgtcaaagtgcgttccgttgtatcctgtgacaccgactttggcgtctgcgcgcactgctatggtcgtgacctggcgcgtggccacctcatcaacaaaggtgaggctatcggtgttatcgcggcacagtccatcggtgagccgggtacacagctgacgatgcgtacgttccacatcggtggtgcggcatctcgtgcggctgctgaatccagcatccaggtgaaaaacaaaggtagcatcaagctcagcaacgcgaagtcggttgtgaactccagtggtaagctggttatcactctttccagcacattggagcttcagctgctcgagttctatagtgtcacc

SEQ ID NO: 23088 - DNA, 485 bp, Klebsiella pneumoniae
gtgaaaactgctcaacttttacaaacgctgaacgaccagctgagtgagctggccgcgctggtggcgccgctggcggagcacgcgaccctcagcccgcgctttgaccgccagctcttccacacccgcagcacgctgatgcaggcctatctggcggaagcccaacacaactttaaccagctccgccaggccgtcgagcgccagcagatgccgcaggtggtctggattgccgagcgtctggcggcgcaaatcgccgcgctgcgccgtgaaaccgccacctggtccttgcgcagttgggaccacgcgtcgccaacgttgagccgctggcagcgccgtcgcctgcagcatcaggagtatgagcgccgcctggtggcgatgcgcgaccacgccagcgtcagctggcgcaggcgaccagccttgacgagcagcagcggctggggaaagaagttgaagcctacagcggccggttggcgcctttccagcacatt

SEQ ID NO: 23089 - DNA, 105 bp, Klebsiella pneumoniae
caggttgcagcagatctgcgcgcctaccgtcgtcctgagccttacaaaggcaagggtgttcgttacgccgacgaagtcgtgcgtaccaaagaggctaagaagaag

SEQ ID NO: 23090 - DNA, 351 bp, Klebsiella pneumoniae
atggataagaaatctgctcgtatccgtcgtgcgacccgcgcacgccgcaagctccaggagctgggcgcaactcgcctggtggtacatcgtaccccgcgtcacatttacgcacaggtaattgcaccgaatggttctgaagttctggtagctgcttctactgtagaaaaagctatcgctgaacaactgaagtacaccggtaacaaagacgctgcagcagctgtgggtaaagctgtcgctgaacgcgctctggaaaaaggcatcaaagatgtttcctttgaccgttccgggttccaatatcatggtcgtgtccaggcactggcagatgctgcccgtgaagctggccttcagttc

SEQ ID NO: 23091 - DNA, 501 bp, Klebsiella pneumoniae
atggctcacatcgaaaaacaagctggcgaactgcaggaaaagctgatcgcggtaaaccgcgtatctaaaaccgttaaaggtggtcgtattttctccttcacagctctgactgtagtaggcgatggtaacggtcgcgttggttttggttacggtaaagcgcgtgaagttccagcagcgatccagaaagcgatggaaaaagcccgtcgcaatatgattaacgtcgcgctgaaccacggcaccctgcagcacccggttaagggtactcacacgggttctcgtgtattcatgcagccggcttccgaaggtaccggtatcatcgccggtggtgcaatgcgcgccgttctggaagtcgctggggttcgtaacgttctggctaaagcgtatggttccactaacccgattaacgtggttcgtgcaactatcgacggtctggaaaacatgaagtccccggatatggtcgctgccaagcgtggtaaatccgttgaagaaattctggggaaa

SEQ ID NO: 23092 - DNA, 172 bp, Klebsiella pneumoniae
atggcaaagactattaaaattactcaaacccgcagtgcaatcggtcgtctgccgaaacacaaggcaacgctgcttggcctgggtctgcgtcgtattggtcacaccgtagagcgcgaggatactcctgctgttcgtggtatggtcaacgcggtttccttcatggttaaagttg

SEQ ID NO: 23093 - DNA, 459 bp, Klebsiella pneumoniae
gtgctggaaagtgacagcgccagcaccgaagatatggacgatgcgttgtatgccgagtccactgctgatggcaaactgctgctgacggtcgccattgccgacccgaccgcctggattgccgaaggcagcaagctggataacgccgcaaaagtgcgcgcctttaccaactatctgccgggcttcaacattccaatgctgccgcgcgagctgtcggacgatctctgctccctgcgcgctaacgaagtgcgcccggtgctggcctgccggatgactctgggggccgatggcaccatcgaagacaatatcgagttctttgccgccaccatcgaatcgaaagccaagctggcctatgacgacgtctctgactggctggaaggccgcggcagctggcagccggacagcgaggcgatcctttccagcacattggagcttcagctgctcgagttctatagtgtcacc

SEQ ID NO: 23094 - DNA, 192 bp, Klebsiella pneumoniae
gtgctggaaagcggcagctggcctggggtaatcacccgacaagccgccggtcatggcggcttcggttacgacccgatcttcttcgtcccgtcagaagggaaaaccgcggccgaactgagccgtgaagaaaagagcgccatttcccatcgcgggcaggcgctgaaactgttactggaagcattacgtaatggc

SEQ ID NO: 23095 - DNA, 411 bp, Klebsiella pneumoniae
ccctggttaatccagaaggcgggtcagtggcaggtcgttgagctggaaagctggcgccaccacaatcaggacatcatcatcaagctgaaaggcgttgacgatcgtgatgccgcgaatctactgactaattgcgaaattatcgtggattcatcgcagttgccggagctggaagagggtgactactactggaaagacctgatgggctgccaggtagttacgacggaaggctatagcctcggtaaagtcatcgatatgatggaaaccgggtcgaatgacgtgctcgtcatcaaggcaaacctgaaagatgcatttggtatcaaggagcggttggttccgttcctcgatgggcaggttatcaagaaagtcgatctcactacgcgtactatcgaagtagattgggatcctggtttt

SEQ ID NO: 23096 - DNA, 339 bp, Klebsiella pneumoniae
atgtggattggcataattagcctgtttcctgaaatgttccgcgcaattaccgattacggggtaactggccgggcagtaaaaaatggcctgctgagcatcgaaagctggagtcctcgcgacttcacgcatgaccggcaccgtaccgtggacgatcgtccttacggcggcggaccggggatgctaatgatggtgcaacccttacgggatgccattcatgcagcaaaagccgcggcaggtgaaggcgcgaaggtgatttatctgtcacctcagggacgcaagcttgatcaagcgggcgtcagcgaactggcaacgaatcagaaactgattctggtgtgcggc

SEQ ID NO: 23097 - DNA, 283 bp, Klebsiella pneumoniae
gaaagagaccatgtttccatggcgccggcttgccggtcgccgcctgtgggcgatggccgagaacacccgcggggtgctggccgttgagtggctggcggcggcgcaggggctggatatgcgcgaaggactgaccaccagtccgctgctggaagaggcgcgtcacttgctgcgcgaacgcgtgccgcactatacgcaggatcgctacttcgccccggatatcgataacgccattgcgcttctggcggcccgtcacctgacgcgtctgctgcctgccgtactgcat

SEQ ID NO: 23098 - DNA, 280 bp, Klebsiella pneumoniae
atgtctaaagaaaagtttgaacgtacaaaaccgcacgttaacgtcggtactatcggccacgttgaccatggtaaaacaacgctgaccgctgccatcactaccgtactggctaaaacctacggtggttccgctcgcgcattcgaccagatcgataacgcgccggaagaaaaagctcgtggtatcaccatcaacacctctcacgttgaatatgacaccccgactcgccactacgcgcacgtagactgcccgggccacgccgactatgttaaaaacatgatca

SEQ ID NO: 23099 - DNA, 510 bp, Klebsiella pneumoniae
gtgctggaaaggcaggtgattttcgcctcgctgaccggcgatatcatgctggatgctttgattggcgccgtatttgcaatcattagctactccagcctggcggcggtgctgttaacggcgacgctgaccgcggcgggagcgatctctttcccggtggcgctgtgtctggtgattggcgccaacctgggatcggggctgctggcgatgcttaacaacagcgcggcgaacgcggcggcgcgccgggtggcgctgggcagcctgctgtttaagctggtggggagcctgattattctgccgttcgtccatccgctggccgcggcgatgcacaagctgccgttggccgagtccgagctggttatctacttccacgtcttttacaacctgctgcgctgcatcgcgatggtgccctttgccggaccgatggcgaagctgtgccagcgtctgatccgcgatgagcccgagctggataaccatctcaaacccaagcatctctttccagcacagtggcga

SEQ ID NO: 23100 - DNA, 279 bp, Klebsiella pneumoniae
gtgatgggcttcatcggcggcacctctgaccgtccggcgccgatcagcgacaaagaagtcgacgccatcatgaatcgtctgcagcaggttggcgataagccgcgtccgaaaacgctgtttgaaccgggtgaaatggttcgcgttaacgacggtccgttcgctgactttaacggcgtggtggaagaagtggactatgagaagtcccgcctgaaagtttccgtttctatcttcggtcgtgcgaccccggtagaactggacttcagccaggttgagaaggcg

SEQ ID NO: 23101 - DNA, 426 bp, Klebsiella pneumoniae
atggctaagaaagtccaagcctacgtcaagctgcaggttgcagctggtatggcgaacccgagcccgccggtcggcccagcactgggtcagcagggcgtgaacatcatggaattctgcaaagcgttcaacgctaaaactgattccctggagaaaggtctgccgatcccggttgttatcaccgtttacgctgaccgttcctttacctttgttaccaagactccgccggctgctgttctgctgaagaaagctgcaggcatcaagtctggttccggtaagccgaacaaagataaagtgggtaaaatctcccgcgctcagctgcaggaaatcgcgcagaccaaagctgccgacatgactggtgccgacattgaagcgatgactcgctccatcgaaggtactgcacgttccatgggcctggtagtggaggac

SEQ ID NO: 23102 - DNA, 491 bp, Klebsiella pneumoniae
gctggaaagctgtacatcattaacatgccgctgtttatcattaacgagctgcatctgccggagaagctggcggggctgatgatgggcaccgccgccggactggaaattccgaccatgctgattgccggttactacgcccggcgtttcggcaaacgctttctgatgcgtctttctgcagtggccggggtgctttttacgtcggcatgctgacggtgcatacgccagcgctgctgctggcgatgcaggtgctgaacgccatctatatcgggatcctcgccgggatcggcatgctctatttccaggacctgatgccggggcaggcgggcgcggccaccaccctctataccaatactacccgcgtcggctggatcatcgccggttcactggcgggggtagtggcggagatctggagctatcacgcggtgttctggattgcgctggcgatgggcgttgtcactcaggcctgcctgtggcggataagagacgtgtaa

SEQ ID NO: 23103 - DNA, 479 bp, Klebsiella pneumoniae
atgtttgaacctatggaactgaccaacgacgcggtgattaaagtcatcggcgtcggtggcggcggcggtaacgccgttgaacacatggtgcgcgagcgcattgagggtgttgaattcttcgcggtaaacaccgatgcgcaggcgctgcgtaagacggcggttggccagactatccagatcggtagcggtattaccaaaggtctgggcgcgggcgcgaacccggaagtcggccgtaacgcggctgatgaagaccgtgaagcgctgcgcgcagcccttgatggcgcagacatggtgttcatcgcggcaggcatgggcggcggtaccggtaccggcgcggcgcccgtagtcgcggaagtggcgaaggatctggggatcctcaccgttgcggtggtcactaagccgtttaattttgaaggtaagaagcgcatggcgttcgctgagcaggggatcaccgagctgtccagcacgttgactcactg

SEQ ID NO: 23104 - DNA, 739 bp, Klebsiella pneumoniae
gaacgttgtggtctgaaagttgaccaacttatttcgccgggttagcggccagtgtattcgtattaacagaagacgaacgtgagctgagcgtctgcgttgtggatatcggcggtggtacatggatatcgccgtctacaccggcggcgcattgcgtcacaccaaagtgatcccgtatgccggcaacgtggtgaccagcgatatcgcctatgccttcggtacgccgccgagcgatgccgaagcgattaaggttcgtcacggatgcgcattgggttccatcgtcggtaaagacgaaaacgtcgaagtaccgagcgtcggtggacgtcctccgcgtagcctgcagcgtcagacgttggcagaggtgattgaaccgcgctataccgagctgcttaacctggtcaatgaagagatcctgcagctgcaggaacagctccgccagcagggtgttaaacatcatctggcggcggggattgtgttaaccggcggcgcggcgcaaattgaaggtctggcggcctgtgcgcagcgcgtgttccatactcaggtgcgcattggcgcgccgctgaacatcaccggtttaaccgactatgcccaggagccgtattattcaacggcggtggggctgctgcactacggaaaagagtcacatctcagtggtgaagcggaagtagaaaaacgcgtgacggcctcagtgggctcgtggattaagcgactcaacagctggctgcgaaaagagttttaattt

SEQ ID NO: 23105 - DNA, 430 bp, Klebsiella pneumoniae
atgaaatcgattggtattttctgcggttcttcagctggcgaacatccgctgtacctcgaaaccgcccgtctggttggacgtacgctggcgcagcaggggttggcgcttgtctatggcggcggcaaagttggtctgatgggggcggtcgccgatgcggcgctggaggccggtggcgtggtgatcggcgtgatgccgcgcggcctggtggagcgggaaattgcccaccgcggcttgacggagctgcatgtggtcgaggatatgcacgagcggaaaaccaaaatggcggcgctggcggatggctttattgccctgccgggcggggcggggacgctcgaggagattttcgaacaatggacctgggcgcagcctggggatccatgagaaaccgtgcgcgtacctgaatattaagggttattacgatccgcttcag

SEQ ID NO: 23106 - DNA, 528 bp, Klebsiella pneumoniae
gtgctggaaagtgaggtcaccgcagtggacgtgatgccggacgccgtggcgctggcgttgcgcaatgccgaacatctgggcatcgctaacgtgacgataagtcaaagcgactggtttagcgcgctggccgggcagcgcttcgccacgatcgtcagcaatcccccctatatcgacgccgccgacccgcatctcgccgaaggcgatgtgcgctttgagccgttgacggcgctggtcgcaggcgaccaggggctggccgatctggcgcatatcatccgcgagggacggcagtatctgcagcccggcggttggatgctgctggagcatggctggactcagggcgaggcggttcgcgcgctgttccgcgaagcgggctatctggacgtcgcgacctgtcgcgactatggcgacaatgagcgtctgaccctcggacgtttacccgacatggagaatgctttccagcacagtggcgatgatatcagatctgccggtctccctatagtgagtcgtattaatttcgataagccaggt

SEQ ID NO: 23107 - DNA, 219 bp, Klebsiella pneumoniae
atgcgcctgcacaatcatcgtcttgaacttcttagtcctgcccgcgacgccggtatcgctcgcgaagcgatccttcacggcgccgatgccgtttacatcggtggacctggctttggcgcccgccacaacgccagcaacagtctgagcgactttccagcacattggagcttcagctgctcgagttctatagtgtcacctaaatcgtatgtgtatgataca

SEQ ID NO: 23108 - DNA, 538 bp, Klebsiella pneumoniae
atgatgatcatgcaggcttttctgatgtccgagctggagctggagcagcagcttccctctcactgcttcgttgacctttgagcagtcctacagtgaagtggatggcgacagcgcctccatggcggaactctgcgccttaatcagcgccctggccaatgtaccgataaatcagagcatcgcgatcaccggctccgtcgaccagtttggtcgcgtgcagccggtcggcggcctgaacgagaaaattgaaggcttcttcactatctgccagcagcgcggtttaaccggcaaacagggagtgattatccctgccgccaacgttcgtcatctcagcctgagccacgagctacgtcaggccgttgccgacaaccagtttgctatctgggccattgacgatattaccgaagcgctgccgatgttgacccagctgatgtgggacggtgaaggacagacgctgcgacaaaccattcaggagcggatagcgcaggcgacccagcaagagactcgccatcgttttccgtggccgctacgctggttaggt

SEQ ID NO: 23109 - DNA, 792 bp, Klebsiella pneumoniae
atgagcagtaacttcagacatcatttattgagtctgtcgttactggttggcatagcggccccctgggccgcttttgctcaggcgccaatcagtagtgtcggctcaggctcggtcgaagaccgcgtcactcaactcgagcgtatttccaatgctcacagccagcttttaacccaactccagcaacaactctctgataaccagactgacattgattctctccgcgggcagatccaggagaaccagtaccagctgaatcagatcgttgagcgccagaaacagattctgctgcagatagatagtctgagcagcggtggcggcgcagcatcaggtgcgcaggctccgtcgtcttctggcgatcagagcgcggctgccaccagcgcagcgccagcggccacctcaggcgccccggcgatgaccggcgatgcgaacaccgattataatgccgctattgccctggtgaaggatgcctcacgccaggatgacgcgatggtggcgtttcaaaacttcgtcaaaaagtacccggattcaacctaccagccaaacgctaactactggctcgggcagttgaactacaataaggggagaaaagacgacgcggcgttttacttcgcttcggtggtgaagaactacccgaaatcgccaaaagcgcctgacgcgatgtttaaagtcggcgtgatcatgcaggacaaaggtgataccgcgaaagcgaaagcggtttaccagcaggtgatcaacaaattccccggcaccgacggtgcgaaacaagcgcaaaaacgacttaatgctcttggt

SEQ ID NO: 23110 - DNA, 285 bp, Klebsiella pneumoniae
atgctccatacgctcagtgtttccccctggcatgccgacatcgcagcgatgcttcgtttgatggagcacggcgacgatctggtactactgtctgacggcgtcaccgcggccatcgccgatggtcgcttccttgagatcctgcaatccgcccccataaccctatacgtgctgcaagacgacgttgacgcccgcgggctggctggtcaaattgcggacagtgtcggcagggttagctatactgatttcgtcagactcacagtcaaacatgccggtcagttggcctgg

SEQ ID NO: 23111 - DNA, 345 bp, Klebsiella pneumoniae
atgagcatgcaagatccgatcgcggatatgctgacccgtatccgtaacggtcaggccgcgaacaaagctgcggtcaccatgccttcctccaagctgaaagtggcaatcgccaacgtgctgaaggaagaaggttttatcgaagattttaaagttgaaggcgacaccaagcctgaactggaacttactctcaagtatttccagggcaaagctgttgtagaaagcattcagcgtgtcagccgcccaggtctgcgcatctataagaaaaaagatgagctgccgaaagttatggccggtctgggtatcgcagttgtttctacctctaaaggtgttatgactgagtcgtgc

SEQ ID NO: 23112 - DNA, 303 bp, Klebsiella pneumoniae
atggctaagcaatcaatgaaagcacgcgaagtaaagcgcgtggctttagctgataaattcttcgctaaacgcgctgaactgaaagctatcatctctgatgtgaacgcaaccgacgaagatcgttggaatgccgttctcaagctgcagactctgccgcgtgattccagcccgtctcgtcagcgtaaccgctgccgtcaaacaggtcgtccgcatggtttcctgcggaagttcgggttgagccgtattaaggtccgtgaagccgctatgcgcggtgaaatcccgggtctgaaaaaggctagctgg

SEQ ID NO: 23113 - DNA, 426 bp, Klebsiella pneumoniae
atgggtgttggtgaagcgatcgctgacaagaaactgctggataacgcagcagctgacctggcagcaatctccggtcaaaaaccgctgatcaccaaagcacgcaaatcagttgcaggcttcaaaatccgtcagggctatccgatcggctgtaaagtaactctgcgtggcgaacgcatgtgggagttctttgagcgcctgatcactattgctgtaccgcgtattcgtgacttccgcggcctgtccgctaagtctttcgacggtcgtggcaactacagcatgggtgtccgtgagcagatcatcttcccagaaatcgactacgataaagtcgaccgcgttcgtggtttggatattaccattaccactactgcgaaatctgacgaagaaggccgtgctctgctggctgcctttgacttcccgttccgcaag

SEQ ID NO: 23114 - DNA, 849 bp, Klebsiella pneumoniae
atgaagctgatacgcggcatacataatctcagtcaggccccgcacgggtgcgtgctgaccatggtaatttcgacggcgtgcatcgtgggcatcaggcgctgctgcagcggttgcgcgaagagggccgccagcgcggtttaccggtcgtggtgatgatttttgaaccccagccgctggagctctttgccgctgataaagccccggcgcgattgacccgcctgcgtgaaaagctgggctatctggctgaaagcggggttgactatgtattgtgcgttcgctttgaccgccggttcgccgcgctaaccgcgcaggattttatcagtgaactgctggtgcgtcgcctgggcgtgcagttcctcgccgttggtgacgatttccgctttggcgctggtcgccagggggatttcttgttattacaaaaggcgggggcggaatatggcttcgacgtcaccagcacccaaaccttctgcgaaggcggggtgcgaatcagcagcacggcggtacgccaggcgctggccgatgacgatctcctgctggcggagacgctgctcggccatccgtttagcatctccggacgcgtcgtgcatggtgatgaactaggccgaaccataggttttccgacggcgaacttaccgctgcgtcgtcaggtttccccggttaaaggggtctatgcggtagaagtgacagggctgggcgaaaaccgatagcgggcgtcgccaatattggcacccgtccaacggttgcgggcgtgcgtcagcagctcgaagtacatctgtggacgtcgtaatggacctctacggtcgccatatcaatgtaatactgggtaaaaagatacgtaacgagcagcgg

SEQ ID NO: 23115 - DNA, 465 bp, Klebsiella pneumoniae
gtgctggaaagagccgccgcgctggcgggctataaatggctgggccgcggcgataagaataccgccgacggcgcagcggttaacgccatgcgcattatgcttaacctcgtcaatatcgacggcaccatcgtcatcggcgagggcgaaatcgatgaagcgccgatgctctatatcggcgaaaaagtgggtaccggcaagggcgatgcggtagatatcgccgtcgatcccatcgaaggcacccgcatgacggcgatgggccaggccaacgccctggcggtgatggcggtcggcgataagggctgcttcctcaacgcgccggatatgtatatggaaaagctgatcgtcggcccgggcgctaaaggcgctatcgaccttaatctgccgctggaagagaacctgcacaatatcgcccgcgccctgaacaagccgctgggcgagctgaccgtctttccagcacagtggcga

SEQ ID NO: 23116 - DNA, 681 bp, Klebsiella pneumoniae
ctttttatatcgctaccaggactggcagctgtaaacctggatcgaacccggcttgtttataatgcggccgagtaaatccaccgccataacattgactaatgaaagtaaaacactgccgtatcttgcacaatcatgggttgaagatgacaaagggaagaaagcggatgagatgctgatcgccctgccccctctgcaacgcattgaagcaggcgataaaagtcaggttcggatcgttaaaggtgtaaaagctgaaagcctgcccaccgatcgtgagtcgcttttctattttaatacgagagaagtgccgccaaaagcgagaaaaaaaatgttatgcaagttgcgattcagagtcgaataaaactcttctatcgcccacagtccatacaacgtagcagccacgttaatccggagcaaaaaattacccttcagactgtcggtaaccaactcacaataacgaatccaactccttactactttaccgctctggcagttaaagatagtcagggaaataaaattaaagaggtggatggtgagatggttgccccgcactctgatcggaacatctctgtcgcaggactacgtctcgggcaacgcatatcaatttcttacattaatgatttcggtggtgtgatatcaatgttatatcgctgtgagaataatatttgcaaatttgaaaaaagt

SEQ ID NO: 23117 - DNA, 492 bp, Klebsiella pneumoniae
atggacggcatcaccagcccgatcaaagccgatcctgaatgggccaagaccaccgtcaacggccagccggcgctgcgcgaaaccgacacctttgatacctttatggaatcctcctggtactatgcgcgctacacctgcccgcagtatcaggaaggaatgctggattcgaaagcggccaactactggctgccggtagatatctacatcggcggtatcgaacacgccatcatgcacctgctctacttccgcttcttccataagctgatgcgcgacgcgggcatggtgaactccgatgagccggcgaaacagctgctgtgccagggcatggtgctggctgacgcgttctactatgtgggcgaaaacggcgaacgtaactgggtttccccggttgacgccatcgttgagcgcgacgaaaaaggccgcatcgtgaaggccaaagacgcggcgggccacgagctggtgtacaccggcatctttccagcacagtggcga

SEQ ID NO: 23118 - DNA, 372 bp, Klebsiella pneumoniae
gtgctggaaagtgttattgcttccccggatcatgcgcgttgttgccagctgggccaggttctgggtccgcgtggcctgatgccgaacccgaaagtaggtaccgtaactccgaacgttgctgaagcggttaaaaacgcgaaagcaggtcaggttcgttaccgtaacgacaaaaacggcatcatccacaccaccatcggtaaagtggactttgacgctgacaaactgaaagaaaacctggaagctctgctggttgcgctgaaaaaagcaaaaccgactcaggcgaaaggcgtgtacatcaagaaagttagcatctccaccactatgggtgcaggtgttgcagtagatcaggctggcctgaacgcttctgcaaac

SEQ ID NO: 23119 - DNA, 499 bp, Klebsiella pneumoniae
ggccaccgcccgcattatggcgttggcctctacacgattttccgccatttaaaagactcagccgcagtcggtaacctcgcgcatacagccgggcagtgacgtcatcgtctgcgcggaaatggacgaacagtggggatacgtcggggctaaatcgcgccagcgctggctgttttacgcgtatgacaggctccggaagacggttgttgcgcacgtattcggtgaacgcactatggcgacgctggggcgtcttatgagcctgctgtcaccctttgacgtggtgatatggatgacggatggctggccgctgtatgaatcccgcctgaagggaaagctgcacgtaatcagcaagcgatatacgcagcgaattgagcggcataacctgaatctgaggcagcacctggcacggctgggacggaagtcgctgtcgttctcaaaatcggtggagctgcatgacaaagtcatcgggcattatctgaacataaaacactatcaataagtt

SEQ ID NO: 23120 - DNA, 270 bp, Klebsiella pneumoniae
gtaagcgaaggtcagaccgttcgcctggaaaagctggacatcgcaactggcgaagctgttgaattcgctgaagtgctgatgatcgcaaacggtgaagaaatcaagatcggcgttcctttcgttgagggcggcgtaatcaaagctgaagttgttgctcacggtcgtggcgagaaagttaaaatcgttaagtttcgtcgtcgtaaacactatcgtaagcagcagggccatcgtcagtggttcactgatgtgaaaatcactggcatcagcgcc

SEQ ID NO: 23121 - DNA, 255 bp, Klebsiella pneumoniae
atggcacataaaaaggctggcggctcgactcgtaacggtcgcgattcagaagctaaacgtctgggcgtaaaacgtttcggcggtgaagcagttctggcaggtagcatcatcgttcgtcaacgtggtactaaattccacgctggtaccaacgttggttgcggccgtgaccacactctgttcgctttgactgacggtaaagtcaagttcgaagttaaaggcccgaaaaaccgtaaattcatcagcatcgttgctgaa

SEQ ID NO: 23122 - DNA, 724 bp, Klebsiella pneumoniae
atgagggacaatgattttttcagctggcggcgggatatgctgcaccaatttcagtccatggccaccggcgaggaggtttataatctcctgcaacgtgaaaccgaagcgctggaatatgattactacacgctttgtgtgcgccacccggtgcctttcacccgcccccgcgttacgttccagtcgacttacccccgcgcatggatgtcgcactatcaggcagaaaattatttcgcgatagatcctgtgttacggccggagaattttatgcgtggccatctgccatggaacgacagcctgtttcgtgatgcgccggcactgtgggacggggcgcgtgaccatggtctgcaaaagggcgtgacgcagtgcctgacgttgccaaaccatgctcacgggatttctctctgtctcagcgaacaatcgtctgccgggcggttaccctgaagatgagcttgagctgcgtctgcgaacgctgactgaactaagcttgctgacgctgctgcgtctggaagatgagatggtgatgccgccggagatgaagttcagccgccgcgaactggaaatcctcaaatggacggcggaaggaaagacttcggcggaggtggcgatgattctctcgatttcggaaaatacggtgaatttccatcagaagaatatgcagcggaaatttaatgcgccgaataaaacgcaaattgcctgctacgccgtggcgactgggctaatctga

SEQ ID NO: 23123 - DNA, 702 bp, Klebsiella pneumoniae
gtgcggatttctacggttgaacacctgaacgccgcattggctggcctgggtatcgacaacattattgttgaagtcgatgcgccggaaatcccgattatggacggcagtgcggctccgttcgtttatctgttgctggatgccggcattgatgaactgaactgcgccaagaaatttgtacgtatcaaagagacggttcgcgtcgaagatggcgacaaatgggctgaattcaaaccgtacaatggtttttcgctggacttcaccatcgattttaaccatccagcgattgatgccagcacccagcgctatacgctgaacttctcggccgatgcgttcatgcgtcagattagccgtgcgcgtaccttcggttttatgcgcgatatcgaatatctgcagtcccgcggcctgtgcctgggcggcagcttcgattgtgccatcgttgttgacgattatcgcgtactgaacgaagacggtctgcgctttgaagacgaatttgttcgccacaaaatgctggatgcgatcggtgacctgtttatgtgtggtcacaacattatcggcgcattcacggcgtacaaatcgggtcacgcgttgaacaacaaactgctgcaggcggttctggcaaaacaggaagcctgggagtatgtgaccttcgaagacgacgcaaaactgccaatggcgttccgcgcaccgtcgatggttctggcg

SEQ ID NO: 23124 - DNA, 1022 bp, Klebsiella pneumoniae
ggcgacctgattgcacgcttcggcggcgatccgacgcttaaacggcaggatattcgcaatatggtggcgacgctgaaaaaagccggcgtgcagcgtatcgaaggcaatgtgctcatcgatacctcggtcttcgccagccatgacaaagcgcccggctggccgtggaacgacctgacgcagtgcttcagcgccccgccggcggcggcgattgtcgaccgtaactgcttctctgtctcgctgtatagcgcgcagaaaccgggcgatgtcgccttcattcgcgttgcatcctattatccggtcaccatgttcagccaggtgcgaacgctggcgcgtggctcatcggaagcgcagtattgcgagctcgacgtggtgccgggcgatctcaatcgctatactctcaccggctgcctgccgcagcgtagcgagccgctgcctctggccttcgccattcaggatggcgccagctatgccggagcgatcctcaaagccgagctggcccaggcggggatcacctacagcggcacgctgctgcgccagacgctggccaatgagcccggcaccgtgctggcaaccagccagtcggctccgctgcacgatctgctgcggatcatgctgaagaagtcagacaacatgattgccgacaccgtctttcgcaccatcggccacgcccggttcggcgtacctggcacctggcgggcgggctccgatgccgtacggcagatcctgcgtcaacaggctggggtcgatctcggcaatactatcatcgccgacggctctggcctgtcgcgccacaacctgatcgccccggcgaccatgatgcaggtgctgcagtatatcgcccagcacgataccgagctcaacttcatctccatgctgccgctggcgggccatgacggatcgctgcagtatcgcgccggtcttcatcaggcgggcgtcgatggtaaagtttcggcgaaaaccgggtcgctccaggggtttataacctcgcaggcttcatcactaccgccagcggacaaaggtgg

SEQ ID NO: 23125 - DNA, 431 bp, Klebsiella pneumoniae
ctgtctccggcccgaaggctccaaaaaggcgggtaaacgcctgggtcgtggtatcggttctggcctgcgggaaaaccggtggtcgtggtcacaaaggtcagaaatctcgttctggcggtggcgtacgtcgcggtttcgagggtggtcagatgcctcatgtaccgtcgtctgccgaaattcggcttcacttctcgtaaagcgatgatcaccgcagagatccgtctctccgatctggctcacgtagaaggcgatgtagtagacctgaacgcgctgaaagcggctaacattatcggtgtccagatcgagttcgcgaaagtgatcctgtctgggtgaggtaactcgtccggtaactgttcgtggcctgcgtgtgactaaaggtgctcgtgctgctatcgaagctgctggcggtaaaattgaggaataagtagcag

SEQ ID NO: 23126 - DNA, 1097 bp, Klebsiella pneumoniae
atggctaaacaaccgggattagattttcaaagtgccaaaggtggccttggcgaactgaaacgcagacttctgtttgtggtcggtgcgctgatagtgttccgtattggctcttttattccgatccctggtattgatgccgctgtacttgccaaactgcttgagcaacagcgaggcaccatcattgaaatgttcaacatgttctctggtggtgctctcagccgtgcttctatctttgcgctggggattatgccgtacatttcggcatcgatcatcgtgcagctgctgacggtggtttatcaaccgctggcggaactgaagaaagaaggggagtctggtcgtcgtaagatcagccagtacacccgctacggtactctggtgctggcgatattccagtcgatcggtattgctaccggtctgccgaatatgcctggtatgcaaggcctggtgattaatccaggactttgcattctatttcaccgctgtatgtcagatctggtcacagggactatgttcctgatgtggctcggcgtaacagatcactagaacgtggtatcggtaacggtatctcgatcattatcttcgccggtatcgttgcgggactcccggcggccatcgaccatactatcgagcaagcgcgtcaaggcgacctgcactatcctcctgtagctgttggttgcagtattagtattaagcagtgaccttctttgttgtattcgtctgagcgtggtcaacgccgcattgtggtaaactacgcgaaacgtcaacagggtcgtcgtgtctatgctgcacagagcacacatttaccgctgaaagtgaatatggcgggggtaatcccggcaatcttcgcttccagtattatactgttcccggcaaccatcacgtcatggttcgggggtggtactggttggaactggctgacaacaatttcgctgtatttgcagcctgggcaaccgctttatgtgttactctatgcgtctgcaatcatcttcttctgtttcttctacacggcgttggttttcaacccgcgtgaaacagcagataacctgaagaagtccggtgcatttgtaccaggaattcgtccgggagagcaaacggcg

SEQ ID NO: 23127 - DNA, 887 bp, Klebsiella pneumoniae
atggctgcccttaattctaaagtcagaaaagcggttatcccggttgcgggattaggcaccaggatgctgccggccaccaagcgattccaaaagaaatgctgccgctggtagataagccgttaattcagtacgttgttaatgaatgtatcgctgcaggaattactgaaattgttctggtaacgcactcgtcgaaaaactctatcgaaaaccatttcgataccagttttgagctggaagcgatgctggaaaaacgtgtaaaacgccagctgctggaagaagtgcagtctatttgcccgccgcacgtgactattatgcaagttcgtcagggcctggcgaaaggtctgggtcacgcggtgctgtgcgcccatccggtagtgggagatgagccggtcgcggttattctgccagacgttattctggatgaatatgaatccgatctgagccgcgataacctcgctgagatgatctctcgcttcgatgagactggcgccagccagattatggttgaacctgtcgaagacgtaaccgcttatggcgtggttgactgcaaaggcgaatccctgaagccgggcgaaagcgtaccgatggtgggcgtggttgagaagccaaaagctgacgttgcgccgtccaacctggcggtggtggggcgttatgtcctcagcgctgatatctggccgctgctggcgaaaacccctccgggcgctggtgatgaaattcagctgactgacgccattgatatgctgatcgagaaagaaacggttgaagcttatcatatgaaaggcaagagccatgactgcggtaataagcttggctacatgcaggcgtttgtcgaatatggtattcgtcacaaaacgctgggcgacgattttaaagcctggctggaaacg

SEQ ID NO: 23128 - DNA, 1328 bp, Klebsiella pneumoniae
cacaaaggtctggcctatgttgatgaactctctcctgatgaaattcgcgaataccgcggcaccctgaaagcgccgggtaaaaacagcccgtatcgcgaccgcagcgtggaagagaacctggcgctgtttgaaaaaatgcgcagcggcggcttcgaagaaggcaaagcctgcctgcgcgcgaagatcgatatggcgtcgccgtttatcgtgatgcgcgatccggtgctgtaccgcattaagttcgctgagcatcatcagactggcaacaagtggtgcatctacccgatgtacgacttcacccactgcatcagcgatgcgctggaaggcattacccactcgctgtgtaccctggagttccaggacaaccgccgcctgtacgattgggtgctagacaacatcagcatcccggtgcatccgcgtcagtacgaattctcgcgcctgaatctcgaatacaccgtgatgtccaagcgtaagctgaaccagctggtgactgagaagcacgtggaaggctgggacgacccgcgtatgccgaccatctccggtctgcgtcgtcgcggctacaccgccgaatccatccgcgagttctgcaagcgcatcggcgtgaccaagcaggacacaccatcgagatggcgtcgctggagtcctgcattcgtgaagatctgaacgaaaacgccccgcgcgcgatggcggtgatcgatccggtgaaactggttatcgagaactatccgcagggcgaaagcgaaatggtggtgatgccgaaccatccgaacagccggaaatgggcagtcgtgaagtgccgttcagcgccgaaatctggatcgatcgcgcggacttccgcgaagaagccaacaaacagtacaagcgtctggtgctgggtaaagaagtgcgtctgcgcacgcctacgtcatcaagcggaacgcgtggagaaagatgccgaaggcaatattaccaccatcttctgcacctacgatgccgacaccctgagcaaagatccggccgatggccgcaaggtcaaaggcgtgatccattgggtaagcgcggcgcatgcgctgccggtagagatccgtctctacgatcgtctgttcagcgtgccaaacccgggcgcggcggacgatttcctcgcagtgatcaacccggaatcgctggtgatcaaacaggggtacgcggagccgagcctggcgcaggccgaagccggtaaagcttaccagtttgagcgtgaaggctatttctgcctcgacagccgctatgcaaccgcaaccaatctggtgttcaaccgcaccgtcgggctgcgtgatacctgggcgaaagcgggcgaataacatttcttt

SEQ ID NO: 23129 - DNA, 1385 bp, Klebsiella pneumoniae
ggggttgtcggtatggcggtgatggggcgaaaccttgcgctgaatatcgaaagccgtggttataccgtctccgttttcaaccgctcccgtgaaaagaccgaagaagtgattgccgaaaatccaggcaagaaactggtcccttactacacagtacaagagttcgttgaatcccattgaaacaaccacgtcgcatcctgttgatggtgaaggccggggctggtacagatagcgccatcgattccctgaagccttacctcgataaaggcgacatcatcattgatggcggcaacaccttcttccaggacactatccgtcgtaaccgtgaactctctgccgaaggttttaactttatcggtaccggtgtatccggtggtgaagagggggctctgaaagggccttccatcatgccaggtggccagaaagaagcctatgaactggttgctccaattctgaaacagatcgcggcggttgcagaagacggtgagccatgtgtgacctatatcggtgctgatggtgctggccattatgtgaagatggttcataacggcatcgagtatggtgacatgcagctgattgccgaagcttatgcgctgttgaaaggcggtcttgcactatccaacgaagagctggcgaaaacctttaccgaatggaatgaaggtgagctaagcagctacctgatcgacattaccaaagatatcttcaccaagaaggatgaagaaggtaagtacctcgttgatgtcattcttgatgaagctgcaaacaaaggtaccggtaagtggaccagccagagctcactggatctcggcgaacctctgtctctgatcaccgagtccgtgtttgctcgctatatttcttcgcttaaagaccagcgtgtagccgcgtcgaaagtgctgagtggtccgcaggcgcagccggccggtgataaagctgaatttatcgaaaaagttcgtcgcgcgttgtacctaggtaaaatagtttcctatgctcagggcttctcccagctgcgtgctgcttctgatgaatacaactgggatctgaactacggcgagatcgctaagattttccgcgctggctgcatcattcgtgcgcagttcctgcagaagatcactgatgcttatgcgcaaaacgctggcattgctaacctccttctggcgccgtacttcaaacagatcgctgatgactatcagcaggcgctgcgtgatgtcgtggcgtatgccgtacagaatggtattccggtaccgacgttctctgccgcaattgcctactacgacagctaccgttccgcagttctgcccgctaacctgattcaggctcagcgtgattactttggtgcgcacacctataagcgcactgataaagaaggtgtgttccataccgagtggttg

SEQ ID NO: 23130 - DNA, 374 bp, Klebsiella pneumoniae
atgttacaaccacagcgtaccaaaattccgtaaagtgcacaaaggccgcaaccgtggtctggcgcagggtacggatgttagcttcggcactttcggtctgaaagctgttggccgtggtcgtctgactgcacgtcagatcgaagcagcacgtcgtgctatgacccgtgcagttaagcgtcaaggtaagatctggatccgtgtattcccggacaaaccgatcaccgagaagccgctggaagttcgtatgggtaaaggtaaaggtaacgtggagtactgggttgccttgattcagccgggtaaagtcctgtatgaaatggacggtgtaccggaagagctggcccgtgaagcattcggcctgcagcagcgaaactgcc

SEQ ID NO: 23131 - DNA, 696 bp, Klebsiella pneumoniae
atgggtcagaaagtacatcctaatggtattcgcctgggtattgtcaaaccatggaactctacctggttcgcgaacaccaaagaattcgctgacaacctggacagcgattttaaagtacgtcagttcctgactaaagaactggctaaagcgtctgtatctcgcatcgttatcgagcgtccggctaagagcatccgtgtgaccattcacaccgctcgcccgggtatcgttatcggtaagaaaggcgaagacgtagaaaaactgcgcaaggtcgtagcggatatcgctggcgtacctgcacagatcaatatcgccgaagttcgtaaacctgaactggacgcaaaactggttgctgacagcatcacttctcagctggaacgtcgcgttatgttccgtcgtgcgatgaagcgtgctgtacagaacgcaatgcgtctgggcgctaaaggtatcaaagttgaagttagcggccgtctgggcggcgcggaaatcgcacgtaccgaatggtaccgtgaaggtcgcgtaccgctgcacactctgcgtgctgacattgactacaacacctctgaagcgcacaccacttacggtgtaatcggcgttaaggtatggatcttcaaaggtgagatcctgggtggtatggctgctgttgaacaaccggaaccggctgctcaacctaaaaagcagcagcgtaaaggccgtaaa

SEQ ID NO: 23132 - DNA, 147 bp, Klebsiella pneumoniae
gatggcgctgacattgatgatctgaaagttgcgaaaattttcgtagacgaaggcccgagcatgaagcgcattatgccgcgtgctaaaggtcgtgcagatcgcatcctgaagcgcaccagccacatcactgtggttgtgtccgatcgc

SEQ ID NO: 23133 - DNA, 447 bp, Klebsiella pneumoniae
atgcaagttattctgcttgataaagtagcaaacctgggtagcctgggtgatcaggttaacgttaaagcgggctacgctcgtaacttcctggtcccgcagggtaaagctgttcctgctaccaagaaaaacgttgaattcttcgaagcacgtcgcgctgaactggaagccaaactggctgacgttctggcagcagctgaagctcgtgctgagcagatcaacgccctggaatccgtaaccatcgcgtctaaagctggcgacgaaggtaaactgttcggttccatcggtactcgcgacatcgctgacgctgttactgcagcaggcgttaaagttgctaagagcgaagttcgcctgccgaacggcgttctgcgtaacgttggcgagcacgaagtgaacttccaggttcacagcgaagtattcgctaaagttatcatcaacgtggttgctgag

SEQ ID NO: 23134 - DNA, 225 bp, Klebsiella pneumoniae
atggcacgttatttccgtcgtcgcaagttctgccgtttcaccgcggaaggcgttcaagagatcgactataaagatatcgctacgctgaaaaactacatcaccgaaagcggtaagattgtcccgagccgtatcaccggtacccgtgcaaaataccagcgtcagctggctcgcgctatcaaacgcgctcgctacctgtccctgctgccgtacactgatcgtcatcag

SEQ ID NO: 23135 - DNA, 225 bp, Klebsiella pneumoniae
gtgcttgagcatcgttcagtgcaggaggaagccggttttcaccggcaggcatggtgtcagatgcccgttattattagcggtcatgagaaccaggccattactcacagtataacggtcggtagcgcagtaaccgttcgagggttcatctcttgccataaggcaaagaacggcttgagcaaaatggttctgcatgccgagcagattgaattgatagattctggagac

SEQ ID NO: 23136 - DNA, 950 bp, Klebsiella pneumoniae
cacgtagactgcccggccacgccgactatgttaaaaacatgatcaccggtgctgcgcagatggacggcgcgatcctggttgttgctgcgactgacggcccgatgccgcagactcgtgagcacatcctgctgggtcgtcaggtaggcgttccgtacatcatcgtgttcctgaacaaatgcgacatggttgatgacgaagagctgctggaactggttgagatggaagttcgtgaactgctgtctcagtacgatttcccgggcgacgacactccgatcgttcgtggttctgctctgaaagcgctggaaggcgacgcagagtgggaagcgaaaatcatcgaactggctggccacctggatacctatatcccggaaccagagcgtgcgattgacaagccgttcctgctgccgatcgaagacgtattctccatctccggtcgtggtaccgttgttaccggtcgtgtagagcgcggtatcatcaaagtaggtgaagaagttgaaatcgttggtatcaaagaaaccgcgaaaaccacctgtactggcgttgaaatgttccgcaaactgctggacgaaggccgtgctggtgagaacgtaggtgttctgctgcgtggtatcaaacgtgaagaaatcgaacgtggtcaggtactggctaagccgggcaccatcaacccgcacaccaagttcgaatctgaagtgtacatcctgtccaaagatgaaggcggccgtcacactccgttcttcaaaggctaccgtccgcagttctacttccgtactactgacgtgactggcaccatcgaactgccggaaggcgtagagatggtaatgccgggcgacaacatcaaaatggttgttaccctgatccacccgatcgcgatggacgacggtctgcgtttcgcaatccgtgaaggcggccgtaccgttggcgcgggcgttgtagctaaagttctgggctaa

SEQ ID NO: 23137 - DNA, 975 bp, Klebsiella pneumoniae
gaacgcgaagaagcgaaggagcagcagaacaggctgagaagcggctgccaaggccccgcggcggcaaagccaagcggacgcacaggcaaagaagcgcaggaagccgctgccaaagcggccgccgaggcgaaagcgaaggcggatgcccaggcgaaagcggcagaacaggcggcggccaaggcggctgctgacgcgaagaagcaggccgaagccgctgcagcgaaagccgctgccgaggcgaagaaacaggcggaagctgaagcggcgaaagctgcggccgaggcgcagaagaaagcggaagcggcggctgcgaagaaagcgcaacaggaagcggagaaaaaagcccagcaggaagcggctaagcaggcggcagctgaaaaagcggctgccgaaaaagccgctgagaaagccgccgcgcaaaaagcggccgctgagaaggccgccgccgagaaagccgcagccgctgaaaaagcggcggcagcgaaagcggctgcagcagagaaggctgcagctgataaagcggccaaggcggcagcagcaaaagccgcggcggcgaagaaagcggcggctgcgaaagaagcggacggcgtagacaacctgctcggcgatctgagttctggtaagaatgcgcctaaaaccaggcggtggggccaaaggaaacaatgcctccgctgccgggagtggtaatactaaaaacagtgcctcaggggctgatatcaacaactatgccggacagataaaatcggcgattgaaagtaagttttatgacgcatcgtcctatgcgggcaaacatgtaccttgcgtatcaagcttgctcctgacggcctgttgttaaatatacagtccgaaggtggtgatcctgctctgtgccaggccgctcttgccgcagcccgacaggctaagtttccgaaaccacctagccaggcagtatatgaagtcttcaaaaatgcgccactggacttcaaacctcagtga

SEQ ID NO: 23138 - DNA, 944 bp, Klebsiella pneumoniae
cttaatgcagcgattgatgccttccatgaaaatgtttaccgtgtcacaaaagacaaggtaaacgacaaaaacgacattattgaggaagtggctaagcttctgtttttagaaactttccgtgtgcatcacgatgaagaccttacctttaaagatgatgagggaaataccctgcgttttcgtgacgtctatgattggcaatatgtggccaggcacggcgataaagccgttgcacaaatcaaagcagcgttgaggaatttaaaagccacgaaaactacgtcgtgatctcagatgatggctcacgtaatcccatcttcagtaaagaaacacacttgcgcctgtccgttgcgaaaaattatcaggatttgctggaagcaatacaaaacctggggccggtaaaaaccaacgatggcaaaatcgctaaagaacacggcacgctagctgatgtgtcaggagatttactcggcagagtgtttgatgtattcctacgcgctaactttgaatccaaaggtggccttggcgtctatttaacacctaacccagtaaaacaggccatgctagaaattgctatgcacgacatcgacgatgacgatgaaatgcgatcgcgcttagccaatggcgattttcgtttctgcgacccaacctgtggctcctttggttttggctcggtggcgttaagccagattgataaatggatcgattttaagctggtgctggccgacgataaaaaagaatcattgaaacaaaaattacgcaattatgcatttaccggtgcagatgctgcaccgcgcatggtgatgctggcccgcgtaaatatggcattgcaaggcgcccccaaagcgcagattttctataccgacaactcactcaccactaatgctctgaagccgaatagctttgacctcatttgcaccaacccgccgttcggtacgcctaaatttgataaa

SEQ ID NO: 23139 - DNA, 1176 bp, Klebsiella pneumoniae
atgaagtttgtagatgaagcaacgatcctggtcgtagcaggtgacggcggcaatggttgcgtaagcttccgccgcgaaaagtatattccgaaaggcggtccggacggcggcgatggcggcgatggcggcgatgtctggctggaagcggacgagaacctgaacaccctgatcgactaccgttttgaaaaatcgttccgcgccgaacgtgggcagaatggtcaaagccgcgactgtaccggtaagcgcggtaaagacgtgacggtaaaagtgccggtcggcacccgggttatcgatcagggcaccggcgagaccatgggcgatatgaccaaacacggtcagcgtctgatggtggcgaaaggcggctggcacggtttgggcaacacccgtttcaaatcgtccgttaaccgtacgccgcgtcagaaaaccatgggtaccccgggtgataaacgcgacctgcagctggagctgatgctgttggccgatgtcgggatgctgggcatgccgaacgccggcaaatccaccttcatccgtgcggtctccgccgccaagccgaaagtggctgactatccgtttaccaccctggtgccaagcctgggcgtggtgcgtatggacaatgaaaagagcttcgtagttgccgatatcccggggctgattgaaggcgcagcggaaggggcaggcctcggtatccgcttcctcaagcacctcgagcgctgccgcgtactgctgcacctcatcgatatcgatccgatcgacggctccgatccggttgagaatgcgcgcattatcatcggcgagctggagaaatacagcgagaagctagcctccaaaccacgctggttagttttcaacaagattgacctgatggacaaggccgaagccgaagccaaagccaaagcgattgccgaagcgctgggttgggaagagaaattctacctgatctccgcggccagccagcagggcgtgaaagagctatgctgggacgtgatgaccttcatcatcgaaaacccgatcgtgcaggcggaagaagagcagaagccggagaaagtcgagtttatgtgggacgactatcaccgtcagcagcttgaagaggccgaagccgaagcagaagatgacgaagactgggatgacgactgggatgaggacgacgaagaaggcgtcgaattcatctacaaacgc

SEQ ID NO: 23140 - DNA, 276 bp, Klebsiella pneumoniae
tttgctggtaccgttaagcgctggaacttccgtacccaggacgctactcacggtaactccttgtcccaccgcgttccgggttctatcggtcagaaccagactccgggcaaagtgttcaaaggcaagaaaatggcaggtcagctgggtaatgagcgtgtaaccgttcagagcctggacgtagtacgtgttgacgctgagcgcaacctgctgctggttaaaggtgctgtcccgggtgcgaccggtagcgacctgatcgttaaaccagctgtgaaggcg

SEQ ID NO: 23141 - DNA, 605 bp, Klebsiella pneumoniae
atggaattagtattgaaagacgcgcagagcgcgctgactgtttccgaaactaccttcggtcgtgatttcaacgaagcgctggttcaccaggttgttgttgcttatgcagccggtgcgcgtcagggcactcgtgctcagaagactcgtgctgaaatcactggctccggtaaaaaaccgtggcgccagaaaggtaccggccgtgcgcgttctggttctatcaagagcccgatctggcgttccggtggcgtgaccttcgctgctcgtccgcaggaccacagtcaaaaagttaacaagaagatgtaccgcggcgcgctgaaaagcattctgtccgaactggtacgtcaggatcgtctgatcgtgtcgagaagttctctgttgaagcgccgaaaactaagctgctggcacagaaactgaaagacatggctctggaagatgtgctgatcatcaccggtgagctggacgagaacctgttcctggccgcacgtaccctgcataaggttgacgtacgtgatgcgaacggtatcgacccggttagcctgatcgccttcgacaaagtcgtaatgactgctgatgctgttaagcaagttgaggagatgctggcatga

SEQ ID NO: 23142 - DNA, 300 bp, Klebsiella pneumoniae
atgattcgtgaagaacgtctgctgaaggtgctgcgcgcaccgcacgtttctgaaaaagcgtctactgcgatggaaaaaacaaacaccatcgttctcaaagttgctaaagacgcgaccaaagcagaaatcaaagctgctgtgcagaaactgtttgaagtcgaagtcgaagtcgttaacaccctggttgttaaagggaaagttaaacgtcacggacagcgtatcggtcgtcgtagcgactggaaaaaagcttacgtcaccctgaaagaaggccagaatctggacttcgttggcggcgctgag

SEQ ID NO: 23143 - DNA, 819 bp, Klebsiella pneumoniae
atggcagttgttaaatgtaaaccgacatctccgggtcgtcgccacgtcgttaaagtggttaacccagagctgcacaagggcaaaccttttgctccgttgctggaaaaaaacagcaaatccggtggtcgtaacaacaatggccgtatcaccacccgtcatatcggtggtggccacaagcaggcttaccgtattgttgacttcaaacgcaacaaagatggtatcccggcagttgttgaacgtcttgagtacgatccgaaccgctccgcgaacatcgcgctggttctgtacaaagacggcgagcgccgttacatcctggccccgaaaggcctgaaagctggcgaccagattcagtctggcgttgatgctgcaatcaaagcaggcaacaccctgccgatgcgcaatatcccggttggttctaccgttcataacgtagaaatgaaaccaggtaaaggcggtcagctggctcgttccgctggtacttacgttcagatcgttgctcgtgacggtgcttatgtcaccctgcgtctgcgttctggtgaaatgcgtaaagtcgaagcagactgccgcgcgactctgggcgaagttggcaatgctgagcatatgctgcgcgttctgggtaaagcaggtgctgcacgctggcgtggtgttcgtcctaccgttcgcggtactgcgatgaacccagtagaccacccacatggtggtggtgaaggtcgtaactttggtaagcacccggtatccccgtggggcctgcagaccaaaggtaagaagacccgcagcaacaagcgtactgataaattcatcgtacgtcgccgtagcaaa

SEQ ID NO: 23144 - DNA, 276 bp, Klebsiella pneumoniae
atgccacgttctctcaagaaaggtccttttattgacctgcacttgctgaagaaggtagagaaagcggtggaaagcggagacaagaagcccctgcgcacttggtcccgtcgttcaacgatctttcctaacatgatcggtttgaccatcgctgtccataatggtcgtcagcacgttccagtatttgtttccgacgaaatggtcggtcacaaactgggtgaattcgcaccgactcgtacttatcgcggccacgctgctgataaaaaagcgaagaagaaa

SEQ ID NO: 23145 - DNA, 307 bp, Klebsiella pneumoniae
gctttaaccgctattttcggtatcggcaaaacccgttctaaagccatctgcgctgaaacgggcatcgctgagaagtgttaagatcagtgagctgtctgaagaacaaattgatattctgcgtgaagcagtaggtaaatttgtcgttgaaggtgatctgcgccgtgaaatcaccctgagcatcaagcgtctgatggaccttggttgctaccgtggtttgcgtcatcgtcgtggtctcccggttcgcggtcagcgtaccaagaccaacgcacgtacccgtaagggtccgcgtaaaccgatcaagaaataa

SEQ ID NO: 23146 - DNA, 387 bp, Klebsiella pneumoniae
atggcaaaggcaccaattcgtgcacgtaagcgtgtaagaaaacaagtctctgacggcgtggctcatatccatgcttcttttaacaacaccatcgttaccatcactgatcgtcagggtaacgcactgggttgggcaacagccggtggttccggtttccgtggttctcgcaaatccactccgttcgcagctcaggttgcagcagagcgttgcgcagaagccgtaaaagaatacggcatcaagaatctggaagttatggtcaaaggtccgggtccgggtcgcgaatctaccattcgtgcactgaacgccgctggtttccgcatcactaatattactgatgtgactccgatccctcataacggttgtcgtccgccgaaaaaacgtcgcgta

SEQ ID NO: 23147 - DNA, 618 bp, Klebsiella pneumoniae
atggcaagatatttgggtcctaagctcaagctgagccgtcgtgagggcaccgacttattccttaagtctggcgttcgcgcgatcgataccaagtgtaaaattgaacaagctcctggccagcacggtgcgcgtaagccgcgtctgtctgactatggtgtgcagttgcgtgaaaagcaaaaagttcgccgtatgtacggtgtgctggagcgtcagttccgtaactactataaagaagcagcacgtctgaaaggcaacaccggtgaaaacctgttggctctgctggaaggtcgtctggacaacgttgtataccgtatgggcttcggcgccactcgtgctgaagcacgccagctggttagccacaaagcgattatggtaaacggtcgtgttgttaacatcgcttcttatcaggttaaagcgaatgacgttgtcagcattcgtgagaaagcgaaaaagcaatctcgcgtgaaagccgctctggagctggctgagcagcgtgaaaagccaacctggctggaagttgatgctggcaagatggaaggtacgttcaagcgtcagccggagcgttctgatctgtctgcggacattaacgaacacctgatcgtcgagctttactccaag

SEQ ID NO: 23148 - DNA, 758 bp, Klebsiella pneumoniae
atgcagggttctgtgacagagtttctaaaaccgcgcctggtcgatatcgagcaagtgagttcgacgcacgccaaggtgacccttgagcctttagagcgtggcttcggccatactctgggtaacgcactgcgccgtattctgctctcatcgatgccgggttgcgcggtgaccgaggttgagattgatggtgtactgcacgagtacagcaccaaagaaggcgttcaggaagacatccttgaaatcctgctcaacctgaaagggctggcggtgagagttcagggtaaagatgaagtcatccttactttgaataaatctggcattggccctgtgaccgcagccgacattacccacgacggtgatgtcgaaatcgtcaagccgcagcacgtgatttgccacctgactgatgagaacgctgctattagcatgcgtatcaaagttcagcgcggtcgcggttatgtgccggcttctgcccgaattcattcggaagaagatgagcgcccatcggccgtctgctggtcgacgcctgctacagccctgtagagcgtattgcctacaatgttgaagctgcgcgtgtagaacagcgtaccgacctggacaagctggtcatcgaaatggaaaccaacggcacaatcgatcctgaagaggcgattcgtcgtgcggcaaccatcctggctgaacaactggaagcttttgttgacctacgtgatgtacgtcagccagaagtgaaagaagagaaaccagaattcgatccgatcctg

SEQ ID NO: 23149 - DNA, 1725 bp, Klebsiella pneumoniae
atgatttcaggcattttagcatccccgggtatcgccttcggcaaagcattgctgctgaaggaagatgaaattgtcatcgaccggaagaaaatttctgccgataaggttgatcaggaagtcgaacgtttcctgagcggccgcgccaaggcctccgcccagctggaggtcatcaaaaccaaagctggtgaaactttcggtgaagaaaaagaagccatcttcgaagggcatattatgctgctggaagatgaggagcttgagcaggaaatcatagccctgattaaagataagcacatgactgccgacgcggcagccaatgaagttatcgacggtcaggccactgccctggaagagctggatgatgaatacctgaaagaacgtgcggctgacgtacgtgatatcggtaagcgcctgctgcgcaacatccttggtctggcaatcatcgatctgagtgcgattcaggatgaagtcatcctcgtcgccgccgatctgaccccgtctgaaaccgcacagctgaatctgaaaaaagtgctgggtttcatcaccgatgcgggcggtcgtacctcccacacctctatcatggcgcgttccctggaattgccggccatcgtgggcaccggcagcatcacggcgcaggtgaaaaacggcgactatctgattctcgacgcggtgaacaaccaggttctgatcaacccgtctaacgagcaaattgaagcgctgcgtagtctgcaggctcaggttgcggaagaaaaagccgaactggcgaaactgaaagatctgccggcgattaccctcgacggccatcaggttgaagtctgcgccaacattggtaccgttcgcgatgtcgaaggtgctgagcgcaacggcgccgaaggcgtaggtctgtatcgtaccgaattcctgttcatggaccgtgacgcgctgccaactgaagaagaacagtttgcggcttataaagcggtggctgaggcctgtggctctcaggccgttatcgtccgtaccatggatatcggcggcgacaaagagctgccgtacatgaacttcccgaaagaagagaacccgttcctcggctggcgtgccgtgcgtattgcgatggatcgtaaagagatcctgcgcgaccaggttcgcgccatcctgcgtgcctccgctttcggtaagctgcgcattatgttcccgatgatcatctctgttgaagaagtgcgtgcgctgaagaaagagatcgaaatctacaaacaggaactgcgtgacgaaggtaaagcatttgacgaatccattgagatcggcgtgatggtggaaacaccggctgcggcgaccattgctcgtcatctggccaaagaagttgatttctttagtatcggcaccaatgatttaacgcaatatactctggcagttgaccgtggtaatgatatgatttcacatctttaccagccgatgtcaccgtctgtactgaatctgattaagcaagttattgatgcttctcacgctgaaggtaaatggactggcatgtgcggtgagcttgcgggcgatgaacgtgctacacttctgttgctgggtatggggctggacgaattctctatgagcgccatttccatcccgcgcatcaagaagattattcgtaatacgaacttcgaagatgcgaaagtattagcagagcaggctcttgctcaaccgacaacggacgagttaatgacgctggttaacaagttcattgaagaaaaaacaatctgc

SEQ ID NO: 23150 - DNA, 252 bp, Klebsiella pneumoniae
atgacgtcaagtcatcatggcccttacgaccagggctacacacgtgctacaatggcatatacaaagagaagcgacctcgcgagagcaagcggacctcataaagtatgtcgtagtccggattggagtctgcaactcgactccatgaagtcggaatcgctagtaatcgtagatcagaatgctacggtgaatacgttcccgggccttgtacacaccgcccgtcacaccatgggagtgggttgcaaaagaagtagg

SEQ ID NO: 23151 - DNA, 1831 bp, Klebsiella pneumoniae
atgtgtggaattgttggcgcagtcgcgcagcgtgatattgctgaaagtccttctcgaaggtttacgtcgtctggaataccgtggctatgactctgccggtctggcagtggtcgacagcgaaggtcatatgacccgcgtgcgtcgcctgggtaaagttcagatgctggctcaggcggtagaagagcaaccgttacacggtggtaccgggatcgcccatactcgttgggcgacgcacggcgaaccgtctgagagcaatgcgcatccgcatgtttctgaacacattgtggtggtccataacgggatcatcgaaaaccatgagccgctgcgcgccctgctgcagtctcgcggctatgtcttcgtcaccgagaccgataccgaagttatcgcccatctggtgcactgggagctggaacaaggcggtaccttgcgtgaagccgtcctgcgcgctatcccgcagctgcgcggcgcttacggtacggtgatcatggatacccgtgacccgggaactctgctggcggcccgctccggtagcccgctggtaattggcctggggatgggtgaaaactttatcgcttccgaccagctggcattgctgccggttacccgccgcttcatcttcctcgaagaaggcgatatcgcggaagtgactcgccgttcggtggtgatttttgataagtccgctgcgcaagtgaagcgccaggagatcgaatccaatctgcagtatgacgctggcgataaaggtatctaccgccactatatgcagaaagagattttcgagcagccgaacgcgattaagaacaccctgaccgggcgcatcagccatggcgaagtggatctcagcgaactggggccgaacgccaatgaaatgctggctcaggttgaacatattcagatagttgcctgcgggacttcctataactccgggatggtctcccgctactggttcgaagcgttagccggcgtcccgtgcgatgtggaaatcgcctccgaattccgctatcgcaagtccgcagtgcgtcgcaatagcctgatgatcaccctctcccagtccggtgaaaccgccgataccctggcggcgctgcgtctgtcgaaagagctgggctatctcggctcgctggccatctgcaacgtgccgggctcgtcgctggtgcgcgagtccgatctggcgctgatgaccaaagccggaacggaaatcggcgtggcctcgaccaaagcctttaccactcagctaaccgtgctgttgatgctggtggcgaaactggcgcgactgaaaggtcaggatgcgtctatcgagcatgatatcgtgcacggccttcaggctctgccgaaccgtatcgagcagatgctctcccaggacaagcgtattgagcagctggcagagcgcttctctgataagcaccatgcgctgttccttggccgtggcgatcagtatccgatcgctatggaaggggcgctgaagctgaaagagatctcctacattcacgcggaagcctatgcggcgggcgagcttaagcacggcccactggcgctgattgatgcggaaatgccggtgattgtggtggcgccgaacaacgaactgctggaaaaactgaaatccaacatcgaagaggttcgtgcccgcggcggtgaactatacgtcttcgccgacggtgaagccggcttcaacggtagcgataacatgcacatcattgagatgccgcatgtggaagagaccatcgcccctatcttctatacggttccgctgcagctgttggcttatcacgtcgcgctgatcaaaggcactgacgttgaccagccgcgtaacctggcgaaatcggtaacggttgagtaa

SEQ ID NO: 23152 - DNA, 1113 bp, Klebsiella pneumoniae
gtggcgctggtgggcggcgcaacggtctgattggcgacccaatgcttcaaagccgactgagcgtaaactaaacaccgaggataccgtgcaggagtgggtggataaaatcctgcaaacatggtggctccgttccttgcatttttgacttgcggcgcacaactctggcgcatcgcggcgcaataactcatgactaggttatggcagacatgacacgtgctgaccttcctgcgcgatcatcggtaacacacttctcttgttacacccagatgatcaaccaaagcaagcggtagaagcagcgtctgaatcgtgacgatcagggtatctcctttacctgagttctcttacaatctgctgcagggttacgactttgcctgcctgaacaagctgcacggcgtggcgctgcagattggcggttctgaccagtggggcaacatcacctccggcatcgatctgacccgtcgtctgcatcagaaccaggtgtttggcctgaccgtaccgctgatcaccaaagcggacggcaccaaattcggtaaaaccgaaggcggcgccgtgtggctggatccgaagaaaaccagtccgtacaaattctaccagttctggatcaacaccgcggatgctgatgtctatcgcttcctcaaattcttcacctttatggacattgcggagatcaatgccctggaagaagaagacaaaaacagcggtaaagcgccgcgcgcccagtacgtgctggcagagcaggtgacgcgccttgttcacggcgaagaaggcctggaagcggcgaagcgcattaccgaaagcctgttcaacggtaacctgagcgacctgagcgaagcagacttcgaacagctggcccaggatggcgtgccgatgatcgaaatggaaaaaggcgccgatctgctgcaggcgctggttgattccgagctgcagccgtcccgcggtcaggcgcgtaaaaccgttgcctctaacgcggtgaccatcaacggcgaaaaacaggccgacccggaatatgtattcagtgacagcgatcgcctgtttggccgctacaccttgctgcgtcgcggtaagaaaaattactgcctggtctgctggaaataaaaaaatactgccagggcg

SEQ ID NO: 23153 - DNA, 1577 bp, Klebsiella pneumoniae
tcagcagagcattatgtcactatccttgatgaggctacgctgctcacctggatcgataagctgaagcaggcgccgctctttgcctttgatacggaaaccgacagcctggataacatctccgccaacatggttggtctttcattcgctgttgagccaggcgtggccgcctatgtcccggtagcgcatgattatcttgatgcgccggatcagatcccgcgcgagcgcgtgctggcgctgcttaaaccgctgctggaggatgagaaggtgctcaaggtcgggcaaaatctcaaatacgatcgcggcattttggctaattacgacattgagctgcgcgggattgcgttcgataccatgctcgagtcttacattctcgacagcgtggcgggccgccacgatatggacagtctttccgaccgctggctgaaacataaaaccattaccttcgaagagatcgctggcaagggtaagaatcagctcacctttaaccagattgcgctggaagaggctggtcgctacgcggcggaagatgccgacgttacgctccagctgcatctgaagatgtggccgaagctacagcagcatgaaggcccgctgaatatcttccagcatattgaaatgccgctggtgccggtgctgtctcgcgttgagcgcaacggcgttaaaatcgaccccgccgtgctgcatgcgcactcgcaggaaattgcccagcgcctggttgagctggagcagcgagcacatgagatcgccggggaagcgtttaatctctcctccaccaaacagctgcaaacgatcctgtttgaaaaacagggtatcaagccgctgaagaagacgccgggcggtgcgccgtccacctctgaagaggtgctggaagagctggcgctcgattatccgttgccgaaagtgattctggagtatcgtgggctggcgaagctgaagtcgacctataccgataagctgccgctgatgattaaccccaaaacgggccgcgtgcatacctcctatcatcaggcggtcaccgccaccggccgtttgtcgtctaccgatccaaacctgcaaaacattccggtgcgtaacgaagaagggcgccgtattcgccaggcgtttatcgcgccggaagattacgtcattgtctcggcggactactcgcaaatcgagctgcgcattatggcgcacctgtcgcgggataaaggcctgctgaccgccttcgcggaagggaaggatattcaccgggcgacggcggctgaagtatttggcttaccgctggacagcgtcagcagcgaacagcggcgcagtgcgaaagccatcaacttcggtctgatctacggcatgagcgcctttggcctggcccgccagctgaacatcccgcgtaaagaagcgcagaagtacatggatctttatttcgaacgttatccgggcgtcctggagtatatggagcgcacccgcgcacaggcgaaggagcaagggtatgttgaaacgctggatggccgtcgactctattcgccggaccccagtccagcaatggcgctcgtcgtgccggcgcggagcgtgcggcgattaacgccccgatgcaggggacg

SEQ ID NO: 23154 - DNA, 528 bp, Klebsiella pneumoniae
atggctaacctgaaaacgaaactcagtgcggccatgctggcgcttattgctgctggcgcatcagctcccgttctcatggatcagttcctgaatgagaaagagggcaatagcctcacgtcataccgcgatggctccggcatctggacgatatgtcgtggtgctacccgggtagatggcaaccctgtaacgcaggggatgaaattaacccaggtcaaatgcgaccaggtgaatgctattgagcgcaataaagcgctggcatgggttgatcagaatgtgcgggttcatctgacgccccctcaaaaggtcgggattgccagtttctgcccttataacatcgggcccggtaaatgctttccttccaccttctaccgcaagctgaatgccggtgaccgtaaaggcgcctgcgctgaaattcgccggtggatttttgatggcggaaaagattgccgcgtgcgttcgaacaattgttacggccaggtctctcgtcgtgatcaggaaagcgcactggcatgttgggggatagatgaa

SEQ ID NO: 23155 - DNA, 1026 bp, Klebsiella pneumoniae
atgaaccactccctcaaaccttggaatacctttggcattgaacgcttcgccaagacgatagtacgcgccgaaactgagcaacagttgctaagcgcctggcaaaccgctgccgcggcaggcgaacccacgctgatccttggggaaggcagtaatgtcctgtttctgaacgactatgccggtacggtgatcctcaaccggattatggggatcgaggtgagcgaaacgccggaagcctggcgcttgcacgtcggcgccggcgaaaactggcatcagttggtgcagttcacgctacagcatgcgatgccaggtctggaaaatctggcgttaatccctggctgtgcaggatcttcgccgatccagaatattggcgcctacggcgttgagctacagcgggtttgcgaatatgttgactgcattgagctggaaaccgggcgtaagcaacgtctttcagccgcggaatgccgttttggctatcgcgacagtatcttcaaacatgaatatcaggaccgctatgccatcgtcgcgattggcttatcgttagcgaaaacatggcagcctgtactgagttacggtgatttaacgcgtctcgatccgcagaccgtcacgccgcagcaggtatttgatgcggtctgtcatatgcgaatgactaaattgccggatccaaagattaacggtaatgccggcagcttttttaagaacccgatcgtcagcgctcaggttgcgaaagcgctgctggcgcagttccctcatgcaccgcactatccgcaggcaaatggcagcgtcaagctggccgctggctggctaatcgatcaatgtgagctcaaaggacaacgcatcggcggcgcggccgtccatcgacagcaggcgctggtactgattaatgaagatcgagcgaccagcgaggatgtggtaaaacttgctcattatgttcgccagcgggtgggtgcgaaattcgatgtatggcttcagcccgaggtgcgcttcattggcacgcatggtgaagtcaacgcagaggagagcattgcg

SEQ ID NO: 23156 - DNA, 825 bp, Klebsiella pneumoniae
atgatctgggatgctgaaaagcgcggcgttctgaaacctggcgtggaactggtcgagccgaccagcggcaacaccggtatcgccctcgcctacgtggcggcggcccgcggctacaaactgacgctaaccatgccggaaaccatgagcatcgagcgtcgtaagctgctgaaagccctgggcgccaacctggtgctgaccgaaggcgccaaaggcatgaaaggcgctatccagaaagcggaagagattgtcgccagcaacccggaacaattcctgctgctgcagcagttcagcaacccggctaacccggaaatccacgagaagactaccggcccggaaatctgggaagataccgatggtcaggtggatgtgtttatctccggcgtaggtaccggcggaacgctgaccggcgtcagccgctatattaaaaacaccaaaggtaaaaaagatctgatcaccgtcgccgttgaaccgaccgattccccggtgatcgcccaggcgctggcgggggaagagctcaagccgggcccgcacaaaattcagggtatcggcgccggcttcattcctggcaacctggatctgaagctggtcgacaaagtgatcggcattaccaacgaggaagctatctccacggcgcgccgcctgatggaagaagaaggcattctggcgggtatctcttccggggccgccgttgccgccgcgctgaagctgcaggaagatgaggcctttaccaataagaatattgtggttatcctgccttcctcaggtgagcgttatttaagcaccgcgctgttcgccgatctcttcactgagaaagagctgcaacag

SEQ ID NO: 23157 - DNA, 875 bp, Klebsiella pneumoniae
atgtcagttttaattaataaagataccaaggttatctgccagggcttcaccggtagccaggggaccttccactctgaacaagcgatcgcttacggtacgcaaatggttggcggcgtgacgccaggcaaaggcggcaccactcacctgggcctgccggtgttcaacaccgtgcgcgaagccgttgaagcgaccggcgcgaccgcgaccgtgatctacgttccggcgccgttctgcaaagattccatcctggaagcgatcgacgcgggcattaagcttatcatcaccatcaccgaaggtatcccaacgctggatatgctgaccgtgaaggtgaagctggacgaagcgggcgtgcgtatgatcggcccgaactgcccgggcgttatcactccgggcgagtgcaaaatcggcatcatgccgggtcacattcacaagccgggtaaagtgggcatcgtttcccgttccggcaccctgacctatgaagcggttaagcagaccaccgactacggcttcggccagtctacctgcgtcggtatcggcggcgacccgatcccgggctccaacttcatcgatatcctgaagatgttcgaggaagatccgcagaccgaagcgatcgtcatgatcggtgagatcggcggcagcgcggaagaagaagcggctgcttatattaaagatcatgtcactaagccggttgtcggctacatcgcgggcgttaccgcgccgaaaggcaagcgtatggcccactgcgggcgctatcatcgccgccggtaaaggtacagcggatgagaaattcgcagcgctggaagcggcgggtgtgaataactgttcgcagcctggccgacatcggcgaagcgctgaaagctattatcaagtaaacc

SEQ ID NO: 23158 - DNA, 1866 bp, Klebsiella pneumoniae
atggatgtcgcgctggatatcggtccaggcctggcgaaagccaccattgccgggcgggtaaacggtgaactggtagacgcctgtgacccgatcgaatccgattccactctctctatcatcaccgcgaaagatgaagaagggctggagatcattcgtcactcctgcgcgcacctgttaggccatgccatcaaacagctgtggcccaacaccaaaatggctatcggtccggttgtcgataatggtttctactatgacgtagacctcgaccacaccctgacccaggaagatatcgacgcgctcgaaaaacgtatgcatgagctcgccgagaaaaactacgacgttatcaagaagaaagtgagctggcatgaagcgcgtgaaaccttcgtgaaacgcggcgaaagctataaagtttctattcttgatgaaaacattgcccatgatgacaagcctggcctgtatcatcatgaagaatatatcgatatgtgccgcggtccgcacgtaccgaacatgcgcttctgccatcactttaagctgatgaaaaccgccggagcctactggcgcggcgacagcaacaataaaatgttgcagcgtatctacggcaccgcgtgggcagataaaaaagcgctgaatgcctacctgcagcgtctggaagaagccgccaagcgtgaccaccgtaaaatcggtaagcagctcgacctgtatcacatgcaggaagaggcgccggggatggtgttctggcacaatgacggctggaccatcttccgtgaactggaaacgtttgttcgttctaaactgaaagagtaccagtatcaggaagtaaaaggtccgttcatgatggaccgtgtgctgtgggaaaaaaccggccactgggacaactacaaagatgcgatgttcaccacctcttctgagaaccgtgaatactgtatcaagccgatgaactgcccgggtcacgtgcagatcttcaaccaggggctgaaatcctaccgcgacctgccgctgcgtatggcggaattcggtagctgccaccgtaacgaaccgtctggcgcgctgcatggtctgatgcgcgtgcgcggctttacccaggatgatgcgcatatcttctgtactgaagatcaggttcgcgatgaagtgaacgcctgtattcgtatggtctacgatatgtatagcacctttggcttcgagaagatcgtcgtcaaactgtcgactcgcccggaaaaacgtatcggtagcgacgagacctgggatcgcgcggaagcggatctggcggtggcgctggaagaaaataacatcccatttgaatatcaactgggtgaaggggcgttctacggcccgaaaattgaatttaccctgtatgactgcctcgatcgtgcatggcagtgcggtaccgtacagctggacttctctctgccgcagcgtttaagcgcctcctatgtgggcgaaaacaacgagcgtcaggtgccggtcatgattcaccgtgcgattctcggttctctggagcgcttcattggcatcctgaccgaagagttcgcaggcttcttcccaacctggattgcaccagtgcaggtagtggtcatgaatatcaccgattctcaggctgaatacgttaacgaattgacgcgtaaactacaaaatgcgggcattcgtgtaaaagcagacttgagaaatgagaagattggctttaaaatccgcgagcacactttacgtcgtgtcccgtatatgttggtctgtggcgacaaagaagtcgaagccggcaaagtggccgtgcgcacccgtcgcgggaaagacctcggcagcatggacgtaaatgaagtgatcgagaagctgcaacaagagattcgcagccgcagtcttcaacaactggaggaa

SEQ ID NO: 23159 - DNA, 1359 bp, Klebsiella pneumoniae
atgcccgaacatgtgcatcatatcgttaaacgtctaatcctttatatttgcatttgtttactggccgggattggcatttccgggatgactgctttttttcataccagcttcagtagtacttcctcaatattatttccgctgctgaccagtttcctgatggtttttcatattaccattgcctgttttatgggcatgaaatactggagcagcaagcggcgtctgtaccttactccagtctctttcgggtttgcctgctcagcgctgctgatgcttggcacgctcagcagctatccggactggcttacctgcaatccggccccggtcgttaatcaaaatgacgccgttatctattatttcttccgcaatataatgatggctgtgttattcatgtcatctattattttgtactattttcgccagcgcatcatgcattcgtggaaagcacacgttcttacatttacagcatgtatactttttacgttgaccattattgttttatcatggctatactccagccattcgccgtggctgagcgtcaattttatcgacgatctgagccatacctttaccccgttgtggcaaagtattatcggctggctgctgatggcagtttggttcatcacgctgattttattaattagcttgagtaaactgcgtaatattttttggttcagcggcgcttttttttgcagcgcttatttgttcacgcttttccagctgctctccaccgcaggggagctggatcagacctggtaccaggcgcgttttttcgaaacgctatgcaccttgttcctgattctggtgctactggttgacgtctttatcctctatcgcgagtctaaccacaaatatgtccattcgtatcagaattcgatccgcgacccgttgacccgcctctacaaccgcagctttttctacgacactcttaaccaacagctggcgaaggtgaatgcccagcatccgctgtcggtgctcatcagcgacctcgaccatttcaaacgcatcaacgatagctacggccatgtcgccggcgacaaagtgatccagttcgccgcctcggtgctggaaagccattcgcgggtagatgacgccgccgcacgcatcggcggtgaggaatttgctctgctgctggtcaacaccggtgaaaaagaagcgcaagcgatcgccgagcgtatccgcctggcggtcagtgccggggagagccatttaccggagcgaatgaccatcagcatgggggtgtataccacctacgacaatagcgtgacagcggaagcgtgcgttcagcgcgcggacgaagccatgtatgaagcaaagaataacggacgtaaccaggtgatcgtctggcatcagcagggaggg

SEQ ID NO: 23160 - DNA, 243 bp, Klebsiella pneumoniae
gtgcgcacgctcgatcagctggaggagaaaggactcatttctcgccagacctgcgcaagcgatcggcgggccaaacgcatcaagctgacggaaaaagccgaaccgctgatcaacgagatggaagaggtgataggtaagacccgtgatgaaatcctctcaggggtctcgaagcaggaagtggaaaccttgctccacttaatccgtaaacttgaacaaaatatcctcgatctccaggctaaagat

SEQ ID NO: 23161 - DNA, 201 bp, Klebsiella pneumoniae
atgatgaattgtccaaagtgcggccacgcggcgcatacgcggagtagctttcgggtaacggatcagacaaaagagcgttactgtcagtgccagaacattaattgcggaaccaccttcatcactcatgaaaccgtagtgcgatacatcatgacacctggagttattgataatgccccgccgcaccccactgccgccgggcag

SEQ ID NO: 23162 - DNA, 425 bp, Klebsiella pneumoniae
atgtttactggtattgttcagggaaccgcgaaagtggtctccattgatgataaacccaattttcgcactcacgtggttgagttaccggcacatatgctggaggggctggaaaccggcgcctcggtagccaacaacggctgctgcctgacggtgaccgaaatcaacggcgcgcgcatcagcttcgatctgatgaaagagacgctgcggattaccaatcttggcgatattcaggtcggcgatgaagtgaacgtcgagcgagcggcgaaatttagtgatgaaatcggcgggcatttaatgtccggccacattatgaccaccgcggagatcgtgaagattctgacttccgaaacataaccgtccgatctggtttaaagtgcaggatcccacgctgatgaaaattacatccttctataaaggattcatcg

SEQ ID NO: 23163 - DNA, 1175 bp, Klebsiella pneumoniae
atgaaaattactatttccggtacaggttatgttggtttatcgaacggtgtcctgattgcgcaaaaccacgaagtggttgctctggatatcgtacaggccaaagtggatatgcttaaccagaagatctctccgattgtcgataaagagattcaggaatatctggcagaaaaaccgttaaatttccgtgccaccacggataagcacgacgcataccgtaatgccgactacgtgatcattgccacgccgaccgactacgatcccaaaaccaactacttcaacacctctacggtggaagcggttattcgcgaggtaacagagatcaccccgaacgcggtgatgatcattaaggatcgaccattccggtggggttcacccgcgacatcaaagaacgtttagggattgataactgttatgtgctctccggagttcctgcgtgaaggacgtgcgctgtacgacaacctgcacccgtcgcgtattgtcatcggtgagcgctctgcgcgtgccgaacgttttgctgatctgctgaaagaaggcgcgatcaagcaggatatcccaaccctgtttaccgactccaccgaagcggaagcgatcaactgttcgctaacacctatctggcgctgcgcgttgcctatttcaacgagctcgacagctatgctgaaagccaggggctgaacagcaaacagattatcgaaggggtatgcctggatccgcgtatcggcaaccactataacaacccgtcctttggctacggcggctactgtctgccgaaagataccaagcagctgctggcgaactacgaatcggtcccgaacaatatcatcgcggctatcgtcgatgccaaccgtacccgtaaagactttatcgcagattctattctcgctcgtaagccgaaagtggtgggtgtgtatcgcctgatcatgaagagtggttcggacaacttccgtgcctcttctattcagggcattatgaagcgcatcaaggcgaaaggtattccggtcattatctatgaaccggtaatgcaggaagatgagttctttaactctcgcgttgtgcgcgacctggctgccttcaaacaagaggcggatgtgatcatctctaaccgtatggcggaagagctggcggatgtcgcggataaggtttacacccgcgatctgtttggcaacgattaattctgc

SEQ ID NO: 23164 - DNA, 366 bp, Klebsiella pneumoniae
atgtggttgctggatcagtgggcggaacgtcatatcctcgatgcccaaacccaaggtgagttcgataatttacccggcagcggagaaccgctgactctcgatgacgattcacatgtgccggcggagttgcgggcaggctatcgccttctgaaaaatgcaggatgtcttcctccggaactggagcaacgcaaagaagcgttggctctggcagatttactgaacggcgtccgtcaggacgatccgcgtcatgccgaacttagcaaacgccttgccctgctcgagctgaagttacgtcaggcaggtctgaacaccgactttttacgcggtgagtacgccgatgcgttgctgcaaaaaataaatcaggag

SEQ ID NO: 23165 - DNA, 384 bp, Klebsiella pneumoniae
atgcgccatcgtaagagtggtcgtcaactgaaccgcaacagcagccatcgccaggctatgttccgtaacatggcaggttcgctggttcgtcatgaaatcatcaagacgaccctgccgaaagcgaaagaactgcgtcgcgtagttgagccgctgattactcttgccaagactgatagcgttgctaatcgtcgtctggcattcgcccgcactcgtgataacgagatcgtggcaaaactgtttaacgagctgggcccgcgtttcgcgagccgcgccggtggttacactcgcattctgaagtgtggcttccgtgcaggcgacaacgcgccgatggcatacatcgagctggttgatcgtgctgagccgaaagcagaagctgctgcagag

SEQ ID NO: 23166 - DNA, 732 bp, Klebsiella pneumoniae
atgagttttgaaggaaaaatcgcgctggttaccggtgcaagccgcggtattggccgtgccatcgctgaaacgctcgtcgcccgtggcgcgaaagttatcggtactgcgaccagcgaaagcggcgcgcaggcgatcagcgactatttaggcgccaatggtaaaggtctgatgttgaatgtgaccgacccggcatctattgaatctgttctggaaaatgtgcgcgcagagtttggcgaagtggatatcctggtgaataatgccgggatcactcgcgacaatctgttaatgcgcatgaaagatgacgagtggaacgatattatcgaaaccaacctgtcatcggttttccgtctgtcaaaagcggtaatgcgcgctatgatgaaaaagcgtcatggacgtattatcactatcggttctgtggttggtaccatgggaaatgcgggtcaggccaactacgccgcggcgaaagcgggtctgatcggcttcagtaaatcactggcgcgtgaagttgcgtcccgcggtattactgtaaacgttgttgctccgggctttattgaaacggacatgacgcgtgcgctgaccgatgagcagcgtgcgggtacgctggcggcagttcctgcggggcgccttggcaccccaaatgaaatcgccagcgcggttgcatttttagcctctgacgaagcaagttacatcactggtgaaacgttgcacgtcaacggcggaatgtacatggtc

SEQ ID NO: 23167 - DNA, 926 bp, Klebsiella pneumoniae
atgacgcaattcgcatttgtgttcccggggcaggctctcaggccgtaggcatgctggccgaaatggctgccgcctggccggtcattgaagagaccttcggtgaagcttccgcagcgttgggttacgatctgtgggcgctgacgcaacagggcccggcagaagaactgaataagacctggcagactcaaccggcgctgctcgccgcctccgtggcgctgtaccgcgtctggcaacagcagggcggcaaagcgccagcgctgctggcgggtcacagcctcggcgaatactccgcgctggtatgcgcgggcgttatcggtttcgctgatgccgttcgcctggttgagctgcgtggtaaattcatgcaggaagctgtaccggaaggtaccggcgccatgtccgcgattatcggtctggacgacgccgctatcgccaaagcctgtgaagagtctgccgaagggcaggtggtctctccggtgaactacaattctccgggccaggtggttatcgccgggcacaaagaggccgttgaacgtgcgggcgccgcctgtaaagccgccggtgccaaacgcgcgctgccgctgccggtgagcgtgccgtcccactgcgcgctgatgaagccagccgcagaaaaactggcggtagagctgcagaaaatcaccttcaacgcgccgacgattccggtggtgaataacgtcgacgtgaagtgcgaaaccgcgccggacgccattcgcgacgcgctggtgcgccagctgtacagcccggtgcagtggaccaaaaccgttgagtttatggctgccgagggcgtatcgcatctgtatgaggttggcccgggtaaagtcctcaccggcctgaccaaacgtattgttgacaccctgaccgcttccgcgcttaacgagccggcggcgatgtctgcggcgcttgagcaa

SEQ ID NO: 23168 - DNA, 615 bp, Klebsiella pneumoniae
atggcacaactttatttctactactctgcaatgaatgcaggtaagtcgaccgctctgttgcaatcttcgtacaattaccaggagcgggggatgcgtaccgtcgtttataccgctgagattgatgaccgctttggcgccggaaaagtcagttcgcgtatcgggctctcctcgccggcccgattgtataatccacagacctcgttatttgacgatattgcggcggagcaccagctaaagccgattcactgcgtgctggtggatgaaagccagtttctgacgcgtgaacaggttcatgagctgtccgaagttgtcgatacgctggatattccggtgctttgctatgggttgcggacggactttcgcggtgagctctttaccggcagccagtatttactggcctggtcagataagctggttgagctgaaaacgatctgcttctgcggccgcaaggccagcatggtattgcgcctcgatcaggaggggcgtccttataatgagggtgagcaggtcgtcatcggcggtaatgagcggtacgtatcggtctgccgtaagcattataaagaggcgctgagcgtcggttcgttaaccaaggtacaaaaccagcaccgtccctgc

SEQ ID NO: 23169 - DNA, 1253 bp, Klebsiella pneumoniae
aacatgcttcattttcttatttatgatgtgctaggaacaccggcgatactggttggtttattttcactgatcggtctgctgttgcaaaaaaaaggaatttcagacgttatttcaggcacgctgaaaaccatcatgggttttgtcatattgaccgccggcgccggtattatagcctatacgttaaccatctttagccagttatttgaacattctttccatattcagggcgtggtgcccaacactgatgccatggccgctctggcgcagaagaattacggcacggaaaccgccaccattatggtatgggcatgctgatcaatatcgccctggcgcgtctaacgccattaaagtacatctttctgaccggacatcatacgctttatatggctgcgatgctggcggttatcctgtctgtagggggcttgtcagggggatgggtggtggccatcggggcggttattctcggtgcgatgatggtcatctccccggctatcttgcagccgtttacccgtaaaataaccaacaccgacgatctggcgctcgggcattttggatctattggctatctgctgtccgcgctggtgggcaaaattattggtaaaggcagtccctcgattgaagagatcaaagtacctaagtcgctcaatttccttcgcgactcatcagtagccatctctctcaccatgatgattctgtttctggtgctggtgctcgttgcgggaaaatcctttgtcgaggagaccctgagcgctggtcagaactttattatcttcgccattattcagtccctcacgtttgctgcaggagtttatatcatcctcgccggggttcggatggtgattgccgagatcgtcccggcgtttaaagggattgcggacaaactggttaaagacgcgaagccggcgctggactgtccgacggtgtttcccttcgctccgaatgccgttatcgtcggcttcctcgcaagctttgtcgcaggactggtcagtatgttcctctgcccgctgttcggcttgagcgtcatcgtcccgggcctggttccccactttttctgcggggccacagcgggggtttacggcaacattaccggcggacgtcgcggggcggtggtaggggcttttgctcacggtctgctcatttcgttcctgcctgccattctcttgcccatgatgggggatatgggactgggctccacaacctttggagacgcagactttggcgttgtcggcatcgtgctgggtcatatcatcgca

SEQ ID NO: 23170 - DNA, 286 bp, Klebsiella pneumoniae
gtattcggtgacgcactatggcgacgcttggggcgtcttatgagcctgctgtcaccctttgaacgtggtgatatggatgacggatggctggccgctgtatgaatcccgcctgaagggaaagctgcacgtaatcagcaagcgatatacgcagcgaattgagcggcataacctgaatctgaggcagcacctggcacggctgggacggaagtcgctgtcgttctcaaaatcggtggagctgcatgacaaagtcatcgggcattatctgaacataaaacactatcaataa

SEQ ID NO: 23171 - DNA, 290 bp, Klebsiella pneumoniae
atgctttcagcacttatctcttccgcatttagctaccgggcagtgccattggcatgacaacccgaacaccagtgatgcgtccactccggtcctctcgtactaggagcagcccccctcaattctccagcgcccacggcagatagggaccgaactgtctcacgacgttctaaacccagctcgcgtaccactttaaatggcgaacagccatacccttgggacctacttcagccccaggatgtgatgagccgacatcgaggtgccaacaccgccgtcgatatgaactcttgggc

SEQ ID NO: 23172 - DNA, 2431 bp, Klebsiella pneumoniae
gccgcgctggtagaaactgctgaaaacccgcctgcgggcgaagaagaattcctgttagacctgctgattaaccgtgtaccgccgggcgtcgatgaagccgcctatgttaaagctggattccttgccgcgatcgccaaaggcgaagcgacctcccccctggttacccctgaaaaagccgttgaactgctgggcaccatgcagggcggttacaatatccatccgctgatcgatgcgctggacgacgcgaaactggcgccgattgccgcgaaagcgctctcccacaccctgctgatgttcgataacttctacgacgtggaagagaaagccaaagcgggtaacgagcatgctaaacaggttatgcaatcctgggctgacgccgaatggttcctgaaccgtccgcagctggcagagaaaatcactgttaccgtcttcaaggtcaccggcgaaacgaacaccgatgatctctctccggcgccggatgcgtggtcgcgcccggatatcccgctgcatgcgctggcaatgctcaaaaacccccgcgaaggcattgagccggatcagccgggcgtggttggcccaatcaaacagatcgaagccctgcagcagaaaggctacccgctggcctacgtcggcgacgtggtcgggaccggttcttcacgtaaatccgccaccaactcggtgctgtggtttatgggcgacgatatcccgaacgtgccgaacaagcgcggcggcggcctgtgtctgggcggtaaaatcgcgccaattttcttcaacaccatggaagatgcgggcgcgctgcctatcgaagttgatgtgtctaacctgaacatgggcgacgtaatcgacgtttacccgttcaaaggcgaagtgcgtaaccacgagaccaatgaactactggccagcttcgagctgaaaaccgatgtgctgatcgacgaagtgcgcgccggcggccgtattccgctgatcatcggtcgcggtctgaccaccaaagcgcgtgaagcgctgggcctgccgcacagcgatgtcttccgtcaggcgaaagacgtggcggaaagcacccgcggcttctcgctggcgcagaaaatggttggccgcgcctgcggcgttgccggtattcgtccgggcgcttattgcgaaccgaaaatgacctccgtcggttctcaggacaccaccggtccaatgacccgtgatgagctgaaagacctggcgtgcctgggcttctctgcagacctggtgatgcagtccttctgccacaccgcggcctacccgaagccggttgacgttaccacgcaccacactctgccggacttcatcatgaaccgcggcggtgtttctctgcgtccgggcgatggcgtgattcactcctggctgaaccgcatgctgctgccggataccgtgggtaccggcggtgactcccacacccgtttcccaatcggcatctccttcccggcgggctctggtctggtggccttcgccgccgcgaccggcgtgatgccgctggatatgccggaatcggtgctggtgcgtttcaaaggtaaaatgcagccggggatcaccctgcgtgacctggtccacgccatcccgctgtacgccatcaagcagggcctgctgaccgtggagaagaaaggtaagaaaaacatcttctctggtcgcatcctcgagatcgaaggtctgccggatctgaaagtcgagcaggcgttcgagttgaccgatgcctcggcggagcgttctgccgccggctgcaccatcaagctgaataaagagccgatcgttgagtatctgaactccaacatcgttctgctgaagtggatgatcgccgaaggctacggcgaccgccgtaccctggagcgtcgtatccagggcatggaaaaatggctggcggatccgcagctgctggaagccgatgctgacgcggaatacgcggcagtgatcgacatcgatctggcggatattaaagagccgattctgtgcgcgccgaacgatccggacgatgcccgcctgctgtctgatgtgcagggcgagaagatcgacgaagtgttcatcggctcctgcatgaccaacatcggcccacttccgtgccgccggtaagctgctggacagccacaaaggccaactgccgactcgcctgtgggtggcgccgccaacccgtatggatgccgcgcagctgaccgaagaaggctactatagcgtgtttggtaagagcggggcgcgtatcgaaatccctggctgttccctgtgtatgggtaaccaggcacgcgtggccgacggcgcgacggtggtttccacctctacccgtaacttcccgaaccgtttaggtaccggcgctaacgtctatctggcctctgccgaactggcagcggtggcttcgctgctcggcaaactgccgacgccggaagagtaccagaccttcgtggcgcaggtggataagacggcg

SEQ ID NO: 23173 - DNA, 759 bp, Klebsiella pneumoniae
atgaattatcgcctgtcggcgcttgcgcttggcgccacattgctggtgggatgtgccagttccagctctggcgatcggccgcaggggcgctcagacccgttagaagggtttaaccgcacgatgtttaacttcaactttaacgtggttgatccttacgtgcttcgccccgtcgcggtggcatggcgcgactacgtcccacagccggcgcgcaacgggttaagcaattttaccagtaacctggaagagccggcagtgatggtgaactacttcctgcagggcgacccctataaaggtatggtgcattttacccgcttcttcctgaacaccattctcggtatgggtgggcttatcgatgtggccgggatggcgaatccgcagctacagcgggttgagccacatcgtttcggcagtacgcttgggcattatggcgttggctatggcccgtatgttcagttgccgttctatggaagctttaccctgcgcgacgaaggcggcgatatggccgatggcttgtatccggtgctctcctggctgacctggccgatgtcgatcggtaaatgggcggtggaagggattgagacacgtgctcagctgctggattccgacggcctgctgcgccagtcttccgacccttacattctgatgcgtgaagcctacttccagcgtcatgactttatcgccaacggcggtaagctgaccccggcggacaacccgaatgctcaggctattcaggatgagctgaaggatatcgattcacag

SEQ ID NO: 23174 - DNA, 1118 bp, Klebsiella pneumoniae
accatgtcggcgggcgccgtgtttgtcgacccgggcgttaatgtttcgggcacctctcccaccggcaagagcttgaaagcagacaatatcgccccgacggcgtgggtgcccaacttccactttgtcgcgccgattaacgaccatttggttggggggcgtctatcacctctaactatggtctggcaacagagtataacgatgattatgcggccggcagcatgggcggtaaaaccgacctgaccaccgcgaacttcaacctgagcggcgcctaccgcctcgacagcaactggagcttcggcttaggctttgacgcggtctacgccaaggcgaagatcgagcgctatgcaggcgatctggggcagattgtcgcaggctctggcgcgctgccgccggcgctggcgggccaggtagcgaagatcccggccgacacgcagatcgcccatcttaatggcaacgcgtggggcttcggctggaacgccgggatcctctatgagctggataagaataaccgctacggtttaacctaccgttctgaggtcaagatcgacttcgacggtaactaccgcagcagcctgccggcggcctataaccagatcctcggcaacttcggcctgccggcgggcaccagcggccagacgacaaatggttcgctaacccttaacctgccggaaatgtgggagctgtccggctataaccgcgtggcgccgcagtgggcggtccactatagcctgacctacaccagctggagtcagttccaggagctgaaagccaccggcagcaacggccagacgctgttctataaagaggaaggcttcaaggacgcctatcgtcttgcgctggggaccacctattattatgacgataactggaccttccgtaccggtatcgccttcgatgacagcccggtgccggctaataaccgctctatctctattccggaccaggatcgcctgtggctgagcgcgggtaccacctacgcgttcaataaagatgcctcggttgacgtcggcgtttcatacatgcacgggcagcatgttgaaattaaggaaggcccgtataccttccgttccgaaggaaccgcctggctgtacggcgctaacttcaactaccgcttctga

SEQ ID NO: 23175 - DNA, 1182 bp, Klebsiella pneumoniae
gtgtctaaagaaaaatttgaacgtacaaaaccgcacgtcaacgttggtactatcggccacgttgaccatggtaaaactaccctgactgctgccatcactaccgttctggctaaaacctacggtggttccgctcgcgcattcgaccagatcgataacgcgccggaagaaaaagctcgtggtatcaccatcaacacctctcacgttgaatatgacaccccgactcgccactacgcgcacgtagactgcccgggccacgccgactatgttaaaaacatgatcaccggtgctgcgcagatggacggcgcgatcctggttgttgctgcgactgacggcccgatgccgcagactcgtgagcacatcctgctgggtcgtcaggtaggcgttccgtacatcatcgtgttcctgaacaaatgcgacatggttgatgacgaagagctgctggaactggttgagatggaagttcgtgaactgctgtctcagtacgatttcccgggcgacgacaccccgatcgttcgtggttctgctctgaaagcgctggaaggcgacgcagagtgggaagcgaaaatcatcgaactggctggccacctggatacctatatcccggaaccagagcgtgcgattgacaagccgttcctgctgccgatcgaagacgtattctccatctctggtcgtggtaccgttgttaccggtcgtgtagagcgcggtatcatcaaagtaggtgaagaagttgaaatcgttggtatcaaagaaaccgcgaaaaccacctgtactggcgttgaaatgttccgcaaactgctggacgaaggccgtgctggtgagaacgtaggtgttctgctgcgtggtatcaaacgtgaagaaatcgaacgtggtcaggtactggctaagccgggcaccatcaacccgcacaccaagttcgaatctgaagtgtacatcctgtccaaagacgaaggcggccgtcatactccgttcttcaaaggctaccgtccgcagttctacttccgtactactgacgtgactggcaccatcgaactgccggaaggcgtagagatggtaatgccgggcgacaacatcaaaatggttgttaccctgatccacccgatcgcgatggacgacggtctgcgtttcgcaatccgtgaaggcggtcgtaccgttggcgcgggcgtggttgctaaagttctcggc

SEQ ID NO: 23176 - DNA, 2080 bp, Klebsiella pneumoniae
atcgcacgctaccgtaacatcggtatcagtgcgcacatcgacgccggtaaaaccactactaccgaacgtattctgttctacaccggtgtaaaccacaaaatcggtgaagttcatgacggcgccgctaccatggactggatggagcaggagcaggaacgtggtatcaccatcacttccgctgcgactactgcattctggtctggtatggccaaacagtatgaaccgcaccgcgtaaacatcatcgacaccccggggcacgttgacttcactatcgaagtagaacgttccatgcgtgttcttgatggtgcggtaatggtttactgcgcagttggtggtgttcagccgcagtctgaaaccgtatggcgtcaggcaaacaaatataaagttccgcgcatcgcgtcgcttaacaaaatggaccgcatgggcgctaacttcctgaaagttgttggtcagatcaaaacccgtctgggcgcgaacccggttccgctgcagctggcaattggtgctgaagaaggtttcaccggcgttgttgacctggtgaaaatgaaagccatcaactggaacgatgcagaccagggcgtaaccttcgaatacgaagatatcccggctgacatgcaggacctggctgatgaatggcaccagaacctgatcgaatccgcagctgaagcttctgaagagctgatggaaaaatacctgggtggtgaagaactgactgaagaagagatcaaaaaagctctgcgtcagcgcgttctgaacaacgaaatcatcctggtaacctgtggttctgcgttcaagaacaaaggcgttcaggcgatgctggatgcggtaattgattacctgccatccccggttgacgtacctgcgatcaacggtattctggacgacggtaaagataccccggctgagcgtcacgcaagcgacgacgagccgttctctgcactggcgttcaaaatcgctaccgacccgttcgtgggtaacctgaccttcttccgcgtgtactccggtgtggttaactctggtgataccgtactgaactccgtgaaagctgcacgtgagcgtttcggtcgtatcgttcagatgcacgctaacaaacgtgaagagatcaaagaagttcgcgcgggcgacatcgctgctgctatcggtctgaaagacgtaaccactggtgacacccctgtgtgacccggatgcgccgatcattctggagcgtatggaattccctgagccggtaatctccatcgccgttgagccgaaaaccaaagctgaccaggaaaaaatgggtctggctctgggtcgtctggctaaagaagacccgtctttccgcgtatggactgacgaagagtctaaccagaccattatcgccggtatgggtgagctgcacctcgacatcatcgttgaccgtatgaagcgtgaattcaacgttgaagcgaacgtcggtaaacctcaggttgcttaccgtgaagcgattcgcgcgaaagttaccgatatcgaaggtaaacacgccaagcagtctggtggtcgtggtcagtacggtcacgttgtgatcgacatgtacccgctggagccgggctctaacccgaaaggttacgagttcatcaacgacatcaaaggtggtgtaattcctggcgaatacatcccggccgttgataaaggcatccaggaacagctgaaagctggtccgctggcaggttacccggtagttgatatgggtatccgtctgcacttcggttcttaccacgacgttgactcctctgagctggcgtttaaactggctgcgtctattgcctttaaagaaggctttaagaaagcaaaaccagttctgcttgagccgatcatgaaggttgaagtagaaactccggaagagaacactggtgacgttatcggtgacttgagccgtcgtcgcggtatgctgcgcggtcaggaatccgaagtaaccggcgttaagatccacgctgaagtaccgctgtccgaaatgttcggttatgcaactcagctgcgttctctgaccaaaggtcgtgcatcatacaccatggaattcctgaagtatgatgatgcgccgaacaacgttgctcaggccgttatt

SEQ ID NO: 23177 - DNA, 503 bp, Klebsiella pneumoniae
attctgccggatccgaagttcggatcagaactgctggctaaattgtcaatatcctgatggtagatggtaaaaaatctactgcagaaactatcgtatacagcgcgctggagaccctggctcagcgttctggtaaatctgaactggaagccttcgaagttgcgctcgaaaacgtgcgcccgactgtcgaagttaagtcccgccgcgtaggtggttctacttatcaggttccagttgaagttcgtccggtccgtcgtaatgccctggcaatgcgttggatcgttgaagctgctcgtaaacgcggtgataaatccatggctctgcgcctggcgaacgaactcactgatgctgcagacaacaaaggtactgcagttaagaaacgtgaagacgttcaccgtatggccgaagccaacaaggcgttcgctcactaccgttggtaatcccttcggagtcatagtcaccaggcgggcgcttcagatgagtcgcccgctctggataacttaact

SEQ ID NO: 23178 - DNA, 390 bp, Klebsiella pneumoniae
atgtcaacgatgattatggatttgtgcagctatacccggttgggattgacgggatatctgaccagtcggggaattaaaaaacaggaaatcgttgaggtcaacaatgctgcggatctgcagaaacactgtacgtcgtgttgcccggcggtggtgtttctgaatgaagactgtttcgtgcatgatgatgaaagtaatggcattattcgccagatcattacgcaaaacccggcgacgctgtttgttatctttatgtcgctggcgaacatccattttgaccgctatttgcgggtacggaagaatctgctaatcagttcaaaatcgataaccccaaaagaccttgatgttattctggttaattatcttaaatacaaaaacaccagtgtagggcag

SEQ ID NO: 23179 - DNA, 501 bp, Klebsiella pneumoniae; identical to SEQ ID NO: 19919

SEQ ID NO: 23180 - DNA, 273 bp, Klebsiella pneumoniae; identical to SEQ ID NO: 19918

SEQ ID NO: 23181 - DNA, 651 bp, Klebsiella pneumoniae
atggcaactattaaagatgtagcgaaacgcgcaaacgtttccactacaactgtgtcacatgtaattaacaaaacccgtttcgttgccgaagagacgcgtaatgcggtatgggcggcgatcaaagagctgcactactcgccgagcgccgtggcgcgcagcctgaaagtcaatcacaccaaatcgattggcctgctggcgaccagtagcgaagccgcctatttcgctgaaattattgagtccgttgaaaagagctgcttccagaagggctatactctgatcctcggtaacgcgtggaacgatctggaaaaacagcgcgcctatctgtcgatgatggcgcaaaagcgcgtagacggtctgctggtgatgtgttccgagtatccggattcggtattgagcatgctggaagagtaccgccatatcccgatggtggtgatggactggggcgaggcgaaagccgacttcaccgatgcggtgatcgataacgccttccagggcggctatatcgccggacgctacctgattgaacgcggccatcgcgaaatcggcgtgatcccgggtccgctggaacgcaacaccggcgcggggcgactggccggcttcatgcaggctttccagcacagtggcgatgatatcagatctgccggtctccta

SEQ ID NO: 23182 - DNA, 942 bp, Klebsiella pneumoniae
atgagtaaccgcaagtattttggcaccgatggtattcgtggccgcgtcggcgatgcgccgatcactccggagtttgtgctcaagctgggctgggcggcgggcaaagtgttagcgcgtcacggttcgcgtaaaattatcatcggcaaggatacccgtatttcgggctatatgctggaatcggcgctggaagctggactggcggcagcggggctctctgcgtcgttcaccgggcctatgccgacaccggccatcgcctacctgacgcgcgccttccgcgccgaggcggggattgttatctctgcttcacataaccctttctacgacaacggcattaaattcttctccattgagggcaccaagctgccggatgatgtcgaagaggcgattgaagccgaaatggagaaagagctcacctgcgtggattcggctgagctgggcaaagccagccgtatcgttgatgcggcggggcgctacattgaattttgtaagggtacctttcccaacgaactgagcctgggcacgctgaaagtggtggtggattgcgcgcacggcgcgacctatcacatcgcccctaatgtcttccgcgagctgggagcccaggttattgcgatgggctgcgagccagacggtctcaacatcaacgaagaggtcggcgccactgacgtgcgggcgctgcaggcgcgcgtgctggcggaaaaagccgatctgggcatcgcctacgacggcgatggcgatcgggtgattatggttgaccacgaaggcaataaagtcgatggcgaccagatcctctatatcatagcccgggaaggattgcgtcaggggcaactgcgcggcggcgccgtcggcacgctgatgagtaatatggggctggagctggcgctcaagcagttaggcatcccgtttgcccgggcgaaagtcggtgaccgctatgtactggagatg

SEQ ID NO: 23183 - DNA, 846 bp, Klebsiella pneumoniae
atgaaacttttagcccagggctcaaccctcgatctctctcacccccacgtgatgggtattctaaatgtgacgcctgactccttctccgatggcggcgcccataattcgctgattgaggcggtgaagcatgccaatctgatgatcaacgccggcgcgaccatcattgatatcggcggtgaatcgacgcggccaggggcggctgaggttagtgtggaagaggagcttgcgcgggtgataccggtggttgaagccattgcccagcgctttgaggtatggatctcagtggatacctccaaggcggaggttattcgccaatcggccagggccggggcgcatatcatcaacgatattcgttcgctgaccgagcccggcgcgctgcaggccgccgcggaaactggactgccggtgtgtctgatgcatatgcagggacaaccaaaaaccatgcaggaggcgccgaagtatgaggacgtcttcgccgatgttgagcgtttttttaatgagcacattgtgcgctgcgaacaggcggggatcgcaaaagaaaaattgctgctcgacccgggattcggtttcggtaaaaatctctcccacaattaccaactgttggccaggcttggggagtttcatcactttggtctgccgctgctggtcggtatgtcacgtaagtcgatggtaggtcagttgctgaacgtcgggccgtcggagcggctgaacggcagcctggcgtgtgccgtcattgcagcaatgcagggcgcgcagattatccgcgtccatgatgtcaaagaaacggtagaagcgctgcgcgtggtggaagccaccctcgccgctaagggaaaaaaacgttatgag

SEQ ID NO: 23184 - DNA, 1101 bp, Klebsiella pneumoniae
atgctggttgagatggacggcttcgaaggtaacgaaggtatcatcgttatcgcggcgactaaccgtccggacgttcttgaccccgcgctgttgcgtccgggccgttttgaccgccaggtggtggttggcctgccggatgttcgcggtcgtgagcagatcctgaaagtgcatatgcgtcgcgttccgctggcgccggatatcgatgcggcaatcattgcgcgcggtaccccgggcttctccggtgcggatctggccaacctggtcaacgaagcggcgctgtttgctgcccgcggcaacaaacgcgttgtgtcgatggttgagttcgagaaagcgaaagacaaaatcatgatgggtgcggaacgtcgctccatggtgatgacggaagcgcagaaagagtctactgcttatcatgaagcgggccacgcgattattggtcgcctggtgccggagcacgatccggtgcacaaagtgacgattatcccgcgcggtcgtgcgctgggtgtgaccttcttcctgccggaaggcgatgcaatcagcgccagccgtcagaaactggaaagccagatctccaccctgtacggcggtcgtctggcggaagagattatctacggtccggaacatgtttctaccggtgcgtccaacgatattaaagtggcgacgaacctggcgcgtaacatggtgacccagtggggcttctccgacaaactcggtccgctgctgtatgcggaagaagagggtgaagtcttcctcggccgtagcgtcgcgaaagcgaagcatatgtccgatgaaaccgcgcgtatcatcgaccaggaagtgaaatcgctgattgagcgtaactacggtcgtgctcgccagctgctgaacgacaacatggacattctgcacgcgatgaaagatgcgctcatgaagtatgagaccatcgatgcgccgcagattgacgacctgatggctcgtcgcgaagttcgtccgccagcgggttgggaagaacctggttcttctaacaactctgacaacaatggcacgcctcgtgcgccgcgtccggttgatgaaccgcgtacgccgaacccgggcaacaccatgtcagagcagctgggcgacaag

SEQ ID NO: 23185 - DNA, 564 bp, Klebsiella pneumoniae
atgagtgcgatagaagtgaaaagcctggtaaaaaaattccatggccagacggtgctccatggtatcgacctggaggtacagaaaggggaagtggtggcgatcatcggccccagcggctcgggcaaaaccaccctgctgcgtagcatcaacctgctggagcaaccggagagcggcactatccgcgtcggcgatgtgacgatcgacgccggtcgcagcctcgggccgcagaaagggctcattcgccagctgcgccagcacgtcggctttgtcttccagaactttaatctgtttccccaccgtacggtgctggagaacattattgaagggccggtcatcgtaaaaggtgaagataagcaggagtccatggcgcgggcgcgcgaactgctggcgaaggtggggctcagcggaaaagagaatagctatccgcgccgtctctccggcgggcagcagcagcgagtggctattgcccgcgcgctggctatgcgtccggacgtctttccagcacattggagcttcagctgctcgagttctatagtgtcacctaaatcgtatgtgtatgataca

SEQ ID NO: 23186 - DNA, 1229 bp, Klebsiella pneumoniae
atgtcaaatagtgcgatgagcgtggttattcttgctgcaggcaaagggacccgcatgtattccgatcttcctaaggtgcttcataccctggccgggaagccaatggtgcagcatgtcattgatgccgctaacgatttaggcgcatgtgcggtacacctggtatatggccacggcggcgatctgctgcgtcagactctgcatgaagacaacctgaactgggtgctgcaggccgagcagctcggaaccgggcacgctatgcagcaggcggcgccattcttcaatgatgatgaagacatcctgatgctctatggcgacgtgccgctgatctccgttgagacgctacagcgcctgcgcgccgcgaaaccacagggtgggattggtctgttaacggtgaagctggatgacccaaccggctatggccgcattacccgtgaaaatggccaggtgacgggcatcgttgagcacaaagatgccagcgaggcccagcgccagatccaggaaatcaacaccgggatcctgatcgccggcggagcggatctaaagcgctggctggcgaaactcaccaataacaacgctcagagcgaatactacatcaccgatatcatcgccatggcgcaccaggaaggacaccagatcgtcgcagtgcatccgcagcgcctgagcgaagtcgaaggcgtcaacaaccgcctgcagcttgcgcgcctggagcgcgtctaccaggcggagcaggcggaaaagctgctgctggcgggcgtgatgctgcgcgatccggcgcgtttcgatctgcgcggtacgctgcagcacgggcgcgatgtagagatcgatactaacgttattctggaaggcaacgtggtgctgggcgatcgagtgaaaatcggcgccggctgcgtgatcaaaaacagcaccatcggcgatgactgcgaaattagcccctacagcgtggtggaagatgcccagctgcaggcagcctgcaccatcggtccatttgcccgtctgcgcccgggcgccgaactgctggaaggcgcccacgttggtaacttcgtggaaatgaaaaaagcgcgtctcgggaaaggctccaggcgggtcatctgacctatctgggcgatgcggagattggcgataacgtcaatatcggcgcgggcaccatcacctgcaactacgatggtgcgaacaagcataaaacgattattggcgatgatgtctttgtcggctcggatacccagctgtgc

SEQ ID NO: 23187 - DNA, 638 bp, Klebsiella pneumoniae
tatgtcgaaacgcggctgcggccggaagacctcgtggggatctcgtcctggagcagtacgatccgctgcgtggtggatgagatgcatccgcagaacattcgcgccgccggggtgattcagctgttgggcggcgtcggtcccaacggcaacgtgcaggccaccatcttaacccagcagctggcggcgcatttaggctgcccggcgtggctgttgccgtcgcagagtattgagcactccgtggaggagcgcagccgtctggtaaacagcccggacgtcgcggcggtggtggcgaaatttgccgaagtggatgtggccatcgtcggtattggtgaactggagccttcgcagctgctgaaaaactccggtaactattataatgaaaccatgctccagctgctggcggcgcgcggcgcggtgggggatatctgcctgcattactatgatgcggcgggcaaaccggtactgagccaggatgaggatccggtgatcggtatggaacttgagcaaattcgtcgctgtccgcaggtgattgcgctggccggcggcgtggacaagagaacgccatccgcggcgcgttgcagggcgactatattgatgtcctgatcaccgacttcccgaccgcgcgcgcgttaattaag

SEQ ID NO: 23188 - DNA, 357 bp, Klebsiella pneumoniae
atgcgctcccgttatagcgcgttcgtcatgaaagacgctgactatctaatcaaaacctggcacccgtcctgtcaggcgcagcaatttcgcgccgagctggagaaagggttttcccagaccgaatggctgggcttaaccctgttcgccagtgatgaggggcgagctccaaatgaaggttttgtcagctttgtcgcccgctttaatgacaataaccgccctggcgccattattgaacgttccagattcttaaaagaaaatggacagtggtactatatcgacgggacacgaccgctgattggccgtaacgacccctgcccctgcggctcaggtaaaaaatttaaaaaatgctgcggccag

SEQ ID NO: 23189 - DNA, 840 bp, Klebsiella pneumoniae
atgcattcattacaacgtaaagtactacgcactatttgccctgatcagaaaggcctcatcgcgcgtatcaccaatatctgctacaagcatgaactcaacattgtgcagaacaatgagtttgttgaccaccgtaccggtcgtttctttatgcgcaccgaactggaaggcatttttaacgacgctactctgctggccgatctcgacagcgccctgcctgaaggctccatccgcgaactaaatccggcaggccgtcgccgggtggtgattctggtgacgaaagaggcgcactgtctgggcgatctgctgatgaaagccaactacggcgggctggatgtcgatattgccgcggttatcggcaaccatgacaccctgcgctcgttggtggagcgctttggtattccgtttgagctggtcagccatgaaggactgagccgcgaagaacacgatcagcggatgggcgatgctatcgccgcccacgaaccggattacgtggtgctggccaagtatatgcgcgtcctgacgccagagtttgtcgcccgcttcccgaacaaaatcatcaatatccaccattcgtttttgccggcgtttatcggcgcccgtccctatcatcaggcctatgagcgcggcgtgaaaatcattggcgctaccgcccactacgtgaatgacaatctggatgaaggcccgatcatcatgcaggacgtgattcacgtcgatcatacttataccgcagaagatatgatgcgcgctgggcgcgatgttgaaaaaaacgtcttgagccgggcgctgtatcaggtactggcgcagcgcgtcttcgtttacggtaaccggacgattattctt

SEQ ID NO: 23190 - DNA, 663 bp, Klebsiella pneumoniae
atggacggaatggaaaatctgatgccacgggagaagatgctgcaatacggcatcgaaacgctaacggatgttgagctgctggcgctgtttctgcgcgtcggcacgcgtcgtcaggatgtgctcagctatgcccaggcgttactgcagcgttttggctcactctacgctctgctttccgctgataaagcgcaactgattgctgtggacggactggggctggcgaaatatgcccaactgaagggcattgccgagctggcgcgacgctattttagctcgcagctggtcgaggaggccgcgctggtcaccccctcgatgacgcgcgagtttttacaaagccagctgacggaagaggagcgcgagatctttatggtgatctttttagataatcagaaccgggtgttgaaacatagtcgtcttttttctggtactcttagccacgttgaggtgcatccgcgagaaattgtacgcgaagccatcaaagtgaacgccgccgccgtgatccttgcgcataatcatccctccggtagcccggagccaagtcaggccgacagactgattaccgaaagggtgataaaatgttgtagattcatggagatacgcgtgcttgaccatctggttatcggccgcggtgcgtatgtatcttttgctgaacgtggctggatt

SEQ ID NO: 23191 - DNA, 953 bp, Klebsiella pneumoniae
atgtatacgaagattattggtaccggcagctatctgcccgagcaagtgcgtacaaacgccgacctggaaaaaatggtagaaacctctgacgagtggattgtcacccgcacaggtatccgtgagcgtcgtattgccgcagcgcatgaaacagttgctacgatgggctttgaagccgcaaagcaggcgctggcgatggcgggcgtgtccgcggagcaaattggtctgattatcgttgcgaccacctccggcacgcacgcgtttccgagttctgcatgccagatccagtcaatgctgggcgttaagggttgcccggcgtttgatgtcgccgccgcctgcgccggtttcacctatgcgctaagcgtcgccgatcagtatgtgaagaacggcgcggtagattatgcgctggttgttggcgccgatgtgctggcgcgcacctgcgatccggcggatcgcggaacgattattattttcggcgacggcgccggcgcggttgtactgggcgcctccgaagagccgggcattatctcgacgcatctgcatgccgacggcagctatggcgaactgctgaccctgccgaacgccgatcgcgtcgatccggaaaacccgatctatctgacgatggccggcaacgaagtcttcaaagtggcggtcaccgagctggcgcacatcgttgatgagacgctggcagcgaataatcttgaacgttcagcgctggactggctggtgccgcatcaggctaacctgcgtattatcagcgcgacggcgaagaaactgggtatgtcgatggataacgtcgttgtgaccctcgaccgccatggcaacacctccgcggcgtcagtcccttgcgcgctggatgaggccgtccgcgatggccgtattcagcgcggtcagctgattttgctggaagccttggtggcggtttcacctggggttccgcgctggttcgtttttag

SEQ ID NO: 23192 - DNA, 525 bp, Klebsiella pneumoniae
atggctgttaaacctgaggtaattctcggcgatattacgacacttgatgtcgatgtgattgttaatgcggcaaatccctcgctgctgggtggtggcggagtagacggggccatccaccgggcggccggtcccgcgctgctggcggcttgtaagcaggtgcagcagcagcagggcgaatgccctcccgggcatgcggtaattactattgccggcaatctgccggccagcgcggtgatccacaccgtgggcccggtctggtacggcggcgaccgcatggaggcgcaaaccctggccgatgcttacaaaaacagtctgcagttggcctcggcaaacaactatcgctccattgcgtttccggcgataagcaccggcgtgtatggctatccgaaagaggaagcggcggcgatcgccgtgcgcaccgtcaccgcgtttctcactcgctataaccctcttgagcgcgtcctgttcgtctgttttgacgaggaaacggcggctatctatcgccgcctgctggcgtcatacccc

SEQ ID NO: 23193 - DNA, 252 bp, Klebsiella pneumoniae; identical to SEQ ID NO: 23150

SEQ ID NO: 23194 - DNA, 1020 bp, Klebsiella pneumoniae
gtgggcccagtgatgttggatgtcgaagggtatgagctggatgcggaagagcgagaaattctggcgcatccgctggtgggagggttgatcctctttacccgaaattatcacgatccggcgcagctgcgcgagctggtgcgccagatccgcgacgcctcccggaaccacctggtggtggcggtcgatcaggaaggggggcgggttcagcgtttccgcgaagggtttacccgtttaccggcggcccagtctttcgccgcgctgctggggatggaagaggggggcaaactggccgccgaagccggctggctgatggccagcgaaatgatcgccatggatatcgatattagttttgcgccagtgctggacgtcggccatatcagcgccgcaatcggcgaacgttcttatcatgaagatccgcagaaagcgctgacgatggcgcgtcacttcattgacgggatgcacgccgcgggcatgaaaaccaccggcaaacacttcccgggacacggggcggtgactgccgattcgcacaaagagacgccgttcgatccgcgggcggcatcggttatccgcgaccatgatatggcggtgttcaaaagccttatcgccgagcagcgtctggatgccattatgccggcgcatgtgatttacccggagctcgatccgcgtccggccagcggctcggcgtactggctgaaaacggtgctgcgcggcgaactgggctttgacggggtgattttctccgacgatctgtcgatggaaggggcggcgatcatgggcagctatgccgaacgcggtcaggcatcgctcgacgccggttgcgatatgatcctcgtctgcaataatcgtaaaggcgcggtcagtgtgctggataacctgtcgccgatcaaagcagagcgtgttacgaaattgtatcataaaggttccttttcccgtcaggagttaagggattcagcccgttggaaaacggtgagtgcccagctggagcagcttcatgcgcgctggcaagaggcgaagtccgcg

SEQ ID NO: 23195 - DNA, 849 bp, Klebsiella pneumoniae
atgagccaaacatcaaccttaaaaggccagtgcatcgcagagttcctcggtaccgggttgttgatctttttcggcgttgggtgcgtggctgcgctcaaggtcgcgggagccagcttcggacaatgggaaatcagcatcatctggggtctgggcgtcgccatggcgatctacctgaccgccggggtctccggtgcgcaccttaacccagcggtgactatcgcgctgtggctgttcgcctgcttcgaaggccgcaaagtggttccttttattatttcgcaattcgctggcgccttttgcgctgcggcattagtttacgggctttactacaatcttttcctcgattatgaaaccacccaccatatgattcgcggcagcgtggaaagcctcgatctggccggcattttctccacttacccgaacccgcacatcaattttgtgcaggccttcgcggtagagatggtgattaccgctatcctgatgggcgtcatcctggcgctgaccgacgatggcaacggcataccgcgcggcccgctggcccctctgctgattggcctgctgattgcggtgattggcgcctccatgggaccgctgaccggcttcgccatgaacccggcgcgtgacatcggcccgaaagccttcgcctggctggcggggtggggtgacgtcgccttcaccggcggcaaagatattccttatttcctggtgccgctgtgcgcaccggtggtcggcgcggcgctgggcgcattcagctatcgtaagctgattggccgtcacctgccttgcgacacctgcgtggaggaagagcaacagagcccctcctcttccaccgctcaacataaagcttcgctg

SEQ ID NO: 23196 - DNA, 1509 bp, Klebsiella pneumoniae
atgaccgacaaaaaatatatcgttgcgcttgaccagggcactaccagctcccgggccgttgtgatggatcatgatgccaatatcgtcagcgtctcccagcgagaatttgaacaaatttatcctaagccaggctgggtcgaacacgacccgatggaaatctgggcttcccaaagctcgacgctggtcgaagcgctggccaaagcggatatcaactccgatcagatcgcggccatcggcatcaccaatcagcgtgagaccgtggtggtgtgggagcgagagaccggtaaacccatctacaacgctatcgtctggcagtgccgccgtaccgcggagatctgcgagcagctcaagcgtgacgggatggaagagtatatccgcaaggccacaggcctggtggtggacccgtacttctccggcaccaaggtgaaatggatcctcgaccatgtcgaaggttcccgtgagcgtgcgaagcgcggcgagctgctgttcggcaccgttgacacctggcttatctggaagatgacccagggccgcgtgcacgtcaccgactacaccaacgcctcacgtaccatgctgttcaacattcacgacctcgactgggacgacaagatgctcgacgcgctggacattccgcgcgccatgctgccggaagtgcgcaagtcttccgaagtgtacggccagaccaacatcggtggtaaaggcgggacccgtattcctatcgccgggatcgccggtgaccagcaggcggccctgttcggccagctgtgcgtcaaggaagggatggcgaaaaacacctacggcaccggctgctttatgctgatgaataccggcgaaaaagcggtcacctccacccacggtctgctgaccaccatcgcctgcggcccgcgcggcgaggtgaactacgctctggaaggggcggtgtttatggccggggcgtctattcagtggctgcgcgacgagatgaagctcatcagcgatgccttcgactccgagtacttcgccaccaaagtgaaggataccaacggcgtatacgtggtacccgcgttcaccggtcttggcgcaccgtactgggacccgtatgcccgcggcgcgattttcggcctcacccgcggcgtgaactccaaccacattatccgtgcgacgctggagtccatcgcctttcagacccgcgacgtgctggaagcgatgcaggctgactccggcattcgtctgcacgccctgcgcgtagacggcggcgcggtggctaacaacttcctgatgcagttccagtccgatatcctcggcacccgtgtcgagcgtccggaagtacgcgaagtgacggcgctgggcgcggcctatctggccggtctggcggtcggtttctggcagaatctggatgaactgcaggagaaagcggtgattgagcgcgaattccgcccggggattgaaactactgagcgtaactatcgttacagcggctggaagaaagcggtgaaacgcgcgttagcgtgggaagagcacgacgaagcg

SEQ ID NO: 23197 - DNA, 984 bp, Klebsiella pneumoniae
atgcacgataaggcttttacttttcagacgcttcgcccggataccattatcgatgggttattcgatctgggtatgcgggtggactccggtctcaccccgctaaacagctatgagaaccgcgtttatcagttccaggacgaagagcgccatcgctatgtggtaaagttctatcgtcctgagcgctggtccgcagaacagatccttgaagaacaccagtttgcgcttcagcttgtagaagatgaagtgcccgttgctgcgccgctcttatttaatgacagcacgcttcatcagcatcagggattctactttgccgttttcccaagccttggcggtcgtcagttcgaagcggataaccttgatcagatggaatgggttggccgctatctggggcgcctgcaccagacgggctgcaaacagcgctttactgcccgcccggaaattggcgtgcaggagtacctgctggaaccgcgtcaggtgtttgagcaggcgacgctgatcccctctggcctgaaggccgatttcctgaaggcgaccgataaactcattgctgccgtcatggagcaatggcacggccgcgggaacacgttgcgcctgcacggtgactgccatgccggtaatatcctctggcgcgacggaccactgtttgtcgacttagacgatgcgcgcaccggcccggcgattcaggatctgtggatgctgctcaacggcgataaggctgaacagcgtatgcagctggagactattgtcgaggcctatgaggaattcggcccctttaacagcgatgaaatcgcgctgattgaacctttacgcgctatgcgactggtttattatctggcgtggttgctcagacgctgggacgatcccgctttcccggtcaatttcccctggttaaccggggaggattactggcgggggcagacgtcgacttttcttgagcaggtgaaggttctacaggaacccccgcttcagttaacgccaatgtat

SEQ ID NO: 23198 - DNA, 267 bp, Klebsiella pneumoniae
atgaaatgtaaacgtctgaatgaagtaattgaactcctccagccagcctggcaaaaagagcctgaactgaacctgatgcaatttttgcagaagctggcgaaagaggccggctatgatggcgaactgagcgatctttccgacgatattctgatctatcacctgaagatgcgcgactcttccaaagatgctgtcatcccgggtattcagaaggattatgaagaggactttaaaaccgcgctgctgcgcgcccgcggggtaataaaagag

SEQ ID NO: 23199 - DNA, 1508 bp, Klebsiella pneumoniae
atgatgttagatatagtcgaactgtcgcgcttacagtttgccttgaccgcgatgtaccacttcctgtttgtgccgctaacgctcggtatggcgttcctgctggccatcatggaaacggtctacgtcctttccggcaaacagatttataaagatatgaccaaattctggggcaagttgtttggtatcaacttcgcgctgggtgtggcgaccggtctgaccatggagttccagttcgggactaactggtcgtattactcacactacgtgggcgatatctttggtgcgccgctggccattgaaggtctgatggccttcttcctcgaatccacctttgtaggtctgttcttcttcggttgggatcgtctgggcaaagttcagcacatggccgtcacctggctggttgcgctgggttccaacctctccgcgctgtggatccttgtcgccaacggctggatgcagaaccctatcgcatcggacttcaacttcgaaaccatgcgtatggagatggtcagcttctctgaactggtgctcaacccggtcgcccaggtgaaattcgttcacactgtggcgtcgggctatgtcaccggcgcgatgttcatcctggcgattagctcctggtacatgctgaaaggtcgcgacttcgcctttgccaagcgctcctttgccatcgcagccagcttcggtatggcggcgatcctctccgttattgtgctgggtgacgaatccggttacgaaatgggtgacgtgcagaaaaccaaactggcggctatcgaagcagagtgggaaacccagcctgcgccggcggccttcaccctgttggtattcccgatcagaatgcgcagaccaaccactttgcgatccagatcccctacgcgctgggcatcattgctacccgctcggtggacaagccggttatcggcctcaaggatctgatggttcagcacgaagagcgtatccgtaacggcatgaaagcctacgcgctgctggaacagctgcgcgccggttcaaccgatcaggccgtgcgcgaccagttcaataacgtgaagaaggacctcggttatggcctgctgttgaagcgctataccccgaacgtcgctgacgccacggaagagcagatcgccaaagcgaccaaagattccattccaagcgtcgcaccgctgtacttcgccttccgtatcatggtggcgtgcggcatcctgatgctgctgattataggcgcctccttctggagcgtgatccgtaaccgcatcggcgagaaaaaatggctgctgcgcgccgcattctacggcctgccgctgccgtggattgccgtggagtcgggctggtttgttgccgaatacggccgtcagccgtgggcgattggtgaggtcctgccgacggcggtggctaactcatcattgaccgcgggggacctgatcttctcaatgttgctgatctgtggtctgtacacgctgttcctggtggctgaactgttcctgatgttcaagtttgcccgcaaaggacctagc

SEQ ID NO: 23200 - DNA, 1485 bp, Klebsiella pneumoniae
atgaacaaagaaattttggctgttgttgaagccgtttccaacgaaaaagcgctgccgcgtgagaaaattttcgaagcgctggaaagcgcgctggcaacggccaccaagaaaaaatacgaacaagagatcgacgttcgcgttgaaatcgaccgcaagagcggcgatttcgataccttccgtcgttggctggttgtagaagaagtcacccagccgacgcgcgagatcacgctggaagcagcgcgtttcgaagatgaaagcatgaacgtcggcgactatgtcgaagatcagatcgaatctgtcaccttcgaccgtatcaccacccagaccgctaagcaggttatcgtgcagaaagtccgcgaagccgagcgcgcgatggtggtcgatcagttccgcgagcacgaaggtgagatcatcaccggcgtggtgaaaaaagtgaaccgcgacaatatcacactggatctgggtaacaacgctgaagccgtgatcctgcgtgaagatatgctgccgcgtgaaaacttccgtccgggcgaccgcattcgcggcgtactgtacgctgtccgtccggaagcgcgtggcgcccagctattcgtcacccgttccaaacctgagatgctgatcgaactgttccgcatcgaagtgccggaaatcggtgaagaagtgctggagatcaaagcggcggctcgcgatccgggctctcgtgccaaaatcgcggtgaaaaccaacgacaagcgcatcgacccggttggcgcttgcgtcggtatgcgcggtgcgcgtgtgcaggccgtgtcgactgagctgggtggtgaacgcatcgatatcgtcctgtgggatgataacccggcgcagttcgtgattaacgctatggcgccggcagacgtcgcgtccatcgtggtggatgaagataaacacaccatggatatcgcggtagaagcgggcaacctggcgcaggcgatcggccgtaacggtcagaacgtccgcctggcttcacagctcagcggctgggaactcaacgtcatgaccgttgacgatctgcaggctaagcaccaggcggaagcgcatgccgctatcgataccttcaccaaatatcttgatattgatgaagatttcgcgacagtgctggttgaagaaggcttctcctcgctggaagagctggcctatgtgccgatgaaagaactgctggaaatcgacggtctggatgaagccaccgttgaagcacttcgtgagcgtgcgaaaaacgcactgactacgctggcgctggctcaggaagaaagcctgggagataacaaacctgccgatgatctgttgaatctcgaaggtctggatcgtgccctggcattcaaactggctgcccgtggtgtttgtacgctggaagatctcgccgagcagggcgttgatgacctggctgatatcgaagggatgaccgacgagaaagctggcgagctcatcatggccgctcgcaacatttgttggttcggcgacgaagcg

SEQ ID NO: 23201 - DNA, 2706 bp, Klebsiella pneumoniae
atgatgcttatcaaaatgttaaccaaggttttcggcagccgtaacgaccgtacgctgcgtcgtatgcgcaaagtcgtcaatatcatcaacggcatggaaccggcgatggaaaagctctctgatgacgagctgaaagcgaaaaccgctgaattccgcgcgcgcctggaaaaaggcgaaacgctggaaagcctgatccctgaagctttcgccgtcgttcgcgaagccagtaagcgcgtattcggcatgcgccacttcgacgtccagctgctgggtggtatggtgcttaacgatcgctgcatcgccgagatgcgtaccggtgaaggtaaaaccctgaccgcgaccctgccggcgtacctcaacgcgctaaccggcaaaggcgttcacgtagtgaccgtcaacgactatctggcccagcgtgacgccgaaaataaccgcccgctgtttgaattcctgggcatgacagttggcatcaacatgtccggcctgccggcgccggcgaagcgtgaagcttacgctgccgatatcacctatggcaccaacaacgaatacggcttcgactacctgcgcgacaacatggccttcagcccggaagagcgcgttcagcgtaaactgcactatgcgctggtggatgaggtggactccatcctgatcgatgaggcgcgtacgccgctgatcatttccggcccggcggaagacagctctgaaatgtaccgcaaggtaaacaaaatcatcccgcatctgatccgccaggaaaaagaggattcggatactttcactggcgaaggccacttctcggtggatgaaaaagcgcgtcaggttaacctgaccgaacgtggtctggtgctgattgaagagctgctggtacaggaaggcattatggatgaaggtgagtccctgtactctccaaccaacattatgctgatgcaccacgttaccgccgcgctgcgcgcccatgcgctgttcacccgcgacgttgactacattgtcaaagatggcgaagttatcatcgtcgatgagcacactggccgtacgatgcagggccgccgctggtccgatggtctgcaccaggccgttgaggccaaagagggcgtggagatccaaaacgagaaccagactctggcctctatcaccttccagaactacttccgtctgtacgagaagctggcggggatgaccggtacagccgataccgaagcctttgaattcagctctatctataagctggataccgtggttgtaccgaccaaccgtccgatgatccgtaaagatatggcggatctggtctatatgaccgaagcggaaaaaattcaggcaattatcgaagatatcaaaactcgtaccgctgccggtcagccggtgctggtggggactatctcgatcgaaaaatctgaagtggtttcccgcgaactgactaaagccggcatcaagcacaacgtcctgaacgccaaattccacgccagcgaggcggatatcgtcgcccaggcgggctacccttcagcggtgaccatcgccaccaacatggcgggtcgtggtaccgatattatgctcggcggtagctggcaggcggaagtcgctgcgctggaaaacccaacgccagagcagattgagaaaatcaaagccgactggcaggtacgccacgatgcggtactggccgcaggcggtctgcacatcatcggtaccgagcgtcatgaatctcgccgtatcgataaccagctgcgcggccgtgctggtcgtcagggggatgccggttcttcccgcttctacctgtcaatggaagatgccctgatgcgtatcttcgcctccgatcgcgtgtctggcatgatgcgtaaactgggaatgaaaccgggtgaggcgattgagcacccgtgggtcaccaaggcgatcgccaacgcccagcgtaaagtggaaagccgtaacttcgatatccgtaagcagctgctggaatatgatgatgtggccaacgaccagcgccgggcgatctacacccagcgtaacgagctgctggacgtgtctgacgtcagcgaaaccatcaacagcatccgcgaagacgtctttaaggcgacgatcgatgcccatattccgccgcagtcgctggaggagatgtgggatatcgaaggtctgcaggagcgtctgaaaaacgacttcgatctcgacctgccaatcaaagagtggctggataaagagccggagctgcatgaagagaccctgcgcgaacgtattctgcagagcgcggtagaaacctaccagcgtaaagaagaagtggtcggcgccgagatgatgcgccacttcgagaaaggcgtgatgctgcagactctggattcgctgtggaaagagcacctcgcggcgatggattacctgcgccagggtatccacctgcgcggctatgcgcagaaagatccgaagcaggagtacaagcgcgaatcgttctcaatgtttgccgcgatgttggagtcactgaagtatgaagtgatcagcaccctgagcaaagtccaggtgcggatgccggaagaagtcgaggcgatggaacagcagcgtcgtgaagaggccgagcgcctggcgcagatgcagcagctcagccatcagagcgatgatgaagccgcagcccaggatctggcggcgcaaaccggcgaacgtaaagtgggccgtaacgatccgtgcccgtgcggctccggcaaaaagtacaaacagtgccacggccgtctgagc

SEQ ID NO: 23202 - DNA, 345 bp, Klebsiella pneumoniae
atgagcaacattattaagcaacttgaacaagaacagatgaagcaggacgtaccttccttccgtccgggtgataccgtggaagtgaaagtatgggttgttgaaggttccaaaaaacgtctgcaggcattcgagggcgtggttatcgctattcgtaaccgcggtctgcactctgcattcactgttcgcaaaatttccaacggcgaaggcgttgagcgtgtcttccagactcactctccggtagttgacagcattgctgttaaacgtcgtggtgctgtacgtaaagctaaactgtactacctgcgtgagcgcactggtaagtctgctcgtatcaaagagcgtcttaac

SEQ ID NO: 23203 - DNA, 894 bp, Klebsiella pneumoniae
atgaaaagattaaaatatctgtcaacgctgctggtcgcggccgtcgccctgattgccgcatggttgttatggaatttctacactcagtcaccctggacccgcgacggcaaagtgcgcgccgagcaggttgggatcacccctcaggtctccggcagtattctgcagttgaacgtaaccgataaccaacgggtcaaagccggggaagtattgtttaccatcgacgacaccccctatcgcatcgcggtgctgaacgcccaggcgcagctggcgaaagcccaggcggaggtggcgaaagcgcaggcggagcaaagcaaggccgccagcgaggctcgccgtcgccgaagcctgtcgcaaaatgccatctcggctgaagaccttgagaacgtcaataccgccctggataccgccaccaccaccctggctgccgccagagcgggggtcggcgtaaccgaagcggcgctgaaacatgcgcagtggcagctcagccagacggttgtcaaagcgccggtggatggctgggtgaccaacctttccacccgcgtcggtgattacgctaccaccggccatccggtctttgccctggtggacagccattcgttttacgtactgggctacttcgaagagaccaaactgcgccacattcgcatcggcgatccggcacaaattattctctatagcaatcagcagacgctaaagggccatgtcgcgagcatcggccgcgcgattgtcgaccagagcgtggaacagggaaccgggctggtggccaacatcaaaccaaatatcccctgggttcgtctcgcccaacgcgttccggtgcgaattgcctttgatacgctgccggccgatgtcaccctggtctccggcaccacctgcactgtctcaattggcgggcag

SEQ ID NO: 23204 - DNA, 234 bp, Klebsiella pneumoniae
gtgaaactgagtcttaacacatccggattgccgctgcaggacctggtgttcggcgcatccgtctatttccctccgctgttcaaagccgtcttgttgggtttctttatctggttgtttttacatcgccagctgcgtgactggatgtatgcgggcgacatctggcacccgctactaatggatctctccctgttcgcgctcgcggtctgtctggccctggtattgctcattgcctgg

SEQ ID NO: 23205 - DNA, 2013 bp, Klebsiella pneumoniae
atggaaccaatcgaacaacaactgactgaactgcgaaccacgcttcgccatcatgaatatctgtaccacgttatggacgcgccggaagtgccggatgcggaatatgaccgcctgatgcgcaagctgcgcgagctggagagccagcacccggagctgattaccccggattcgccaacacagagggtgggggcggcgccactcaccgcctttagccagatccgccatgaagtgccgatgctgtcgctggataacgtgtttgacgaagagagctttctcgccttcaacaagcgggtacaggatcgcctgaaaagcacagatcatcttacctactgctgcgagcttaagctcgacggcctcgcggtgagcattctctatgaaaacggcgtgttggtgcaggcggctacccgcggcgacggcaccaccggcgaagatattacctctaacgtgcgaactattcgcgccatccccctcaagctgcatggcgagaatattcctgcacgccttgaggtacgtggggaagtgttcctcccgcaggccgggtttgaaaaaatcaatgaggaagctcgccgcaccggcgggaaagtgtttgctaacccgcgtaatgcggctgcgggttcgttgcgccagctcgatccgcgcatcactgcgaagcgaccgcttactttcttctgctacggcgtgggcgtgctggagggcggcgagctgccggccagccactcggctcggttgctgcagttcaaagcatgggggctgccggtgagcgatcgcgtcaccctgtgccacacccccgaggaagtgcttacttactatcgtaaagtcgaggaagagcgtccccacctgggctttgacattgatggcgtggtgatcaaagtcgattcgctggcgctgcaggaacagctgggtttcgtcgcccgcgcgccgcgctgggccgtggcctttaagttcccggcacaggagcagatgaccttcgtccgggacgtggagttccaggtgggccgcaccggggcgattacgccggtggcgcgtctggagccggtccatgttgccggcgtgttggtgagcaatgccaccctgcataatgccgatgaaattgaacgcttaggcttgaaaatcggcgacaaggtggtgattcgccgggcaggcgatgtgatcccgcaggtggttaacgtggtgctttccgagcgtccggcggatgcccgggatgtcgtcttcccgacccactgtcctgtatgtcagtcagacgttgaacgggtggaaggcgaggcggtagcccgctgtacgggcggcctgatctgcggcgcgcagcgcaaagagtcgctcaagcacttcgtctcccgtcgcgcgctcgacgttgacggcatgggcgacaagatcatcgaccagctggtggagaaagagtacgtccataccccggcggatctgttccggctgacggcggggaaactgaccgggctggatcgaatggggccgaagtccgcgcaaaacgtagtcaatgccctcgagaaagccaaagagacgaccttcgcacgcttcctctacgccttaggtattcgcgaggtaggagaagcgacggcggcgggcctggcggcgcatttcggcactctcgaagccctggagcaggcttcaattgaggagctacagaaagtccctgatgtcggcatcgtcgtcgctacccataccttcaacttctttgccgaagagagcaaccgcgatgtcattgcgcaactgctggcggagggggttcgctggcctgcgccggtggtggtgaaggcggaagagattgatagcccgtttgcaggcaaaaccgtggtccttaccggcagcctcagccagctgtcgcgcgatgacgccaaagcgcgtctggtggcgctgggggcgaaggtggcaggcagcgtgtcgaagaaaaccgacctggtgattgccggcgaagcggcggggtctaagctggcgaaagcgcaggagctgggcgtcgaggtgattgacgaagccgaaatgatgcgtctgctgggagaa

SEQ ID NO: 23206 - DNA, 892 bp, Klebsiella pneumoniae
gtaggagaagtcgcgttcatccggtgactcacgccccgcacggcgcgcatggggagcatgaagcccctcgtcaggcgccgcagcaccagtaccagccgccttacgagcgccagatgcagcagcctgcgcgtcctgaagaaccggttcgccagccgccgcagcctgcctgctgccaggccccggttccaccgcagcaacagcctgcgccgcatgcggctcctgcagacgtggcgtgtgcaactagcctgcgaaccttggggcaaggccggcccggtcacaacggcgaaaacaccgaggccgcacgtgctgtcggcgccgcaaccggtgacgccgaccgtcgctcagccgcagccagccgccccgcagcagcctgcgccacagcctgttgccgcgtcgcagcccgccgtcgcggaaccgcagccggtagagccgcagcagcccgccgcgccgcagccagaaagagcgcaaagagacggtcattgtgatgaacgtcgccgcgcatcatggcgcccagcttaacggtgaagtgctgatcaacagtatccagcaggccggctttaagtttggtgaaatgaatattttccaccgccacctaagtccggacggcagcggtccggtgttgttcagtctggccaacatggtgaaaccgggaaccttcaatccggacagcatggcggatatgatgacccctggggtgactatctttatgcaggtcccttcctacggcgatgaactgcagaacttcaagctgatgctgcagtctgcgcagtatatcgctgacgaagtgggcggcgtggtgcttgacgatcagcgtcgcatgatgacgccgcaaaaactgcgtgaataccaggatcgtattcgcgaagtgaaagacgcgaacgcctgacgttcc

SEQ ID NO: 23207 - DNA, 477 bp, Klebsiella pneumoniae
atggcttcaagaggtgttaacaaagtaattctggtcggcaatttaggccaagatcctgaagtgcgttatatgccgaacggcggcgcggttgccaatattacgttagccacgtctgaaagctggcgtgacaagcaaaccggcgagatgaaagagcagactgaatggcatcgcgtggtattgttcggcaagctggccgaggtcgccggtgaatatctgcgtaaaggttcacaggtgtacatagaaggccagctcagaacacgtaaatggactgatcaagcgggcgtggagaagtacaccacagaggttgtggtcaacgtcggcggtactatgcagatgttaggcgggcgcccacaaaacgcttctcagcctggtaatcagccgcaagccggccagcagttcagcggtcagccacaggccaccggcacagcggcagcggcgggaaacgagccgcctccgtttgatgatgatataccgttt

SEQ ID NO: 23208 - DNA, 1743 bp, Klebsiella pneumoniae
atggctggacgaattccacgtgtatttattagcgatctgcttgccagaaccgacatcgtcgatctgatcgatgcgcgggtaaagctgaaaaagcagggcaaaaattttcacgcgtgctgtccgttccataacgaaaaaaccccctctttcaccgtcaacggtgaaaaacagttttaccactgcttcggctgcggggcgcacggcaatgctatcgacttcctgatgaactacgacaagctcgagttcgtggaaacggtcgaagagctggccgccatgcacaacctcgaagtgccttatgaagcaggcaacggacccagccagatagagcgccatcaacggcagaacctctaccagttactggatggtctgaatgcgttttatcaacagtctctgatgcagcccgccgccgatcctgcgcgccagtacctggcgaaacgggggttaagcagcgaggtgattacgcgctttgccatcggctatgctcccccaggttgggataacgttttaaaacggtttggcggcaatcaggaaaaccgccagtcgcttattgatgccggcatgctggtcaccaacgatcagggacgcagttacgaccgcttccgcgaacgggtgatgttccccatccgcgataagcgaggccgggtgattgggtttggcggacgggtgctgggcgatgccctgccgaagtatctgaactccccggaaaccgacatattccataaaggccgccagctgtatggcctgtatgaagcgcagcaggataaccccgaaccaccgcgtttgctggttgtcgaagggtatatggacgtcgtggcgctggcgcagtacgacattaattatgccgtggcctcgctgggtacctcgaccacggccgaccatatccagctgctgttccgggtgacgaataacgtcatctgctgctacgacggcgaccgggccggccgcgatgccgcctggcgcgcgctggagacggcgctgccgtacatgaccgatggtcgccagctacgctttatgtttctgcctgacggcgaagacccggatacgctggtgcgtaaagagggcaaagcggcgttcgaggcgcggatggagcaggctcagccgctctccacgttcttgtttaacagcctgctgccgcaggtcgatctgagtactccggacgggcgcgcgcagttgagcacgctggcgctgccgctgataacccaggtcccgggcgaaacgctgcgcatctatttgcgtcaggagttgggcaataagctgggcattttagatgacgcgcagcttgaacgattaatgccaaaacaggcggaaaatggcgcgccgcgtcccgcaccgcagctaaaacgcacgaccatgcgtatactgataggactgctggtgcaaaacccggatctggcgccgttagtcccgccgctggagggactggactcgcgcaaaatgccgggactgagcctgttcagcgaactggtgaagagctgtctggcgcagcctggtctgacaaccgggcaacttttagagcaatatcgcggcacaaaagaggcggcaacccttgaaaaactgtcgatgtgggacgatatagcagataaagacatcgctgaacaaaccttcaccgactcgctcaaccatatgtttgattcactgctggaactgcgacaggaagagttgatagctcgcgatcgcacacacggtttaagcagtgaagaacgccgggagctctggaccatcagccaggagctggcgaaaaaa

SEQ ID NO: 23209 - DNA, 1839 bp, Klebsiella pneumoniae
atggagcaaaacccgcagtcacagctgaagcttcttgtccaacgtggtaaggagcaaggctatctgacctatgccgaggtcaatgaccatctgccggaagatatcgtcgattccgatcagatcgaagacatcatccaaatgatcaacgacatgggtattcaggtgatggaagaagcaccggatgccgatgatctgatgcttgccgaaaacaccgcggatgaagatgctgccgaagccgccgcgcaggtgctctccagcgtggaatccgaaatcgggcgcacgaccgacccggtgcgtatgtacatgcgtgaaatgggtaccgtagagctgctgacccgtgaaggcgaaattgacatcgccaaacgcatcgaagacggcatcaatcaggtgcagtgctccgttgccgaatatccggaagcgatcacctacctgcttgagcagtacgaccgcgttgaagcggaagaagcccgtctgtccgatctgatcaccggtttcgtcgatccgaacgccgaagaagatatggcgccaaccgccacccacgttggctccgagctgtctcaggaagagatggatgacgacgaagacgaagacgaagatgaagacgccgacgacaacagcgatgacgacaacagcatcgacccagagctggcccgtgagaaattcgccgagctgcgtacccagtacgagctgacgcgcgacaccatcaaagccaaaggtcgtagccatgccgccgcccaggaagagatcctgaagctgtctgaagtcttcaagcagttccgcctggtgccgaagcagttcgattacctggtcaacagcatgcgcagcatgatggatcgcgttcgtactcaggaacgtatcatcatgaagctgtgcgttgagcagtgcaaaatgccgaagaaaaacttcatcaccctgttcaccggcaacgaaaccagcgaaacctggttcaacgccgcggtggcaatgaacaagccgtggtctgagaagctgctggaagtgaaagaagatgtgcagcgcggcctgcagaagctgcagcagattgaagaagagaccggcctgaccatcgagcaggttaaagatatcaaccgtcgcatgtccatcggcgaagcgaaagcccgtcgtgcgaagaaagagatggttgaagcgaacctgcgtctggttatctctatcgccaagaaatacaccaaccgcggtctgcagttcctcgacctgattcaggaaggcaacatcggtctgatgaaagcggtcgataagtttgaataccgtcgcggctacaagttctcgacctacgccacctggtggatccgtcaggccatcacccgctctatcgcggatcaggcgcgcaccatccgtattccggtgcatatgattgagactatcaacaagctcaaccgtatctcccgtcagatgctgcaggagatgggccgtgaaccgaccccggaagagctggctgagcgtatgctgatgccggaagacaaaatccgtaaagtgctgaagatcgccaaagagcctatctccatggaaacgccgatcggcgacgatgaagattcgcatctgggggatttcatcgaggataccaccctcgagctgccgctggattctgcgaccaccgagagcctgcgcgcggcaacgcatgacgtgctggccggcctcaccgctcgtgaagcgaaagtgctgcgtatgcgtttcggtatcgacatgaacaccgaccacacgctggaagaagtgggtaaacagttcgacgttacccgcgaacgtatccgtcagatcgaagcgaaggcgctgcgtaaactgcgccacccgagccgttctgaagtgctgcgtagcttcctcgacgat

SEQ ID NO: 23210 - DNA, 1482 bp, Klebsiella pneumoniae
atgtttcaggataacccgctgctagcgcagcttaaacagcaactgcattcccagacgccgcgcgcggaaggggtcgttaagggcacggaaaagggctttggcttcctcgaagtggacgctcagaagagctacttcattccgccgccgcagatgaaaaaagtgatgcatggcgaccgtatcgtcgcggtgatccattctgaaaaagaacgcgaaagcgccgagccggaatcgctggttgagcccttcctgactcgttttgtcggtaaagtccagaagaaagacgatcgcctcgctatcgttcctgaccatccgctgctgaaagacgccattccctgccgcgccgcccgcggcgttgagcacgattttaaacagggtgactgggccgtcgcagagatgcgccgtcatccattaaaaggcgaccgcggattttacgcggagttgacccagttcatcacttttagcgacgaccacttcgtcccatggtgggtaaccctggcgcgccataatcttgagaaagaggcaccggacggcgtcgccaccgagatgctcgacgaggggctgacgcgccgcgacctaaccaccctcgacttcgtcaccattgacagcgccagcaccgaagatatggacgatgcgttgtatgccgagtccactgctgatggcaaactgctgctgacggtcgccattgccgacccgaccgcctggattgccgaaggcagcaagctggataacgccgcaaaagtgcgcgcctttaccaactatctgccgggcttcaacattccaatgctgccgcgcgagctgtcggacgatctctgctccctgcgcgctaacgaagtgcgcccggtgctggcctgccggatgactctgggggccgatggcaccatcgaagacaatatcgagttctttgccgccaccatcgaatcgaaagccaagctggcctatgacgacgtctctgactggctggaaggccgcggcagctggcagccggacagcgaggcgatcgcgcagcaaattacgctgctgaaggacgtgtgccagcgtcgtagcgaatggcgtcagacccatgcgctggtgttcaaagaccgtccggactaccgttttgttctcggcgaaaaaggcgaagtgctggatatcgtcgcggaaccgcgtcgcattgccaaccgaattgtcgaagagtcgatgatcgccgccaacatctgtgccgcccgcgttctgcgcgacaagctcggcttcggcgtttataacgttcataccggtttcgacccggcgaacaccgagcagttggccgccctgctgaaaacccatgatgtgcacgtcgacccgacggaagtgctcaccctggaagggttctgcaagctgcgccgggaactggacgctcagccgaccggtttcctcgacagccgcattcgccgctcccagtcgtttgcggaaatcagcaccgagccgggcccgcactttggtcttgggcttgaagcctatgccacc

SEQ ID NO: 23211 - DNA, 1156 bp, Klebsiella pneumoniae
gaacaaggaaagcccatggagccacgccgcgtgaatggcaaaaatcactggtatcacgaaacccagtcaacaatctgcccggtggatgtcctgccgctcgtccctgaagccgcccatgttgaagaccgctttttgctggacctgacgctgccggccgcctggctacgtgcccacgctgactggctacaccccgcacgccagctggccgaactgctgtttcccgaccaggtggcggtgagtcgcctgcagacctttaccgcttacgatcgactcagcaccgcgctcaccgtcgcccaggtctacggcgtccagcggctgtgtaaccactacgccgcccgccttgctcccctgccaggccccgattcctcgcgcgagagcaaccgtcgtctggcgcaaatcacgcaatatgctcgtcagcttgccggttcgccctcggtgattaacgctctctcccgtagccagctggacgaagtgggcttaaccagtcgggacattattctgttcaaccagattatcggattcgtcggcttccaggcgcgggcgattgccgtcctgcaggcggcccagggctttccggtgcgctggatccccggtatgccccagcaagaggaggcacccgcggaactgttcgccccgccgccgggagcatggcaggcagacattgcggatcccgacctgcagtatgccgatgatgagcgtcagcggcgcatcgccggctggcagtcgctgcccggtctgggcgagctggcgccgctgctggcctgcgacccacagttattcgcgcctctggagaccttgatccgccagctcagcacggatgatacctttggcccgcaggtcgccttactcacggcgcgcaccaatggcagccccacctgttttgacgcctggctcccccactggcagggtgaagaggagttcgccagccatttgcgggagggcgaccaggccctccatcactggctccagcagcatcctcaggcccggtctctcgtgaccgcggtgcagctgttaacccgctcgcctgaccggtttagcgccgcccaagttaacgcccctcgcggaatatcgactctctgagcaacaagcaatcgatctgttgatctggagcgggctgtgcggatggatgaatcgtctgaaaatcgccctcggcaat

SEQ ID NO: 23212 - DNA, 798 bp, Klebsiella pneumoniae
atgggttttctttccggtaagcgcattttgatcactggcgtcgccagcaactgtccatcgcctacggcatcgcgcaggcatgcaccgcgaaggcgcggaactggcattcacctatcagaatgagaaactgaaaggtcgcgtagaagagtttgctcgccgcgctgggttctgacattgtgctgccgtgcgacgttgctgaagatgagagcatcaccgcgctgttcaccgagctggaaaaagtctggccaaattcgatggtttcgtccactcatcggttttgccccggctgaccagttagacggcgactacgttgacgttgtcactcgcgacggctttaaaatcgcgcacgacatcagcgcttacagcttcgtggcaatggccaaagcctgccgcggcatgctgaacccgggttcggctctgctgacgctctcctacctgggcgcagagcgcgcgatcccgaactataacgtgatgggtctggccaaagcctctctggaagctaacgtccgctatatggctaacgccatgggtccggaaggcgttcgcgtcaatgccatctctgccggtcctatccgtacgctggccgcgtccggtattaaagatttccgtaaaatgctggcgcactgcgaagcggtcaccccgatccgtcgcaccgtcaccattgaagatgtgggtaacagcgcagccttcctgtgctccaacctgtctgcggggatctccggtgaagtcgttcacgttgacggcgggttcaatatcgccgccatgaacgagctggaactgaaataagttccttcccct

SEQ ID NO: 23213 - DNA, 237 bp, Klebsiella pneumoniae
atgctttcagcacttatctcttccgcatttagctaccgggcagtgccattggcatgacaacccgaacaccagtgatgcgtccactccggtcctctcgtactaggagcagcccccctcaattctccagcgcccacggcagatagggaccgaactgtctcacgacgttctaaacccagctcgcgtaccactttaaatggcgaacagccatacccttgggacctacttcagccccaggat

SEQ ID NO: 23214 - DNA, 803 bp, Klebsiella pneumoniae
atggcaatccctgcatttggtcttggcaccttccgtctgaaagatgatgttgttatcgcatccgtaaaaaccgcgctggagctgggctatcgtgctatcgacaccgcgcaaatctatgacaacgaagccgcggtgggtcaggctatcgccgaaagcggcgtgccgcgtgatgagctgttcatcactaccaaaatctggatcgagaacctgagcaaagacaaactcatcgccagcctgcaagaaagtctgcagaagctgcgcacggactatgttgacctgacgctcatccactggccggcaccgaacgatgcggttgccgttgaagagtttatggcagcctgatggaagcgaagaagctgggtctgacccgtcagattggtatctccaacttcactattccactgatggagcgcgcgattgccgccgttggcgctgaaaacattgcgaccaaccagattgaactctcgccgtatctgcaaaaccgtaaagtcgtcgactgggcacgtgagcacggcatccacatcacctcttacatgacgctggcttatggtaaggcgctgaaagatgaagtgattgcccgtatcgcggcgaaacataatgcgactccggcgcaggttatcctggcatgggcgatgggcgaggggtacgcggtgatcccgtcctcgacgaagcgtgataacctggccagcaacctgaaggcgctggatctgcagttggatgatgaagatcgacaggcgatcgctgcgctggattgcaacgatcggctggtgagcccggaaggtctggcgccgcagtgggattaa

SEQ ID NO: 23215 - DNA, 1188 bp, Klebsiella pneumoniae
atgccactggcgctatttgccttaactatcggtgccttcgcaattggcaccactgaatttgtgattgtcggcctggtcccgaccatcgcccagcaactctctatctctttgccttctgcaggactgctggtctctatctacgcgctgggcgtggcgatcggcgctccggtgctgacggcgttaacggggcgtatgccgcgtaaacagctgctgctggcgttgatggtcctgtttacggcgggtaatgtgctggcctggcaggccccgggctatgaaacgctgatcctggcgcgactgctgaccggcctggcacacggcgtgttcttctctattggctcgacaattgctaccagcctggtggcaaaagagaaagcggcctcggccatcgccattatgttcggcggcctgacggtcgcgctggtaaccggggtaccgttcgggactttcatcggccagcattttggctggcgggaaaccttcctcgcggtatcgattctcggggtgattgcgctaatcagcagtctgattctggtgccgaataatattccgggccgcgccagcgccagcctgcgcgatcagctgaaagtattaacccatccgcgcctgctgatgatctacgccattaccgcgctgggctatggcggcgtgtttaccgcttttaccttccttgcgccgatgatgcaggagctggccggcttcagcccgtcagcggtgagctggatcctgctgggctatggtgtctcggtggctataggtaacgtgtggggcggcaaactggccgataagcatggcgccgtctccgcgctgaagtttatcttcgctgcgctggttgtgctgctgctggtcttccagctgaccgccagcgttcactatgccgcgctggcgacagtgctggtgatgggcgttttcgccttcggcaacgtgccgggtctgcaggtctatgtggtgcaaaaagcagagcagtataccccgggggctgtcgacatcgcttccggcctgaatattgccgcctttaacgtcggcatcgcgctggggtcgatcgtcggtggacagacggtcgagcggtacggtctggcgcagacgccgtggattggcgcgatgattgtgctggtcgctttgctgttggtggtcctgagcggacgtttagataaattgccacgccgttcggcagcgctttctcccgaaggc

SEQ ID NO: 23216 - DNA, 351 bp, Klebsiella pneumoniae
atgcaggtaaaatatttagcagggattgtcggcgcagccttactgttggcaggttgcagttccagcaatgaattaacctctgccggccagaatgtgcgcttcgtgcaggagaagccgggcgcagagtgtcagctgttagggaccgcgacgggtaaacagagcaactggctctccggccagaatggcgatgagggcggttccatgcgcggtgctgcgaacgctctgcgcaaccaggcggcagcgatgggcggcaacgtcatttacggcgtcagcagcccgacgcagaacctgctgtcgagctttgtacctaccgacagcgaaatgaacggccaggtttataagtgcccgaac

SEQ ID NO: 23217 - DNA, 1000 bp, Klebsiella pneumoniae
accggtgccgttgagctggaaagcccgttcatcctgctggctgacaaaaaaatctccaacatccgcgaaatgctgccggttctggaagccgtagcgaaagctggcaaaccgctggtcatcatcgctgaagacgttgaaggcgaagcgctggcgaccctggtggttaacaccatgcgcggcatcgttaaagtggctgcggtgaaagcaccgggcttcggcgaccgtcgtaaagctatgctgcaggacatcgctactctgactggcggtaccgttatctctgaagagatcggtatggagctggaaaaagcgactctggaagacctgggccaggcgaaacgcgtggttatcaacaaagacaccaccaccatcatcgatggcgttggcgaagaatccgcaatccagggccgcgtagctcagatccgtaagcagatcgaagaagcgacctccgactacgatcgtgaaaaactgcaggaacgtgtcgctaaactggctggcggcgtagcagtaatcaaagtcggtgcggctaccgaagttgaaatgaaagagaaaaaagcacgcgtcgacgacgccctgcacgcaacccgtgctgcggttgaagaaggcgtggtgtgtctggcggcggcgtagcgctggttcgcgttgcggcgaaactcgctggcctgaccggtcagaacgaagatcaaaacgtcggtatcaaagttgcctgcgcgcaatggaagcaccgctgcgtcagatcgtttccaacgccggtgaagagccgtctgttgtggcaaacaacgtgaaagcaggcgacggtaactacggttacaacgcagcaactgaagaatacggcaacatgatcgacttcggtatcctggacccaaccaaagtcacccgttctgcactgcagtacgcggcttccgtggctggcctgatgatcaccaccgagtgcatggtgaccgacctgccgaaaggcgatgcgcctgacttaggtgctgccggcggcatgggcggcatgggc

SEQ ID NO: 23218 - DNA, 915 bp, Klebsiella pneumoniae
cgacgattcttgacgcaactcaactccgatgttcagcttatcaatcagttaggctattacatcgtcagcggcggcggcaaacgcattcgcccgatgattgctgtgctcgccgcacgcgcggtgggctatcaggggagcgcgcatgtcaccattgccgcgctgattgaatttattcataccgccaccctgctgcatgacgacgtcgtcgatgagtctgatatgcgtcgcggcaaagccacggccaatgcggcgtttggcaatgccgccagcgtgctggtcggcgattttatctatacccgcgcctttcagatgatgacccagctgggctcgctgaagatccttgaggtcatgtcggaagcggtgaacgtcattgccgaaggcgaagtgctgcagctgatgaacgtcaatgacccggatatcaccgaagagaactacatgcgcgttatctacagcaagacggcgcgtctgtttgaagctgcctcgcagtgtgcgggactgctggccgactgcactgcggaagaagagcgcgcgttgcaggattatggccgctatctcggcaccgctttccagctaatcgacgatttactcgattatagctctgacggcgagcggctcggtaaaaacgtcggtgacgacctgaacgaaggtaaacccacgctaccgctgctgcacgccatgcaccatggcacacccgatcaatcagcgatgatccgcggtgcgatcgagcaaggcaacggccgccatctactggatactgtgctggaaacgatggcgacctgcggttcgctggaatggacgcagaagcgtgccgaagaagaagctgacaaagccattgccgcgctgcagatcctcccggacacgccctggcgtgaagccttgattgggctggcgcacattgcagtccagcgcgatcat

SEQ ID NO: 23219 - DNA, 1257 bp, Klebsiella pneumoniae
atggataaattccgtgttcaggggccgactcgccttcagggtgaagtcaccatctccggggcaaaaaacgccgccctgccaatcctcttttccgcgctgcttgccgaagagccggtagagatccaaaacgtacctaagctgaaagacatcgataccaccatgaagctgctgagccagctgggcgcgaaggtcgagcgcaatggttcggtatggattgacgccggcccggtcgatgtattctgtgctccgtacgatctggtgaaaaccatgcgcgcctctatctgggcgctgggcccgttggtggcgcgtttcggtcaggggcaagtttctctgcctggcggctgcgctatcggcgcgcgtccggtcgatctgcatattagcggtctggagcagctgggcgccgagatcaaactggaagaaggttatgtcaaagcctcggtcagcggtcgcctgaaaggcgcgcatattgtgatggataaggtgagcgtcggcgccaccgtaaccatcatgagcgcagcgacgcttgcggagggaacgacgattattgaaaacgccgctcgcgagccggagattgtcgataccgccaacttcctgaacgcgctgggcgcaaaaatcacaggccagggtagcgatcgcattaccatcgaaggcgtgcagcgcctgggcggcggcgtctaccgtgtgctgcctgaccgtattgaaaccgggactttcctggtggccgcggcgatttccggcggcaagatcctctgccgtaacgcgcagccggataccctggatgccgtactggcgaagctgcgcgacgccggggctgacatcgaaacgggcgaagactggatcagcctcgatatgcacggcaaccgtccgaaagcggtcaacgtgcgtaccgcgccgcacccgggcttcccgaccgatatgcaggcccagttcacgctgcttaacctggtagcggaagggaccggcgtgatcaccgaaacgatctttgaaaaccgcttcatgcacattccggagctgatccgtatgggcgcgcacgcggagatcgagagcaataccgctatctgtcacggcgtgaagcagctttctggcgcgcaggtgatggcgaccgatttgcgcgcgtcggcgagcctggtgctggccggctgtatcgctgaagggaccaccatcgtcgatcgcatctatcatatcgatcgcggctatgagcgtatcgaagataaactgcaggcgctgggcgccaatattcaacgcgtgaagggcgag

SEQ ID NO: 23220 - DNA, 1272 bp, Klebsiella pneumoniae
atgacagataaacgcaaagatggatcgggcaaattgttgtattgctctttttgcggcaaaagccagcatgaagtgcgtaagctgatcgccgggccatccgtgtatatctgcgacgaatgcgttgatttatgtaacgacatcattcgcgaagagattaaagaagtggcgccgcaccgcgagcgcagcgcgctgccgacgccgcacgagattcgccaccaccttgatgactacgtcatcggtcaggaacaggcgaagaaggtgttggcggtcgcggtatacaaccactacaagcgtctgcgcaatggcgataccagcaatggcgtagagctgggtaaaagcaacatcctgctgatcgggccgaccggttctggtaaaacgctgctggcggaaacgctggcgcgcctgctggatgtgccgtttaccatggcagacgccaccaccctgaccgaagccggttatgtgggtgaggacgtcgaaaatatcattcagaaactgctgcagaagtgtgattacgacgtgcagaaagcgcagcgcggcatcgtttatatcgacgaaatcgacaaaatttcgcgtaaatccgataacccgtcgattacgcgcgacgtctcaggcgaaggcgtgcagcaggcgctgctgaagcttatcgaagggaccgttgccgccgttccgccgcagggcgggcgtaaacatccgcagcaggagttcctgcaggttgatacctccaagatcctgtttatctgcggcggcgcgttcgctggcctggacaaagtgatttcccaccgtgtggaaaccggctccggcattggttttggcgcgacggtaaaagcgaagtccgacaaagcgagcgaaggggaactgctggctcaggtcgagccggaagatctgatcaagtttggtctgatcccggagttcatcggccgtctgccggtagtggcgaccctgaacgagctgagcgaagaagccctgatccagatcctgaaagagccgaaaaacgccctgaccaagcagtatcaggcgctgtttagccttgaaggcgcagagctcgaattccgcgacgaagcgctggacgctatcgccaagaaagcgatggcgcgtaaaaccggcgcccgtggcctgcgctcaattgtggaagcggcgctgctggataccatgtatgacctgccttcgatggaagatgtcgaaaaagtggtcattgatgagtcggttatcgccggtcagagcaaaccgctgctgatctacggcaaaccggaagctcagcaggcatctggtgaa

SEQ ID NO: 23221 - DNA, 1477 bp, Klebsiella pneumoniae
atgtcgccgatgtctgcggaagcgaccgtcgtgcgtggctacatcgactggatggtgcaggtgccgtggaatgcgcgcagtaaggtcaaaaaagacctgcgtcaggcccaggagatcctcgataccgatcactatggcctggagcgcgtgaaggatcgcatccttgaatatctcgcggtgcagagccgggtgaacaaaatcaaggggccaatcctttgtctggtgggaccgccgggggtaggtaaaacctcgctgggtcaatccatcgccaaagcgaccggacggaaatacgttcgtatggcgcttggcggcgtgcgcgatgaagcggaaatccgcggtcatcgtcggacctacattggctcgatgccgggcaaactgatccagaaaatggcgaaagtgggggtcaaaaacccgctgttcctgttggacgagatcgacaaaatgtcttccgacatgcgcggcgacccggcttccgcgttgcttgaggtgctggatccggaacagaacgtggcctttaacgaccactatctggaagtggattacgatctcagcgacgtgatgttcgtggcgacttccaactccatgaacattccggcgccgctgctggaccgtatggaagtgattcgtctctccggctataccgaagatgaaaaactgaacatcgccaaacgtcatctgctgccgaagcagatcgaacgtaacgcgctgaagaaaggcgagctgaccgtcgacgatagcgccattatcggcattattcgttactacacgcgggaagcgggggtacgtagcctggagcgtgaaatctccaagctgtgccgcaaggccgttaagcaactgctgctggataaatcgctgaaacacatcgaaattaacggtgagaatctgcatgattatctcggcgtacagcgcttcgactatggccgcgccgatagtgagaaccgcgtcggtcaggtgaccggtctggcgtggacggaagtgggcggcgatctgctgaccatcgaaaccgcctgcgtgccgggcaaaggcaagctgacctacaccggctcgcttggcgaggtgatgcaggagtcgattcaggctgcgctgacggtggtacgttcgcgggctgacagctgggcattaacgccgacttctacgagaagcgtgacattcacgtgcacgtgccggaaggggcgacgcctaaggatggtccgagcgcggggatcgccatgtgcacggcgctggtctcctgcctgaccggcatccggtacgcgctgatgtggcgatgaccggtgaaatcactctgcgtggtcaggtgctgccgatcggtggtctgaaggaaaaactgctggcggcgcatcgcggcggcattaagactgttctgattcctgatgagaacaaacgcgaccttgaagaaattccggataacgttatcgccgatttggatatccatccggtgaaacgaatcgaggaagttctgacacttgcgctgcagaac

SEQ ID NO: 23222 - DNA, 252 bp, Klebsiella pneumoniae; identical to SEQ ID NO: 23150

SEQ ID NO: 23223 - DNA, 408 bp, Klebsiella pneumoniae
ggaatattaacctgtttcccatcgactacgcctttcggcctcgccttaggggtcgactcaccctgccccgattaacgttggacaggaacccttggtcttccggcgagcgggcttttcacccgctttatcgttacttatgtcagcattcgcacttctgatacctccagcaaccctcacaggtcaccttcgcaggcttacagaacgctcccctacccaacaacacatagtgtcgctgccgcagcttcggtgcatggtttagccccgttacatcttccgcgcaggccgactcgaccagtgagctattacgctttctttaaatgatggctgcttctaagccaacatcctggctgtctgtgccttcccacatcgtttcccacttaaccatgactttgggaccttagctggcgg

SEQ ID NO: 23224 - DNA, 463 bp, Klebsiella pneumoniae
ccttccgcgggtacactgcatcttcacagcgagttcaatttcactgagtctcgggtggagacagcctggccatcattacgccattcgtgcaggtcggaacttacccgacaaggaatttcgctaccttaggaccgttatagttacggccgccgtttaccggggcttcgatcaagagcttctccttacggataaccccatcaattaaccttccggcaccgggcaggcgtcacaccgtatacgtccactttcgtgtttgcacagtgctgtgtttttaataaacagttgcagccagctggtatcttcgactggtctcagctccatccgcaggggcttcacctacacaccagcgtgccttctcccgaagttacggcaccattttgcctagttccttcacccgagttctctcaagcgccttggtattctctacctgaccacctgtgtcggtttggggtacgatttgatg

SEQ ID NO: 23225 - DNA, 766 bp, Klebsiella pneumoniae
atgctgttgatagcccgacgaactgctctcgcggcggcgctgctgctggttatgcccctcacggtctggctttccagggtggctgtggcagcctggactgccggttgccatgttgaaaagcctgtggtgggtgacggaaacggtgacccagccgtggggaattatcactcatgtcgtgctttgcggctggttcctctggtgtctgcgctttcggctgcgcgcggcgttgatcctgttccttatccttgccgccgctatcctggcgggacagggggcgaaatcctgggtcaaggcgcgggtccaggagccgagaccgttcgtcatctggctggaaaacacaaggcaggtgccggtgacgcaattctacgcgttaaagcgtaaagaacgcgctaaactggtgcatgaacagctggcgcaggcgcaggacattccgtcatttttacgcaaacactggcagaaggagacggggtttgctttcccgtcaggtcacaccatgtttgccgccagctgggcgttactcgctgcggggctgctgtggccgcgtcgccgctggggcacaatcgcggtgctgctggtgtgggcgacggcggtgatgggcagtcgcctggcgctgggcatgcactggccgctggatctcatcgtcgccacgctgatctcctggctgctggtcacggtggcctgctggctgacgcagcgcctttgtgggccgctctcgccgcccggagaagaggcgcaggatattaaaaaacggatgcctgaagcggaa

SEQ ID NO: 23226 - DNA, 636 bp, Klebsiella pneumoniae
atgaagaagttagcagcggcggcattgattcttggcacgctttctaccggcagcgtctgggcgcatgaggcgggggagtttttcattcgtgccgggaccgccaccgtccgaccgacggagggctctgacaatgtgttaggcagccttggcagtttcaacgtcagtaacaatacccagctgggtttaacctttacctatatggcgaccgataacattggcgtggagttgcttgccgcgacgccgttccgccataaggtcggcaccgggccaaccgggactatcgccaccgtccatcagctgccgcccaccctgatggcgcagtggtactttggcgatgcgcaaagcaaggtgcgcccgtacgtgggggccggtatcaactacaccaccttctttaatgaagactttaacgacaccggcaaggcggccgggctttccgatctgagcctgaaggactcctggggcgcggcggggcaggtcggcctcgattatctgattaaccgcgactggctgctgaatatgtcggtgtggtacatggatatcgataccgatgtgaaattcaaagccggcggcgtggaccagaaagtcagcacccgtctggatccgtgggtgtttatgttctccgcaggctatcggttc

SEQ ID NO: 23227 - DNA, 537 bp, Klebsiella pneumoniae
atgaagcagtttctggattttttaccgctggtggtcttctttgccttttataagctttacgatatctacgccgccaccacggcgctgattgtggcgaccgccgtcgtgctgatctacagctgggtgcgctaccggaaagtggaaaaaatggcgctgatcaccttcgtgctggtggccgtcttcggcgggttaaccatcttcttccataatgatgagtttattaaatggaaggtgacggtgatctatgccctgttcgccggcgcgctgctgttcagccagtgggtgatgaaaaagccgctgatccagcgcatgctgggtaaagagctgagcctgccgcagcaggtctggtcgcgacttaacctggcctgggcggtgttctttattctctgcgggctggccaatatctatatcgccttctggctgccgcagaatatctgggttaactttaaggtctttggtttaaccgccctcacgctggtctttaccttgctgagcgggatctacatctaccgtcatatgccgcaggacgaccaccac

SEQ ID NO: 23228 - DNA, 869 bp, Klebsiella pneumoniae
tatctgttactgacgctggcggctctgttctggggcgggaattatgttgtcgggcacgtgctggtgcagggcgtggatccgatcctgatgaccgaagcgcgctgggcgctgacggcgctgctgctgggcctgctctaccgacggaaatcgccggcagtcgccacctgctgcgggcaaacgcgccagcggtggtggtgctcaccctctgtggccaggtcagcttcccgctcacgctctatattggcctgcaaaccacctccgcgctcaacgccgccatctatatgtccgccacgccaagtatggtgctgttgattaaccgactgtttttccgcgatccggtatcagggcgtaactggcttggagtggcttttagcaccctcggcgtgatgatcctgttattccagggaaacccactgcacgccgcctcgctgcatagctttgccgtcggcgatctgtgggcgatggggtcggcgctgagctgggcgctctactgttcgctgttacgtctgaaggaccgccgtatcccggcgaatggctttgtcgccgtcagctcgctgcttggcgcgctgatcctgctgcccatcgtcgccttctggctgatgcgccatccggcccaggactgggcagcctggcgcgagccgtttttcctcagcggcctggcgtatctggtaattttcccatcgtggctggcctatttgttctggaacaaaggtatcgccaccattggcgccacgcggggcgaaatttacacccacatcatccccctctccggcggggtgttgagcatcctcttcctgcatacccagccgcatgcctggcatctgtttagcgcgctgttcatcatggtggggattgggatctgctcgctg

SEQ ID NO: 23229 - DNA, 1803 bp, Klebsiella pneumoniae
ggtcaacaaaccctgctttgacacacaatatcgacacgctggggcaaatgagttgcaacccggcgatggcggcattgggaaaggacacctggtaaaagaagtggatgcgctcggcggttgatggccaaagcgatcgatcaggcgggcattcagtttaggatactaaacgccagcaaaggaccggcagtgcgcgccacccgcgctcaggctgaccgcgtgctttatcgtcaggcagtacgtaccgcgctggagaaccagccgaacctgatgatcttccagcaggcggttgaagatctgattgtcgaaaacgatcgcgtcgtgggcgccgtcacccagatgggcctcaaattccgcgctaaagcggtagtgctgaccgtcgggaccttccttgacggcaaaatccatattggtctggacaactacagcggcggccgcgccggcgatccgccgtctatcccgctgtctcgtcgtctgcgtgaattgcctctgcgcgtaagtcgtctgaaaaccggtactccgccgcgtattgacgcgcgcaccatcgatttcagcgtgctggcgcagcagcatggcgataacccgatgccggtcttctcgttcatgggatccgcggatcagcatccgtgccaggtaccgtgctatatcacccacactaacgagaaaacccacgatgtgatccgcaataacctcgatcgcagtcctatgtacgccggagtgattgaagggatcggacctcgctattgcccgtcgatcgaagacaaagtcatgcgctttgccgatcgcaaccagcatcagatcttcctcgagccggaaggactgacctcaaacgaaatttatccgaacggtatatccaccagcctaccgtttgatgtgcaaatgcaaatcgtccgctcgatgcaggggatggagaatgcgcggatcgtccgtccaggctacgctattgagtacgatttcttcgacccgcgcgatctgaagccaacgcttgagagcaaatttattcagggtctgttcttcgccggccaaatcaatggtaccaccggttatgaagaggcggcggctcaggggctgctggccggacttaacgccgcccgcttctctgcggaaaaagagggctgggcgccgcgtcgcgatcaggcttacctcggcgtgctggtagatgacctctgcaccctgggtaccaaagaaccgtaccgcatgtttacttcccgcgctgaatatcgtctgatgctgcgcgaagacaacgccgatttgcgtttgaccgaacaggggcgcgagctgggtctggtggatgacgaacgctgggcgcgctacaacgagaagctggaaagcatcgaacgtgaacgccagcgtctgaaatccacctgggtgaatccgcaggcagagagcgccaacgaagtgaacgctcacctgaccgcgccgttgtcgcgtgaagccagcggcgaagatctgctgcgtcgtccggaaatgacctacgaacagctggttcaactctcgccattcaccccgggactggaagatcgtcaggcggctgaacaggtagagatccaggtgaagtatgagggctatatcgcgcgccagcaggatgagattgagaaacaacagcgcaatgagaataccttgctgccagcgaccctcgactaccgccaggtcactgggctgtctaacgaggtgattgccaaactgaacgaccataaaccgtcgtcgatagggcaggcgtcacgtatctccgggatcaccccggcggcgatctctattttgctggtttggctgaaaaagcaggggatgctgcgccgcagcgcctga

SEQ ID NO: 23230 - DNA, 613 bp, Klebsiella pneumoniae
gtgctcaacaaactttctcgtctgctggatgaagcgggtatttcgctcaccgatcaccagaaaaatcagctggtggcttacgtcggactgctcgataagtggaacaaagcctataacctgacctccgttcgcgatccgaatgagatgctggtgcgtcatattctcgacagcatcatcgtggcgccttatctgcagggctcgcgctttatcagatgttggtacgggcccggggttgccggggatcccgttggccatcgtatgtccggagtcacatttcaccctgctggacagccttggcaagcgcgtgcgcttcctgcgtcaggtgcagcacgagctgaagctggataacgtcaccccggtgcagagccgcgtggaagccttcccggccgagccgccgtttgatggcgtgataagccgcgctttcgcatcgcttaatgatatggtgagctggtgccatcatctgccggcagcgaatggtcacttctatgcgctcaaagggttagcgcaaaaagaagaaatggaaagtctgccggaagggtatgacattgtcgaggtgattgagctgcatgttcctcggttggaaggggagcggcacctggtggtgattaagcca

SEQ ID NO: 23231 - DNA, 813 bp, Klebsiella pneumoniae
atggcttcagaaaatatgacgccgcaggattacataggacaccatctgaacaaccttcagttggacctgcgtacattctcgctggtggatccgcacaaccacacagccaccttctggacgctcaacattgactccatgttcttctcggtggttctcggtctgctgttccttgccatgttccgtagcgttgctaagaaagcgaccagcggcgtaccagggaaattccaaaccttcatcgaaatgatcatcggcttcgtccatggcagcgtcaaagacatgtaccatggcaagagcaaggttatcgcgccgctggcgctgaccgtgttcgtctgggtcttcctgatgaacctgatggacctcttgcctatcgatttcttaccttggatcggtgagcacatactcggcctgcctgcactgcgcgtggttccgtctgccgacgtgaacatcaccctgtcgatggcgcttggcgtgttcatcctgattattttctacagcatcaaaatgaaaggcgttggtgggttcgttaaagaactgaccatgcagccgttcaatcactgggcgttcattcctgtcaacttaatccttgaaggggtaagcctgctgtccaaaccggtctctctcggtctgcgactgttcggcaacatgtatgccggtgagctgattttcattctgattgctggtctgttgccgtggtggtcacagtgggttctgaatgtgccttgggccattttccacatcctgattattacgctgcaagccttcatcttcatggttctgacgattgtctatctgtcgatggcatctgaagagcat

SEQ ID NO: 23232 - DNA, 531 bp, Klebsiella pneumoniae
atgtctgaatttgtaacggtagctcgcccctacgccaaagcagcttttgactttgccgtcgaacacaacagtgttgaacgctggcaggatatgctggcgtttgccgccgaagtgaccaaaaacgaccaaatggcagagcttctctccggtgctttggcgccggaaacgctctcagaagcgtttatcgctatctgcggcgagcaactcgacgaaaatggccagaacctgattaaggtgatggcggaaaataatcgtctgaaggtgctcccggacgttcttgagcaattcattcacctgcgcgcggccagtgaggccatcgcagaggtagaagtaatatctgccaaccaactgagtgatgaacagcttgccaggatcgtcagcgcgatggaaaaacgtctgtcacgcaaagttaagctgaattgcaaaatcgataagtctgttatggcaggtattatcatccgtgcgggtgatatggtcattgatggcagcgtacgcggccgtcttgagcgccttgcagacgtcttgcagtct

SEQ ID NO: 23233 - DNA, 1534 bp, Klebsiella pneumoniae
atgcaactgaattccaccgaaatcagcgaactgatcaagcagcgcattgctcagttcaatgttgtgagcgaagctcataacgaaggtactattgtttctgtaagtgacggtgttatccgcatccacggccttgccgaatgtatgcagggcgagatgatctccctgccgggtaaccgttacgctatcgcactgaacctggagcgcgactccgtaggtgcggtggtaatgggtccgtacgctgacctcgccgaaggcatgaaggtgaaatgtactggccgtatcctggaagttccggtaggccgtggcctgctgggccgcgtggtgaacaccctgggcgcgccaattgatggtaaaggtccgctggaaaacgacggtttctccgccgttgaagcgatcgcgccgggcgtaatcgaacgtcagtccgtcgatcagccggtacagaccggttacaaatccgttgacgccatgatcccaatcggtcgtggtcagcgtgaactgatcatcggcgaccgtcagaccggtaaaactgcgctggctatcgatgccatcatcaaccagcgtgattccggcatcaagtgcgtctatgtcgctatcggtcagaaagcgtccaccatctctaacgtggtgcgtaaactggaagagcacggcgcgctggctaacaccatcgtagtggtagcgactgcatctgaatctgctgcactgcaatacctggcgccatacgctggttgcgcaatgggcgaatacttccgcgaccgcggtgaagatgcgctgatcgtttacgatgatctgtctaaacaggctgttgcttatcgccagatctccctgctgctccgtcgtccgcctggacgtgaagcgttcccgggcgacgtattctacctccactctcgtctgctggagcgtgctgcgcgtgttaacgccgaatacgttgaagccttcaccacaggtgaagtgaaagggaaaaccggttctctgaccgcgctgccgattatcgaaacgcaggcgggtgacgtgttccgcattcgttccgaccaacgtaatctctattaccgatggtcagatcttcctggaaaccaacctgtttaacgccggtattcgtcctgcggttaacccgggtatctccgtatcccgtgttggtggtgcagcgcagaccaagatcatgaagaaactgtccggtggtatccgtaccgcgctggcgcagtatcgtgaactggcggcgttctcccagtttgcatccgaccttgacgatgcaacccgcaaacagctggaccacggtcagaaagtgaccgagctgctgaaacagaaacagtatgcgccgatgtccgtcgcgcagcagtctctggttctgttcgcagcagaacgtggttacctggctgatgtagaactggcgaaaatcggtagcttcgaagccgctctgctggcttacgtcgaccgtgatcacgctccgctgatgcaagagattaaccagtccggtggctataacgacgaaatcgaaggcaagctgaaaggcatcctcgattccttcaaagcaacccag

SEQ ID NO: 23234 - DNA, 714 bp, Klebsiella pneumoniae
atgaataatgaacatcgtctccaggccgcgccagcgctgcaggacaaggacgaaagcatttaccaggcgctgatgacggctatcgtcgaacatcagctgccgccgggcagcaaactgccggaagaggcgctggcggaggtgttcgccgtgagccgcaccggcatcagaaaggtgctgcaacgactcgccgctgtgcaactggtcacgttgacgcccaaacgtggtgcacacgtcaccagcccgagcgtggaagagtcccaggcgatctttcgcacccgggcgctgctcgaggtcgccaatctccccgatgtgatcgcgcgctgtcagccgccgcatctggcggcgctggagaacattattcagcgtgaacagcaggcccatgcggcgcacgacggcccggcggcgatccgccactccgctgactttcatattcagctgcaggctatctccggcaacccggtgctcaccgagatggtgacccgcctcagccagcgctcctctttagtgattgccgcctggggcgccccctggcgacagggctgccgttgcgacgatcaccagcagctggtcggtttgctgcgggataaagccctgcagccgctcagcgaggcgctgatgcaccattttgatcatattgtcgccagcctgtgcttcgagcgcgatggcgtcagcctgcccgatttttcccggctgttcgccggccacaaggagtcg

SEQ ID NO: 23235 - DNA, 1494 bp, Klebsiella pneumoniae
atgccacattcatcccacacgcagcagacgaagactcacgaggcggccgccggctacagtccgcggctatgtaatgacgatctggcgccgacccgcgaccagaactggagctggtacaatatcttttcattctggatgtcggacgtgcacagcatgggcggctacgtagtggcggcgagcttctttacgcttgggctggccagctggcaggttctgctctgcctgctggtgggcatctgtattgtccagctgtgcgccaacctggtggcgaagccgagccagatggccggggtgccatacgccgttatctgccggcaggcgtttggcgtcttcggcgccaatatcccggcggtgatccgcgggctgatcgcgttcgcctggtacggtattcagacctatctggcggcgaatgccctgatgctggttctgctcaagttctggccctcccttgcctcgctgaccagcagcagctttctcgggctatcaacgctcggctggctgtgcttcgccactatgtggctgctgcaggcgatggtgttctggcatggcatgaacgccatcaaacgctttatcgatatcgctggtccggcggtttatgtggtgatgctggcgctggccggctggattgtatacaagactggtctggacggtatctcctttaccctcgccagcaaatccctgagcgccggcgagcagacctggcagatgatcaccgccacggcgctggtggtctcctacttctccgggccgctgcttaacttcggtgacttttcccgctacggcaaaagcatgggcgagatccgccgcggtaaccgctggggactgccgtttaactttctgctattctcggtggttaccgtggtgattgtctccggcacccagtcgctgtttggcaaaatgatcaccgacccgatcgaaaccgtcagccgcgtgggtaacgatctggcggtggccatcggcctgctgaccatgatcaccgccaccatcggcatcaatatcgtggctaacttcgtctcgccggccttcgatttttccaactgcgccccgcagaaaatcagcttccgtaccggcgggatgattgccgcggtgggctcgatactcctgacgccgtggaatctgtttaactcgccggagctgatccactataccctcgacgtactgggcgcctttattggcccgctgtttggcatcctgatcgccgacttctacctgatcaaacgcggccgggtgtcagtggacgatctgtttgacgatacgccgcagggtaaatattggtaccgcaacggctttaacccgaaagcgattgccgccctgctgccgtcggtgggcctggggctgattatcagctttattccggccctgcatgaagtggcgaacttcagctggtttatcggcgtcttcctcggcgccaccacctaccgctggctggctcgcgacgagcgcgaagtgcaggcgaaagctgccttccgctccggcgcggtggcgcaaaaagag

SEQ ID NO: 23236 - DNA, 1308 bp, Klebsiella pneumoniae
atgatggattaccagaccgcggtgcgcggtgcattttttgatatcgccggcgtggcggagaccccggatgaggtggccgcccaggctcgctatctcgatgatggcctgttgtttctgcaggaggggaaaattatcgccctgctgccatggctggagggtgaagcctttctgcatccgctgaagggctatgtcgacctgcggggcaagctgctgttgccgggttttgtcgatacccacattcactatccgcagaccgagatgatcggcgcctttggcgaacagctgctggagtggctcaccacctacaccttcccggtggagagccagtttgccgatgcggagtatgcccaggagatagcgcagttttttgtaaatcagctgataagccatggcaccaccaccgcgctggtgttttgtaccctgcatccggcatcggtggaggcgttattcagcgaagcgctgcgcctcaatatgcgcctgatcgccgggaaagtgatgatggatcgccatgtgcccgactacctgtgcgaaaccgccggggagagctacgagcagacccgggcgttgatccgccgctggcatcagcgcggcaggctgggctatgccatcaccccgcgctttgcccccacctcgaccccggggttgctggaggcggtgcagcgcctgcgggccgagtttcccgacacctggctgcagacgcatctcagtgaaaaccgggaggagatcgcctgggttaaacagctgtggcctgagcatgcgcgctatctggatgtctatcatcactatcagctcactggcgaacgcagcgtcttcgctcacgggatccatctcgatgatgccgagtggcagtgcctgcatgacaccgggtccgcagtcgccttctgcccgacgtcgaatctgtttctcggcagcgggctgttccgcctgcccgcctgctggcagcaccaggtgcggatgggcatcggcagcgacgtcggagccgggaccaccttcagcatgctgcggacgctgggcgaggcctacaaggtaggacaactgcagagctatcgcctgcgcgccagcgaggccttctatcacgccacccttggcggggcgcgcgccctgcggctggaggagaaaattggcaatttccagccgggcaaagaggcggattttgtggtgattgacccggcggtcaccccgctgcagcgcttgcgcataggccgctgccatgacatttatgagcagctgttcgtgctgatgaccctgggtgatgaacgcaatatcagcgagacgtgggtgaacggcgagcgggtgtggtgtcaggac

SEQ ID NO: 23237 - DNA, 1346 bp, Klebsiella pneumoniae
gtgagcaatctgtcgctcgatttttccgacaacgcgtttcaacctctggccgctcgcatgcggccagaaaatttagcgcagtatattggccagcagcacctgctggcgccgggtaaacccctgccgcgggccattgaggccgggcacctgcattcgatgatcctctgggggccgccgggtaccggcaagaccactctggcggaagtgattgcccgctacgccagcgccgatgtcgaacggatctcagcggtaacctccggggtgaaagagattcgcgaggctattgagcgcgcgcggcaaaatcgcaacgccggccggcggaccatcctgtttgttgacgaagtgcatcgctttaataaaagccagcaggatgcctttctgccgcatattgaagacggtaccattacttttattggcgcgaccaccgaaaacccctcctttgagcttaactcggcgctgctctcccgcgctcgcgtctacttactgaaatcgctcaccaccgacgatatcgagcgggtgcttgaccaggcgatgaacgataaaacccgcggctacggcggccaggatatcgttttgccggatgagacccgcagggccattgccgagctagtgaatggcgacgcgcggcgagcgctgaataccctggaaatgatggccgatatggccgaaagcgatgactcgggcaagcgggtgctgatggcggaactgctgaccgagatcgccggcgagcgaagcgcgcgctttgataataaaggcgaccggttctacgatttgatttccgccctgcataagtcggtgcgcggtagcgcgccggatgcggcactttactggtacgcgcggatcatcaccgccggcggcgatccgctgtacgttgcccgccgctgtctggcgattgcctcggaagatgtcggcaacgccgacccgcgggcgatgcaggtcgccatttcggcgtgggactgctttacccgcgtcgggccggcggaaggcgaacgggcgattgcccaggccattgtctatctggcctgcgcgccgaagagcaacgcggtgtacaccgccttcaaagcggcgctggccgacgcgcgggatcgtcctgactacgacgttccggtgcatctgcgcaatgcgccgacgaagctgatgaaagagatgggctacggccaggagtatcgttacgctcatgacgaacccaacgccgtacgccgccggcgagcagtacttcccgcaggaaatggcgcaaacgcgctattatcacccgacaaaccgggggcttgagggtaaaattggcgaaaagctcgcctggctcgctgaacaggagtcaaaatagcccgataaaacgctaccgctaa

SEQ ID NO: 23238 - DNA, 1845 bp, Klebsiella pneumoniae
gtgcttggaaaggagaacgccgaaggcgatcgcaccacgccttctatcattgcctatacccaggatggtgaaactctggttggtcagccggctaaacgtcaggcagtgacaaacccgcaaaacaccctgtttgcgattaaacgcctgattggccgccgcttccaggacgaagaagttcagcgtgacgtttctatcatgccatacaaaattgttgccgcagacaatggcgacgcatggctggatgtgaaaggcaccaaaactgcaccgccgcagatctctgctgaagtgctgaagaaaatgaagaaaacggctgaagattacctgggtgaaccggtaactgaagcggttatcaccgtaccggcttacttcaacgatgcgcagcgtcaggcaaccaaagatgccggccgtatcgccggtctggaagtcaaacgtatcatcaacgaaccaaccgcggccgcgctggcttacggtctggataaagaagtgggcaaccgtactatcgcggtttacgacctcggtggtggtactttcgatatctcgattatcgaaatcgacgaagttgatggcgaaaaaacctttgaagttctggcgaccaacggtgatacccacctgggcggcgaagacttcgatactcgtctgatcaactacctcgttgatgagttcaagaaagatcagggcattgacctgcgcaacgacccgctggccatgcagcgcctgaaagaagccgctgagaaagcgaagattgaactgtcttctgctcagcagaccgacgttaacctgccgtacatcactgcagatgcgaccggtccgaaacacatgaacatcaaagtgactcgcgcgaaactggaaagcctggtagaagacctggttaaccgttccatcgagccgctgaaagtcgctctgcaggatgccggtctgtccgtttccgatatcaacgacgtgatcctcgttggtggtcagactcgtatgccgatggtgcagaagaaagtggccgagttctttggtaaagaaccgcgtaaagacgttaacccggatgaagccgtggcgatcggtgctgccgttcagggcggtgtactgactggcgatgtgaaagacgttctgctgctcgacgtaaccccgctgtcgctgggtatcgaaaccatgggcggcgtgatgactgcgcttatcagcaaaaacaccaccatcccgaccaagcacagccaggtgttctctaccgctgaagacaaccagtctgcggtaaccatccatgtgctgcagggtgagcgtaaacgcgcgtctgataacaaatctctgggtcagttcaacctggatggtattaacccggcgccgcgcggcatgccgcagatcgaagtgaccttcgacatcgatgctgacggtatcctgcacgtctccgcgaaagacaaaaacagcggtaaagagcagaagatcaccatcaaagcgtcttccggtctgaatgaagaagaaattcagaaaatggttcgcgaagcagaagctaacgccgaatctgaccgtaagttcgaagagctggtacagacccgcaaccagggcgaccatctgctgcacagcactcgtaagcaggttgaagaagcaggcgataaactgccggctgacgacaaaactgccattgagtctgcgctgaccgcgctggaatcttctctgaaaggcgaagacaaagcggatatcgaagcgaaaatgcaggcgctggcgcaggcttctcagaagctgatggaaatcgctcagcagcagcacgctcagcagcaggcgggttccgctgacgctcaggcgagcaacgcgaaagacgacgatgttgtcgacgctgagttcgaagaagtgaaagataaaaaa

SEQ ID NO: 23239 - DNA, 1122 bp, Klebsiella pneumoniae
gtgaagagggaagagcagaaccagaagcgctcgaaggagaggttaatggaaagcaaagtagtagttccggcggaaggtcaaaaaatcaccctgcaaaacggcaaactgaacgtccctcacaatccgattatcccgttcattgaaggtgacggtatcggcgttgacgttaccccagcgatgctgaaagtggttgatgccgccgttgagaaagcctataagggcgagcgtaaaatttcctggatggaagtttacaccggtgagaaatcaacccacgtctatggccaggacgtctggctgccagctgaaaccctcgatctgattcgtgactaccgcgttgctatcaaaggtcctctgaccaccccagtcggcggcggcattcgttctctgaacgtggcgctgcgccaggagctggatctttacgtctgcctgcgtccggtacgttactaccagggcaccccgagcccggttaaacacccggaactgaccgacatggttatcttccgtgaaaactcagaagatatctatgcgggtatcgagtggaaagccgactctgcggaagcagacaaagtgatcaaattcctgcgcgatgagatgggcgtgaagaaaattcgcttcccggaacattgcggcatcggcatcaagccgtgctctgaagaaggcaccaaacgcctggtgcgcgccgcgattgaatacgcgatcaccaacgatcgtgattccgtcactctggtgcacaaaggcaacatcatgaagttcaccgaaggcgcgttcaaagactggggctaccagctggctcgcgaagagttcggcggcgagctgatcgacggcggtccgtgggtgaaaatcaagaacccgaacaccggcaaagagatcgtggtgaaagacgtgatcgccgatgcgttcctgcagcagatcctgctgcgtccggcggaatacgacgttatcgcctgtatgaacctgaacggcgactatatctctgacgccctggcggcgcaggttggcggtatcggtatcgccccgggcgccaacatcggtgacgagtgcgcgctgttcgaagcgactcacggtactgcgccgaagtatgccggccaggacaaagtgaacccgggctccatcatcctgtcc

SEQ ID NO: 23240 - DNA, 1371 bp, Klebsiella pneumoniae
atggaattatcctcactgaccgccgtttcccctgtagacggccgctacggcgataaagtcagcgcgctgcgcggtatcttcagcgaattcggtttgctgaaatgtccgcgttcaggtggaagtacgttggctgcaaaaactggccgcccacgcagcgatcaaggaagttcctgcttttgctgccgacgcaaacggtttccttgataaaatcgtcgccgatttcagcgttgaagacgcggagcgcatcaaaccatcgagcgcaccactaaccacgacgtgaaagcggtagagtatttcctgaaagaaaaagtcgctgacgtcgccgagctgcacgcggtatcagagtttattcacttcgcctgtacgtctgaagacatcaataacctctcccacgcgctgatgctgaaaaccgcccgcgacgaagtggttctgccttactggcgcaaactgattgacgcggtaaaagatctggcgacccagtaccgcgatgtgccgctgctctcccgtacccacggccagccggcaacgccgtccaccatgggtaaagagatggcgaacgtcgcctaccgtatggaacggcagtatcgtcagctgaaccaggtggaaatcctcggtaaaatcaacggcgcggtgggtaactacaacgcccacatcgccgcctacccggaagtcgactggcatcagttcagcgaagagttcgttacctcgctgggtattcagtggaacccgtacaccacgcagatcgagccgcatgactatatcgctgagctgtttgactgcatcgcgcgcttcaacaccattctgatcgacttcgatcgcgacgtgtggggctacatcgcgctcaaccacttcaaacagaagaccatcgccggggaaatcggctcctccaccatgccgcacaaggtgaacccgattgacttcgaaaactccgaaggcaacctcggcctggccaatgcggtcatgcagcacctggccagcaaactgccggtttcccgctggcagcgcgacctgaccgactccaccgttctgcgtaacctcggcgtgggcatcggctatgcgctgatcgcctatcagtccaccctcaaagggatcagcaagctggagcttaaccaggatcgcctgctggacgaactggatcacaactgggaagtactggctgagccgatccagaccgtgatgcgtcgttacggtatcgaaaaaccttacgagaagctgaaagagctgacccgcggcaaacgcgtggacgcggaagggatgaagcagtttattgacagcctcgccctgccggaagaggaaaaagtgcgtctcaaagcgatgaccccggccaactatatcggtcgggcaaccaccatggttgacgagctgaagtaa

SEQ ID NO: 23241 - DNA, 1164 bp, Klebsiella pneumoniae
atgaacggtgagcgcgtgctagaatacgccgcctcgaagttcaatgtagcgagtatttccatgtcagaaagccagaaaaaagtgatcgtcggcatgtccggcggcgtcgactcctcggtctccgcgtacctgctgctgcagcaagggtataaggtggaaggcctgttcatgaagaactgggaggaagacgacggcgaggaatactgcaccgccgccgccgaccttgccgatgcgcaagcggtctgcgataagctgggcattgaactgcacaccgttaactttgccgccgaatattgggataacgtctttgagctcttcctggaagagtacaaagccggccgcacgccgaacccggatattctgtgcaataaagagatcaaatttaaagccttcctcgagtttgctgccgaagacctcggcgccgactacatcgccaccgggcactatgtgcgccgcgccgatgtcgacggtaaaagccagctgctgcgcggcctcgacggcaacaaagatcagagctacttcctctacacccttagccacgagcagattgcccagagcctgttcccggtgggtgagctggaaaaaccgcaggtgcgtaagatcgccgaagagctggatctgatcaccgcgaagaaaaaagattccaccggcatctgctttatcggcgagcgtaaattccgcgatttccttggccgctatctgccggcgcagccgggcaaaatcctcaccgtcgacggcgaggagatcggtactcatcaggggctgatgtaccacaccctgggccagcgtaaagggctgggtatcggcggcaccaaagagggtagcgaagatccatggtacgtggtcgataaagacgttgagaataatattcttatcgtcgcccagggccatgaccacccgcgcctgatgtccgtcggtctgattgcccaacagctgcactgggtaaaccgtgaaccgctgcagggcaccctgcgctgcacggtgaaaacccgctatcgccagaccgatatcccctgcaccgttaccgcgctggatgaagaccgtatcgaagtccgcttcgatgagccggtcgcggcggtgaccccggggcagtccgcagtgttctatttaggggaagtgtgcctcggcggcggaattattgaacaacgactgcctctgcagtcc

SEQ ID NO: 23242 - DNA, 1400 bp, Klebsiella pneumoniae
gtgtcactttcgctttggcagcaggtcttgcccgattgcaggatgagttaccagccacagaattcagcatgtggatccgcccattgcaggcggaactgagcgataacacgctggcactgtatgcgccaaaccgttttgtgctcgactgggtaagggacaaatacctcaataatatcaatggactcctcaatgatttttgcggtgcggacgccccgcagctgcgttttgaggtgggcgctaagcccgccagctcgctgcagaaaggggcggtaagcccggctgcggcggccattccggcggcgcaggtgcagaccgcgcgcgcggcgccgacgatcgtgcgccctggctgggataatgtcccggcgccggcggagccgacctaccgctctaacgttaacgtgaaacacacgtttgataacttcgtcgaaggtaaatctaaccagctggcccgcgcggcggcgcgtcaggtggcggataacccgggcggcgcctacaaccccctgttcctctatggcgggacgggtctgggtaaaactcacctgctgcacgcggtgggcaacggcattgtggcgcgtaagccgaacgcgaaagtggtctatatgcactccgagcgtttcgttcaggacatggttaaagcgctgcagaacaacgccatcgaagagtttaagcgttactaccgctccgttgacgccctgctgatcgatgacattcagttctttgccaataaagaacgatcccaggaagagtttttccacaccttcaatgcgcttctggaaggtaatcagcagatcatcctgacgtcggatcgttatccaaaagagatcaacggcgttgaggatcgtctaaaatcccgcttcggctgggggctgacggtggcgatcgagccgccggagctggaaacccgcgtcgcgatcctgatgaaaaaagccgacgagaacgacatccgcctgccgggcgaagtggcgttctttattgccaagcgtctgcgctcgaacgtgcgtgagctggagggggcgctgaatcgcgttatcgccaacgccaacttcactggccgggcgatcaccatcgatttcgtgcgcgaagcgctgcgcgatctgctggcgctgcaggaaaaactggtcaccatcgacaatattcaaaagacggtggcggagtactacaagattaaggtagcggatctgctgtccaaacgccgctcccgttcggtggcgcgtcctcgccagatggcgatggcgctggccaaagagctgaccaaccacagcctgccggaaatcggcgatgcgtttggcggccgagaccataccaccgtgctgcacgcctgccgcaagattgagcagctgcgtgaagaaagccacgacattaaagaagatttttccaatttaatcagaacattatcctcg

SEQ ID NO: 23243 - DNA, 1098 bp, Klebsiella pneumoniae
atgaaatttaccgtagaacgtgaacatttattaaaaccgctgcaacaggtgagcggtccgttaggtggtcgtccgacgctgcccattctcggtaacctgctgcttcaggtcgcggacggcgcgctgtcgctgaccggtaccgatcttgaaatggagatggtggcgcgcgtggcgctggttcagccgcacgaagcgggcgcaacgaccgttccggcacggaaattctttgatatctgccgcggcctgccggaaggcgcggagatcgcggttcagttggaaggcgatcgcatgctggtgcgttccggccgcagccgcttctcgctgtcgaccctgcccgccgccgatttcccgaatctggatgactggcagagtgaagtggagtttaccctgccgcaggcgaccatgaagcgtctgatcgaagccacccagttctcgatggcgcaccaggatgttcgttactacttaaacggcatgctgtttgaaaccgaaggcagcgaactgcgcacggtggccaccgatggtcaccgcctggcggtctgttcgatgccgctggaagcgtcgctgccgaaccattcggtgatcgtgccgcgtaaaggggtgattgagctgatgcggatgctcgacggcggcgataccccgctgcgcgtgcagataggcagcaacaatatccgcgcccacgttggcgattttatcttcacctctaagctggttgatggccgtttcccggattatcgccgcgtattgccgaaaaatccggataaacacctcgaagcgggctgcgatattctgaagcaggcttttgcgcgcgcggcgattctctccaacgagaaattccgcggcgtgcggctgtacgttagcgaaaaccagctgaaaatcaccgccaataacccggaacaggaagaagcggaagagattctggatgtgacctacgccggaacggagatggagattggcttcaacgttagctatgtgctggatgtgctgaatgcgctgaagtgcgagaatgtacgcattctgctgacggattcggtgtcgagcgtgcagattgaggatgcggcctctcaatccgcagcctacgttgtcatgcctatgagattg

SEQ ID NO: 23244 - DNA, 1258 bp, Klebsiella pneumoniae
gaagttatcatgaccgtcctgcacgctggcggtaaattcgatgataactcctataaagtttccggcggtctgcacggcgtaggcgtctcggtggttaacgccctgtcgcagaagctggagctggttatccagcgcgataacaaagttcacaagcagatgtacgaacacggtgtgccacaggcaccgctggccgtgactggcgaaaccgacaaaaccggcaccatggtgcgtttctggccaagcctggaaaccttcaccaatgtcaccgaatttgaatatgacatcctggcgaaacgcctgcgcgagctgtcgttcctgaactccggcgtctctatccgcctgcgcgataagcgcgacggcaaagaagaccatttccactacgaaggcggcatcaaggcgttcgttgagtatctcaacaagaacaaaacgccgatccacccgaatattttctatttctccaccgaaaaagacggtatcggcgtggaagtggccctgcagtggaacgacggcttccaggaaaacatctactgctttaccaacaacattccgcagcgtgacggcggtactcacctcgccggcttccgcgcggcgatgacccgtactcttaacgcctatatggacaaagagggctatagcaaaaaagcgaaagtcagcgccaccggcgacgatgcgcgtgaaggcctgattgccgtggtatccgtgaaggtgccggatccgaaattctcctcgcagaccaaagacaagctggtctcctccgaggtgaaatcggcggtggagcagcagatgaacgaactgctgagcgaatacctgctggaaaatccatccgatgcgaaaatcgtggtcggcaaaattattgacgccgcgcgcgcccgtgaggccgcacgtcgcgctcgtgagatgactcgtcgtaaaggcgcgctggatctggcaggcctgccgggcaaactggcggattgccaggagcgcgacccggcgctgtccgaactgtacctggtggaaggggactccgcgggcggctctgctaaacagggtcgtaaccgcaagaaccaggcgatcctgccgctgaagggtaaaatccttaacgttgagaaagcccgcttcgataaaatgctctcttcccaggaagtggcgacgctgatcaccgcgctgggctgcggtatcggtcgcgatgagtacaatccggataaactgcgttatcacagcatcatcatcatgaccgatgcggacgtcgacggctcgcacattcgtaccctgctgt

SEQ ID NO: 23245 - DNA, 1903 bp, Klebsiella pneumoniae
atgattgttttctcctcgttacaaattcgtcgcggcgtacgcgtcctgctggacaacgccaccgctaccatcaatcctggccaaaaggtcggtctggtggggaaaaacggctgcgggaaatcgacgctgctatcgcattttgaaaaacgagataagcgctgacggcggcagtatgacctttcccggcaactggcagctggcctgggtgaatcaggaaaccccggcgctaccgcagccggcaatcgattatgtcattgacggcgatcgagagtatcgccagctggaggccgcgctccagcaggctaacgaacgcaacgacggtcatgctatcgccaccgtccacggtaagctggacgccatcgacgcctggacgatccgttcgcgcgccgccagcctgctgcacggtctgggtttcagcaatgaacagcttgagcggccggtcagcgatttttccggcggctggcgtatgcgccttaacctcgcccaggcgctgatctgccgctccgatctgctgctgctcgatgaaccgactaaccacctcgatctcgatgcggtgatctggctggagaagtggctgaagggctatacgggaacgctgatcctcatctcccacgatcgcgattttctcgatcctatcgtcgacaaaattatccatatcgaacagcagacaatgtttgagtacaccggcaactacagttcgtttgaagtgcagcgcgccacccgcctcgctcagcagcaggcgatgtacgaaagccagcagcagcgcgtcgcgcacctgcaaagctatatcgatcgcttccgtgccaaagccaccaaggccaagcaggcgcaaagccggatcaaaatgctggagcggatggagcttatcgctccggcgcacgtggataacccgttccacttcagcttccgccagccggagagcttgcctaacccgctgctgaagatggagaaagtcagcgccggctacggcgagcgtattattctcgactccatcaagcttaacctggtgccgggctcgcgtatcggcctgctgggccgcaacggcgccgggaagtcgacgctgattaagctcctggcaggcgagctccagcccgtaagcggcgagatcggcctcgcgaaaggcatcaagctcggctacttcgcccagcatcagctggaattcctgcgcgccgatgagtcgccgctgcagcacctggcgcgtctggcgccgcaggagctggagcagaagctgcgtgattatctcggcggctttggtttccagggcgataaggtgagcgaagaaacccgccgcttctccggtggagaaaaggcgcgcctggtactggccctgatcgtctggcagcgccctaacctgctgctgctcgatgaaccgaccaaccaccttgacctcgatatgcgtcaggccttaaccgaagcgctgatcgactttgaaggggcgctggtggtcgtatcgcacgatcggcacctgatccgttccaccactgacgatctgtacctcgtccacgatggtaaagtcgagccgttcgacggcgatctggaagattatcagcagtggctcagcgactcgcaaaaacaggagtcccagagcggcgaggcgccaaaagagagcggcaatagcgcccaggcgcgcaaagaccagaagcgtcgggaagcggagctgcgcagccagacccaaccgctgcgcaaagagatcgcccgtctggaaaaagagatggacaagctcaacgcgcagttggccagtgcggaagaaaaacttggcgacagtgagctttatgacgcctcacgtaaagccgagctgaccgaatgcctgcagcagcaggccagcgcgaagttcgggctggaggagtgcgagatggcctggctggaggcccaggagcagctggagcgcatgcttcaggaaggc

SEQ ID NO: 23246 - DNA, 1567 bp, Klebsiella pneumoniae
accctgaaagatacgctggtcgcccgccgactggcactgaacccatggacgggattctactttttacagtcgctgttaattaacctggcgctgggctatgaatttagcctgctttataccgtggcatttacctgcgtgttacatctgctgtggcgcgcctttccgcgcgtccagaaagcggtggtcggcgcctattccctgctggcggctctgtactatccctttggccaggcctacggtgcccccaacttcaacactctgctggcgctgcacgccaccaacgtggaagagtctacggaaatcctgaccatcttcccgtggtacaactatctgctggcggtcttcatcttcgctctcggggtcattgcggttcgtcgtaggatcgttgagccatcacgctggggaaaaatggatacgctgggcctgttgttcagcatcgggatcttctttctccagccggtgcaaaaccttgcctggggcggtgtattcaaggtgattgacaccggttatccggcctttcgttttgtcaaagacgtggtggtgaataacaacgaggtgctggacgaacaggcccggatggcgcagctggctggcatgaaagacagctggcacgtgctggcggtaaagccaaaataccatctctatgtggtggtgatcggtgaaagcgcgcgccgcgatgccctcggcgctttcggtggccattgggacaacacgccgtttgccagctcggtaaacggttatctgtttaacaactacatcgccgccagcggctcaacgcagaaatcgctcggcctgacgcttaaccgggtggtcgatggcaaaccacagtatcaggataactttgtcaccctcgccaaccgcgccggtttccagacctggtggttctccaaaccaggggcaaattggcgagtacgacaccgctatcgccagcatcgccaaacgggcggatgaagtacagttcctgaaaaacggcgatttcgaagccaataaaaacacccaggacgagcagttgctgaagctgaccgagcaggtgctctcaacccagcgtacccagccgcagctgattgtcctgcacctgatgggctctcacccacaggcctgcgatcggaccaagggcaaatacacggttttcgttcagtcgaaagagacctcatgctacctctacagcatgacgcagaccgattcgctgctggctaagctttatcatcagttgcaaaattccggtgacactttttccctgacctatttttccgatcatggtctggcgttcaaggagcggggcaagaggtgcagtatctggcgcatgacgataagttccagcagaacttccaggtgccgtttatggtgctatccagcgatgacaagcgcataaagtgattaaggcgcagcgttcggcgaatgatttcctcagtttcttctcccagtggaccgggatccaggcgacggaaatcaccccacgctatcggtttatctctgaacaaaggccggtccggtgtacatcaccaacttccagctgcagaaggtggactacgctcacctcggtaccgatgagttcacagtcaattaa

SEQ ID NO: 23247 - DNA, 1320 bp, Klebsiella pneumoniae
atgcagacctatttcgatcaactcgatcgcgttcgttacgaaggcccgaaatccactaacccgctggctttccgtcattacaacccggatgaactggtgctgggcaaacggatggaagatcatctgcgttttgcggcctgttactggcacaccttctgctggaatggcgccgatatgtttggcgtgggctcctttgatcgtccctggcagcagcctggcgacgccctggagatggccaaacgcaaagccgatgtggcgttcgaattcttccataaactcaacgtgccttactactgcttccacgacgttgacgtctcgccggaaggcgcttcgctcaaggagtacagcaataacttcgcccggatggtcgaggtgctggctgagaaacagcagcagagcggcgtgaagcttctgtgggggaccgcaaactgctttaccaacccgcgctacggcgccggcgcggccaccaacccggatccggaagtatttagctgggcggccacccaggtggtcaccgccatgaatgccacccatcaactgggcggtgaaaactatgtgctgtggggcggtcgcgagggctatgaaaccctgctgaataccgacctgcgccaggagcgtgagcagattggccgctttatgcagctggtggtggagcataagcataaaatcggctttaaaggcacgctgctgattgagcccaaaccgcaggagccgaccaagcatcagtatgactatgatgcctctaccgtttacggcttcctcaaacagtttggtctggaaaaagagattaaactgaatattgaagctaaccatgccacgctcgccggccattcgttccatcatgaaattgcgacggccattgcgctggggctgttcggctccgttgacgccaaccgcggcgatccgcagctgggctgggataccgaccagttcccgaacagcgtcgaagagaacgcgctggtgatgtatgaaatcctcaaagcgggcggcttcaccaccggcgggctcaactttgatgcgaaagtgcgccggcagagcaccgacaaatacgatctgttctatggtcatattggcgcgatggataccatggcgctatcgctgaaggtcgcggcgcggatgatcgaggacggcgaactggataagcgcgtggccagacgctacgccggctggaacggtgagctggggcagcagatccttaacgggcagatgaccctgagcgatattgcccagtatgccgctcagcatcagctggcgccgcagcatcgcagcggccagcaggaacaactggaaaacctggtcaaccattatctgtttgacaag

SEQ ID NO: 23248 - DNA, 432 bp, Klebsiella pneumoniae
gtgctgggcagagccattggcaccctggacaccgataaaaaatggctaacaccgctctgcgccgcgctgttcatcgccgccgtgtgggtcatttcccgcggcacgctgcatgagctgcgctggcgcggagacttcggcgacacctggtatctctactgcggaccggcggtgtttgtttgcgcggtcaccctgctgacgctggccaaaaactggcttaacgcgcgtcccctgcccggtatcgcctgcattgcgcgacattcgctggggatctacggctttcatgccctgatagtgcatgcgctgcgcgccagccatctggagctatcccgctggccgctgctggatattgtgtggatatttagcgccgccctgctcggcagcctgctgctgtcaggcctggtgcagcggattgatagccgccggctggtcagc

SEQ ID NO: 23249 - DNA, 1662 bp, Klebsiella pneumoniae
atgtgttctatttttggcgtactggatattaaaactgacgcaggcgagctgcgtaaaaaggcgctggagctttcccgcctgatgcgccaccgcggtccggactggtctggcgtatatgccagcgacaaagcgattctggcgcacgagcgcctgtcgattgtcgacgtcaacgccggggcccagccgctgtacaacgccgaaaaaacccatgcgctggccgttaacggcgagatctacaaccaccaggcgctgcgcgcggagtatggcgatcgctaccagttccagaccggttccgactgcgaagtgatcctcgcgctgtatcaggaaaaaggcccggagttcctcgacgacctgcagggaatgttcgccttcgccctgtacgacagcgaaaaagacgcgtacttaattggccgcgaccatatcggcattatcccgctgtatatgggccatgacgaacacggcaacttctatgtcgcctccgaaatgaaagcgctagtgccggtatgccgcaccattaaagagttcccggcgggcagctacctgtggagcaaagacggcgaaattcgccagtactatcagcgcgactggtttgattacgacgcggtgaaagacaacgttaccgataagaacgagctgcgccaggcgctggaagagtcggtgaaaagccacctgatgtccgacgtgccttacggcgtgctgctctccggcggtcttgattcatcggtcatctcggctatcaccaagaaattcgccgcccgtcgcgtcgaagatcaggagcgtagcgaagcctggtggccgcagctgcactctttcgcggtcggtctggaaggctctcctgacctgaaagcggcgcaggaggtggccaaccacctcggcaccgtgcaccacgaaattcactttaccgtccaggaagggctggatgccatccgcgacgttatctatcacatcgaaacctacgatgtgaccactattcgcgcctcgacgccgatgtacctgatgtcgcggaaaattaaagccatgggcatcaaaatggtgctttccggcgaaggttcggacgaagtgttcggcggctacctctacttccataaggcgccgaacgccaaagaactgcacgaagagacggtgcgtaagctgcaggcgctgcatatgtttgactgcgcccgcgccaacaaagcgatgtccgcctggggcgtggaggcccgcgtgccgttcctcgacaagaagttcctcgacgtcgcgatgcgcattaacccgcaggataagatgtgcggcaacggcaaaatggaaaaacacattctgcgcgaatgctttgaatcctacctgccggccagcgtcgcctggcgccagaaggagcagttctctgacggcgtcggctacagctggatcgataccctgaaagaagtggccgccaaacagatcagcgaccagcaactggaaaccgcaagcttccgcttcccgtacaacacgccgacctccaaagaaggctatttgtaccgcgagatcttcgaagagctgttcccgctgccgagcgcggcggagtgcgtccctggcggtccgtcggtggcctgctcttcagcgaaagccattgagtgggatgaagcgttcaaaaccatgaacgatccatcaggccgcgcggtcggtgtccaccagtcggcctacaaa

SEQ ID NO: 23250 - DNA, 1218 bp, Klebsiella pneumoniae
atgacagcaggcggacaagctcaaattggtaacgttgacctcgtaaaacaactgaacagcgcggccgtgtaccgcctgattgaccagcatgggcccatctcgcgcattcagatagccgaacaaagccagcttgcccctgccagcgtgaccaaaatcacgcgtcagcttattgagcgcggcctgatcaaagaagtcgatcagcaggcctccaccggtggccgccgcgctatctctatcatcgcagaaacccgcagcttcaacgccatcggcgtgcggcttggccgctatgacgccactctgaccctgtatgatttaagcagcaagaccctggaagaggagcacttcccgctgcccgagcgcacccaggaaacgctggaacacgccctgctgaatatcatcgccacctttatcgaaaactgtcagcgcaaaattcgcgagctgatcgctatctcagtgatcctgccgggcctcgtcgacccggaaagcggcgtgatccgctatatgccgcatattgcggtggaaaactggggcctggtcggggcgctggagaaacgcttcaacgttacctgctttgttggccacgatatccgcagcctggcgctggccgagcactattttggcgcaagccaggattgcgaagactccattctggtgcgcgtgcaccgcggtaccggggcggggattatctccaacgggcgcatttttatcggccgcaacggcaacgttggcgaaattggccatattcaggtcgacccgctgggcgaacgctgccactgcggcaacttcggctgtctggagaccgtcgcggccaatgccgccattgaacagcgggttcgccacctgctggagcagggctaccagagccgtctgacgccggatgactgcacgatcaaaactatctgcaaagcggccaacaagggcgatgccctggcctgcgaggtgattgagtacgtggggcgccacctcgggaaaacgatcgccatcgccattaacctgttcaacccacaaaaaatcgtcgtcgccggcgaaatagtggaagctgaaaaggtccttcttccggccatcgaaggctgcattaacgcccaggcgcttaaggcgtttcgtaagaacctgccggtggtgcgctccaccctcgatcaccgctctgcaatcggcgccttcgcgctggtcaaacgcgccatgcttaatggcacgctgctgcagcgtttgcttgagagc

SEQ ID NO: 23251 - DNA, 1146 bp, Klebsiella pneumoniae
atgtatgcattaacccagggccgggtttataccggtcatgaaattctcgatgaccatgcggttgttatcgctgatggctttatcgaacgtctttgtccgctggcagatttgccgtctgacatcgagcagcgctcagtcaacggcgcaataatcgcccccggttttatcgacgtccagctcaacggctgcggcggcgttcagtttaacgacagcccagaggcggtcactgtcgaaacgctggagatcatgcagaaggccaacgaacgctcaggctgcaccagcttcctgccgacgctgattacctccagcgacgatctgatgaagcaaggcgtgcgcgtgatgcgcgaatatctgcaaaaacatccgaaccaggcgctgggcctgcatctcgaagggccgtggctgaatatcgttaagaaaggcacccacaatccggactacgtgcgtaaaccggacgcggcgctggtcgatttcctgtgcgacaacgccgatgtgatcaccaaagtgaccctcgcccctgagcgcgttgagccagaagtgatccgcaaactggtcgccgccgggatcgttgtctccgcgggccactccaacgctacgctgaaagaggcgaaagtcggcttccgcgcgggcattaccttcgccacccacctgtataatgcgatgccgtacattaccggccgcgaaccgggtcttgccggggcgatttttgacgagccggatgtctactgcggtatcatcgtcgacgggatgcacgtcgattacgccaacgtgcgcaacgccaagcgcctgaaaggcgacaagctgtgcctggtcaccgacgccaccgcgccggcgggggcgaatattgaccagttcatttttgccgggaaaacaatatactaccgcaatgggctgtgcgtagatgaaaacggcaccctcagcggatcttcgctgaccatgattgaaggggtgcgtaatctggttgagcattgcggcgtggcactggacgaagtattgcgcatggcgacgctctatcctgcgcgcgctatcggcgtggacaagcagctcggcagcattgcgccgggcatggtcgctaacctgaccgcctttacacgcgattataaaatcaccaagaccatcgttaatggtaacgaggtcgtcactgag

SEQ ID NO: 23252 - DNA, 798 bp, Klebsiella pneumoniae
atgagactgattcccctggtaaccgctgagcaggtcggtaaatgggctgcccgccatatcgttaaccgcattaatgcatttaaaccaaccgcggaccgtccgttcgtcctgggtctgccaaccggtggtaccccgctgaccgcctacaaggcgctggttgaaatgcataaagcaggccaggttagcttcaagcacgtcgtcacctttaacatggatgaatacgttggcctgccgaaagagcatccggaaagctatcatagctttatgcaccgtaatttctttgaccacgttgatattccggcagaaaatatcaacctgctgaatggtaacgcgccggacatcgatgcggaatgccatcgctatgaagaaaaaattcgttcctacggtaaaatccacctgttcatgggcggcgtgggcaacgatggtcatatcgcgtttaacgaaccggcctcttctctggcgtcccgcacccgtattaagaccctgacccatgaaacccgcgtagcgaactcccgcttcttcgacggcgatgtggatctggtgccgaaatatgcgctgaccgtcggtgtgggcaccctgctggacgcagaagaagtgatgattctggtgctgggtcatcagaaagcgctggcgctgcaggcggcggtagaaggtaacgtcaaccacatgtggaccattacctgtctgcagctgcatccgaaggcggtgatcgtctgcgacgaaccgtccaccatggagctgaaagtgaagacgctgaaatatttcaacgaattagaagctgaaaatattaaaggtctg

SEQ ID NO: 23253 - DNA, 1953 bp, Klebsiella pneumoniae
atgaatattttaggtttctttcagcgactgggtagggcgttgcagctccctatcgcagtgctgccggtcgcggcattgctgctgcgtttcgggcaaccagacctgttgaatgtacccttcatcgcgcaagcgggtggggcgatcttcgataatctggcgctgatcttcgcaattggtgtggcatcaagctggtctaaggataacgccggttctgcggcgctggccggtgcggtagggtatttcgtgatgaccaaagcgatggtcaccatcaacccggaaatcaatatgggcgtgctggccggtatcattaccggtctggtggcaggggcggtatacaaccgctgggccggcatcaagctgccggacttcctgagcttcttcggcggcaaacgcttcgtgccgatcgccaccggcttcttctgtctgatcctcgcggcgatcttcggctacgtctggccgccggtgcagcacgctatccactctggcggcgaatggatcgtctccgcaggggcgctgggttccggtatctttggtttcatcaaccgtctgctgatcccaaccggtctgcatcaggtgctgaacaccatcgcctggttccagattggtgagttcactaacgccgctggcgctgtgttccacggcgacatcaaccgcttctacgccggcgacggcaccgcggggatgttcatgtccggcttcttcccaatcatgatgtttggtctgccgggtgcggcgctggcgatgtatctggcggcgccgaaagcgcgtcgtccgatggtaggcggtatgctgctgtccgtggccatcaccgcgttcctgaccggggtaaccgagccgctggaattcctgttcatgttcctggctccgctgctgtacctcctgcatgcggtgctgaccggtatcagcctgttcatcgcaacggcgctcgggatccatgcgggcttctccttctccgcaggtgcaattgactacgtgctgatgtacagcctgccggccgccagcaaaaacgtctggatgctgctggtgatgggcgtggtgttcttcttcgtctacttcctgctgttcagcgcggtgatccgcatgttcaacctgaaaacgccgggtcgtgaagacaaagccgctgacgtggtaacggaagaagccaacagcaacactgaagaggggctgacccagctggcgaccagctatatcgccgcggtgggcggaacggacaacctgaaagccattgacgcctgtatcacccgtctgcgtctgaccgtgggcgattcggcgaaggtgaacgacgccgcctgtaaacgtctcggcgcgtccggggtggtgaaactgaataagcaaaccatccaggttatcgtcggtgcgaaagcagagtctatcggcgatgagatgaaaaaagtggttacccgcggcccggtagcggcagcggcagccgcaccggctggcaacgtcgccaccgcagcgcccgcggctaaaccgcaggcggtagcgaacgcgaagaccgttgagtcgctggtttcgccgattaccggtgacgtggtggccctcgagcaggtgccggacgaagccttcgccagcaaagccgtcggcgacgggatcgcggtgaaaccgaccagcaacatcgtggtggccccggccgccggtaccgtggtgaaaattttcaacactaaccacgcgttctgcctcgaaaccaacaacggtgcggaaatcgtcgttcacatgggtatcgacaccgtggcgctggagggcaagggcttcaaacgtctggttgaagagggcacggacgtgaaggcgggtgagccgattctggaaatggatctggacttcctcaacgccaacgcgcgctcaatgatcagtccggtcgtctgcagcaacagcgatgactacagcgcgctggtgatactggcgagcggtaaggtcgttgctggccagacgccgctgtatgagattaaaggcaag

SEQ ID NO: 23254 - DNA, 2055 bp, Klebsiella pneumoniae
atgaataaatttgcacctttacatccgaaggttagtacgctgctgcatggcgcggattataatccggagcaatgggagaatgaccccgatattattgataaagacattgccatgatgcagcaggcaaaatgcaatgtgatgtcggtgggaatatttagctgggcgaaactggagccacgcgaaggggtatttaatttcgcctggctggatattatcctcgataaactgtatgccgccggcattcatgtctttctggccacgccgagcggcgcgcgtccggcgtggatgtcgcagcgctatccgcaggttctgcgggtggggcgcgatcgggtgccggccctgcacggcggccgtcacaaccactgtatgtcgtcaccggtctatcgcgagaaaaccctgcaaatcaataccctgctggcagaacgttattcctcacacccggcggtgctgggctggcatatttccaacgaatatggcggtgaatgccattgcgatctctgccagaaccgttttcgcgactggctgaaggcgcgttaccagaccctggagaacctcaaccaggcctggtggagtaccttctggagtcatacctatactgactggtcgcagattgaatcgcctgcgccgcagggcgagatgtcgatccacggtctcaatcttgactggcatcgctttaacaccgctcaggtgaccgatttctgccgccatgaaattgctccgctgaaggcggcgaatgcctccctgccggtgactaccaactttatggagtatttctacgattacgactactggcagctggcggaggcgctggatttcatctcctgggacagctatccgatgtggcaccgcgataaagacgaaaccgcgctggcctgttacaccgcgatgtatcacgacatgatgcgcagcctgaagggcggcaaaccgtttgtgctgatggagtccaccccgggcgccaccaactggcagccgaccagcaaactgaagaagccgggaatgcatattctttcctcgctacaggcggtggcgcatggcgccgactcggtgcagtatttccagtggcggaaaagccgcggttcggttgagaaatttcacggcgcagttgtcgaccacgtcggacatattgatacccgcattggccgcgaagtctgccagctcggcgagatcctcagcaagctgccggaggtgaggggctgtcgcaccgaggcgaaagtagcgattatcttcgaccagcagaaccgctgggcgctggatgacgcccaggggccgcgtaatcttgggatggaatatgagaagacggtcaacgagcactaccgcccgttctgggagcagggcatcgccgtcgatgtgattgacgccgatgtcgatttaacgccgtatcagttagtgattgccccgatgttatatatggtgcgcgacggctttgccggtcgggcggaggcgtttgtcgccaacggcggccacctggtgaccacctactggaccggtatcgtcaatgagtccgatctctgctatctcggcggcttcccgggcccgctgcgcaatctgctggggatctgggcggaagagatcgactgcctgaatgacggcgagtttaatctggtgcaggggcttgccgggaatcagtgcggtctgcagggcccttatcaggtgcgccatctctgcgaactgatccatatcgagagcgcccaggcgctggccacctaccgggatgatttttatgccggacggccggctgtgacggtgaacgcgttcgggaaaggcaaagcctggcatgtggcctcccgcaacgatttagccttccagcgcgatttctttaccgccctgagcaaggagctggccctgccgcgggcgatagcgacggagttaccacccggcgtggtggcgactgcgcgcaccgacggtgacaacgcatttatcttcctgcagaactacagcgcgcaaaaccataccctgaccctgccacaagggtatcgggattgcctgaccgacgcggcggtatcggctccactgaccctgtcggcatgggattgccgtattctccgtcgtcacgcg

SEQ ID NO: 23255 - DNA, 807 bp, Klebsiella pneumoniae
atggtcgaaacattgctggaagttcgccaactcagtaagacctttcgctaccgcaccggctggtttcaccgtcagacggttgaggcggttaaaccgctgagttttaccctgcgcgaacggcagacgctggcgattatcggcgagaacggctccgggaagtcgaccctcgcgaagatgctggcgggcatggtggaacccaccagcggcgaattgctgattgacgatcatccgctgacttttggggattactcctaccgcagtcagaagattcgcatgatctttcaggatccgtcgacctcgctgaacccgcgtcagcgcatctcgcagatcctcgattttccgctgcgactgaataccgatctcgacgccgaggcgcggcagaagcagataatcgacaccctgcgcatggtcggtctgctgccggaccacgtcagctactaccctcatatgctggcgcccggtcagaagcagcgtctcggcctcgccagggcgctgatcctgcgcccgaaggttatcgtctgcgatgaggcgctggcctcgctggatatgtcgatgcgctcccagcttatcaacctgatgctggagctgcaggagaaacagggcatctcctatatctatgtcactcagcacctgggaatgatgaaacacatcagcgatcaggtgctggtgatgcataacggcgaagtggtcgagcgcggcagcactgccgatgtgctggcctcgccgctgcacgacctgacccggcgcctgatcgccggccacttcggggaagccctcaccgccgacgcctggcgcaaagacgggaaa

SEQ ID NO: 23256 - DNA, 2571 bp, Klebsiella pneumoniae
atgcgtctggatcgtcttaccaataaattccagcttgctcttgccgatgcccagtcgctcgcactcgggcacgacaaccaattcatcgaacctcttcatttaatgagcgccttgctgaatcaggaagggggatcggtacgtcctttattaacctcggcgggcgtgaatgccgggaaactgcgcactgacatcgaacaggccttgagccgtttaccgcaggtggaaggcaccggcggcgatgtgcaaccttctcaggatttagtgcggatcctcaacctttgcgacaagctggcgcaaaagaaaaaggacaactttatttcgtcggaactgttcgttctggcggcgcttgaatcacgcggtacgctgaccgaccttttaaaatccgccggagcaacaaccgccaacgtgactcaggcgattgaacaaatgcgcggaggggaaagcgtgaacgatcagggtgccgaagaccaacgtcaggcattgaagaaatttaccgtcgatctgaccgagcgagccgagcagggcaagctggatccggtgatcggccgtgatgaagagattcgccgtaccattcaggtactgcagcgtcgtaccaaaaacaacccggtgctgatcggtgaacccggggtgggtaaaacggcaatcgtcgaaggcctggcgcagcgtatcgtcaacggcgaagtaccagaagggctgaaaggccgtcgggtattggcgctggatatgggggcgctggtggccggggcgaaataccgcggtgagtttgaagagcgtctgaaaggcgtgctgaccgacctgtcaaaacaggaaggtaacgtcattctgtttatcgacgaactgcataccatggttggcgctggtaaagccgacggcgcgatggatgcgggtaacatgctgaagccggcgctggcgcgtggtgaactgcactgcgtcggggcgacgacgcttgatgaataccgtcagtacatcgaaaaagacgccgcgctggaacgtcgcttccagaaagtgttcgtcgccgagccttcggtagaagataccatcgcgattctgcgcggtctgaaagaacgttatgagctgcaccaccacgtgcagatcactgacccggctatcgtggcggcggcgaccttatcgcatcgctatattgccgaccgtcagctgccggataaagccatcgacctcatcgatgaggcggcatccagcatccgtatgcagattgactccaaaccggaagagctggaccgcctcgatcggcgtattatccagctgaaactggaacagcaggcgctgaagaaagagtctgatgaggcgagcctgaagcgtctcgatatgctcaacgaggagctggcggataaagaacggcagtattcggtgctggaagaagagtggaaagcggaaaaagcgtcgctctccggtacccagaccatcaaagctgagctggagcaggcgaaaatcgccatcgaacaggcgcgtcgtgtcggcgatctggcgcggatgtccgagctgcagtacggcaaaattccggaactggagaaacagctggcggcggccacgcaggccgaagggaaaaccatgcgtctgctgcgtaataaagtgactgatgctgaaatcgccgaagtgctggcccgctggaccggtatcccggtctcccgcatgatggaaagcgagcgtgacaaactgctgcgtatggagcaggagctgcatcatcgggtgattggccaggatgaggcggttgaagcggtatccaacgccattcgccgcagccgcgccgggctgtccgatccgaaccggccgattggttcgttcctgttcctcggtccaaccggggtcggtaaaaccgagctgtgtaaaacgctggctaactttatgttcgacagcgacgacgcaatggtgcgtatcgatatgtccgagtttatggagaaacactccgtctcgcgtctggtcggtgcgcctccgggatacgtcggctatgaagagggcggttacctgaccgaggcggtgcgccgtcgtccttattccgtcatcctgctggatgaagtggaaaaagcgcacccggatgtgttcaacattctgctgcaggtactcgacgacgggcgtctcaccgacgggcaggggagaacggtcgacttccgtaatacggtagtcatcatgacctcgaacctcggttccgatctgattcaggaacggttcggcgagctggactacggacatatgaaggacctggtgctgggggtagtcagccagaacttccgtccggagttcatcaaccgtatcgacgaagtggtggtcttccatccgctgggcgagaaacatattgcctctattgcccagatccagctgcagcgtctgtataaacgtctggaagagcgcggatatgaagtgcagatgtccgatgaggcgctgaagctgctgagcgccaatggttacgatccggtatacggcgcgcggccattgaaacgtgctattcagcagcagattgagaacccgttagcccagcagatcctttccggtgagctggttccgggtaaaaccatcgagctggtagtaaaagacgaccgcattgtggcagtgcag

SEQ ID NO: 23257 - DNA, 1293 bp, Klebsiella pneumoniae
atgaaaaagaatataaatttacgcagcctggccgcccaggctatcgagcaagttgttgaaaaagggcagtctttaagcaacgtactgccccctctacagcagaaagtcagcgataaagataaagcgctactgcaggagttgtgctttggtgtactacgtactctaagccagctggagtggcttatcagcaagctaatggcgcgtccgatgaccggcaaacagcgcaccgtgcactttctaatcatggttggtctctatcagttactctacacccgcattccaccacacgccgcgctggcggaaacggtagaaggcgcggtggccattaaacgcccgcagcttaaagggctaatcaacggcgtgctacgccagttccagcgccagcaggaagcgttgttagccgaatttgctgagcatgaaaaccgctatcttcatcccaaatggctgctgaaacgcctgcagcaggcctggccggagcagtggcaggagatcgtcgaggcgaacaaccagcgcccgccgatgtggctgcgcgttaaccgcaaccatcattcccgggatgagtggcttgccctgcttaacgagaccggtttagagggctttacccaccctgattatccggacgccgtacgcctggccacccctgctccggtccacgcgttaccaggctttgccgaaggctgggtgaccgtccaggatgcctcggctcagggctgtatgcgctacctgcaaccggaaaatggcgaacgcattctcgatctctgcgcggcgccgggcgggaagacgacgcatattctggaagtcgctccccaggctcaggttatggcggtggatattgatgaacagcgtctgtcccgcgtctatgacaacctgaaacggctgggcatgaaagccgaagtcaagcagggcgatggccgcttccctgagcagtggtgtggcaatgagcagttcgatcgtattctgctggatgccccctgctccgcaaccggcgttattcgccgccatccggatatcaaatggctgcgccgggatcgggatatcgccgagttagcccaactgcaggccgagatcctcaatgccatctgggggcacctgaagccaggcggcacgctggtttacgcgacctgttctattctgccggaagagaacagtcagcaaattgccgctttcctcgcgcgaactccggatgcagaacttcacgcaaccggcacgccggcgatcccggggcagcaaaatctgccgggcgcagaagaaggtgatggcttcttttacgctaagctaatcaaacgtcggaac

SEQ ID NO: 23258 - DNA, 801 bp, Klebsiella pneumoniae
atgaagattattattctgggcgccggccaggtcggcggcacgctggcggaaaacctcgtcggcgagaacaatgatattacgctggttgataccaatggcgaccgtctgcgcagcctgcaggataagttcgacctgcgtgtcgtccaggggcatggctctcaccctcgcgtactgcgcgaggcgggagccgatgatgccgatatgctggtagcggtcactagttcggacgaaaccaacatggtggcctgccaggtcgcttactcattgttcaatacgccaaaccgcatagcgcgtattcgtgcgcctgattacgttcgtgatgcggaaaagctcttcaactctgaagcggtacccatcgatcacttaatcgctccggaacaactggtcatcgacaacatccaccgtctgatcgaatatcccggcgcgctgcaggtcgtgaacttcgcagaaggaaaagtcagtctcgcggtagtaaaagcctattatggtggcccgctggtggggaatgccttatccactatgcgggagcatatgccgcatatcgatacgcgcgtggccgccattttccgccacgatcgccccatccgcccgcagggctcgacgattgtcgaggccggagatgaagtcttctttattgccgcctcgcagcatattcgcgcggtcatgagcgaactgcagcgactggaaaagccgtataagcgtattatgctggtcggcgggggcaatattggcgcgggtctggcccataagctggaaaaagattacagcgttaagcttatcgaacgtaatcagcaggggtgt

SEQ ID NO: 23259 - DNA, 1452 bp, Klebsiella pneumoniae
atgaatatcaaggccgccagtctgaccccggaacaagcgcttgccgagctggaagcacactatgaagcctcggtcacggcgttacgcaaagccatcggcgactatatcgaccataatacgctccccgataccgaagcccgcgcgcaaggtctttttgtctatccgcagctgtcggtctcctgggacggcgccgatcataaagccctcaaaacgcgcgcctggggacgtttcacccatgccggttgctataccaccaccattacgaatccgaaactgttccgcaactatttgctggaacagctgaccctgctgtatcaggactatggcgcacatatcagcgtcgagctgtcgcagcatgagatcccctatccttacgtgatagatggttccaccctgacactcgaccgctcgatgagcgccggtctgacgcgctatttccctaccaccgagctgtcacaaattggcgatgagaccgcggatggcctgttccatcccaccgagttctatccgctgtcgcactttgacgcccgccgcgtcgatttttcgctggcgcgtctgcgtcactacaccggcacgccggcagaacacttccagccctacgtgctgttcaccaactatacccgctacgtggatgagttcgtcagctggggctgcagccagatcctcgatcccgacagcccctatatcgctctctcctgcgccggcgggatctggatcaccgccgagaccgaagcgccggaacaggccatttccgatctggcgtggaagaagcaccagatgccggcctggcatctgatcacccacgacggcaaagggatcaccctgattaacattggcgtcggcccggccaacgccaaaaccatctgcgatcatctcgcggtactgcggccggacgtctggttaatgatcggccactgcggcggcctgcgcgaaagccaggccatcggcgactatgtgctggcccacgcctatctgcgtgacgatcatgtactggatgcggtgctgccgccagatattccgatccccagcattgccgaagtgcagcgcgccctctacgacgccaccaagcaggtgagcgggatgcccggcgaagaggttaagcagcggctgcgtaccgggacggtggtcaccaccgacgaccgtaactgggagctgcgctattccgcttcggcgctgcgctttaatctcagccgggcggtagctatcgatatggagagcgcgaccatcgccgcccagggctatcgcttccgcgtcccctacggcacgctgctctgcgtctcggacaagccgctgcacggtgaaatcaagctccccggccaggctaaccgcttttacgagggcgctatctccgagcatctgcagataggcatccgggcgattgacctgctgcgcgccgagggagatcacatgcactcgcgtaagctgcgcaccttcaacgagccgccgttccgt

SEQ ID NO: 23260 - DNA, 1185 bp, Klebsiella pneumoniae
atgactaacagcaaccgtattaagctcacatggatcagcttcttctcctacgccctgaccggcgcgttggtgatcgtcaccgggatggtgatgggtaacattgcggattatttccatctgcccgtttccagtatgagcaacacctttacctttctgaacgccggtattcttatctccatcttcctcaatgcctggctgatggaaatcgtgccgctgaaaactcagctgcgctttggctttattttgatggtgctggcggtggccggcctgatgctcagccacagcctggcgctgttctccgcgtcaatgttcgttcttggcctggtgagcgggatcaccatgtcgatcgggaccttcctgatcacccatatgtatgaaggccgtcagcgcggggcgcgtctgctgtttaccgactccttctttagcatggcgggcatgattttcccgatggtcgccgccgtcctgctggcgcgcagcatcgagtggtactgggtctacgcctgtattggtctggtgtatgtcgctattttcgtcctgactttcggctgtgatttcccggtgctgggcaaaaaagcccagagtgaaaacagccagccggtggtgaaagagaagtggggcattggcgtactgttcctctccgttgcggcgctgtgctacatcctcggtcagctgggctttatctcctgggtaccggaatatgcgaagagcctgggcatgagcctcggcgacgccggtaaactggtgagcgatttctggatgtcctacatgatcggcatgtggtcattcagcttcatcctgcgcttcttcgacctgcagcgtatcttaaccgtcctcgccgggctcgcgacggtgctgatgtacctgtttatcaatggttcgccggagcatatgccgtggtttattctgaccctgggcttcttctccagcgccatttacacctcgatcattacgctcggttcgcagcagacgcgggtcgcttcgccgaagctggtgaactttatcctcacctgcggcaccatcggcaccatgctcactttcgtggtcaccggcccgattgtggcggccagcggtcccctggccgcgctgcacaccgctaacggcctctatgccgtggtattcgtaatgtgctttatcctcggcttcgtctcccgtcatcgccagaacaacgctcaggcggcgtctcac

SEQ ID NO: 23261 - DNA, 248 bp, Klebsiella pneumoniae
agcctgctgtcaccctttgacgtggtgatatggatgacggatggctggccgctgtatgaatcccgcctgaagggaaagctgcacgtaatcagcaagcgatatacgcagcgaattgagcggcataacctgaatctgaggcagcacctggcacggctgggacggaagtcgctgtcgttctcaaagatcggtggagctgcatgacaaagtcactcgggcattatctgaacataaaacactatcaataagtt

SEQ ID NO: 23262 - DNA, 912 bp, Klebsiella pneumoniae
gtggatcatcaaaaagttacttttaaaaaccgttacggcattacgctggccgcagatgtgtatcttccaaaagatcgcgggaacaagaagcttgctgcgcttgttatttccgggccttttggcgcggtaaaagagcaggcctcgggtctctatgctcagactttagcagagcgcggattcgtgacgctggcatttgatccgtcttataccggtgaaagcagtggtgaaccccgcaatattgcttcacccgatatcaataccgaagactttatggctgcagtcgattttatgggactacaaccttatgtggatcatgaacgtatcggtgtcatcggtatctgcggcatgggggggattgccctgaacgctgttgccgtggataagcgcgtaaaagcggtcgttgccagcaccatgtatgatatgagccgcgtaatgtcaaaaggctacaatgacagcgtaacaccggagcaacgcgagcaggcgctggagaagatgagtcttcaacgctgggaagatgcagcaaacggcaaaccggcataccagccagcctataataaactgaagggcggtgaagcacagttcctcgtggactatgcggactactacatgactaaacgcggctatcatccccgagccgtcaactctggcaattcatggtccgtgacaacgccgatggcctttatgaatttcccgctcatgacctatattaaggaaatttctccgcgcccgatcctgttcatccatggtgaaaaggcgcattcgctttacttctccaaaacggcttatgaagcggcaaatcagccaaaagagctgctgattgtaaaaaatgctacccatgttgatttatatgatcgtatggacaagatcccgttcgataacatcactgcatttttcaacaaaaatcttaataaa

SEQ ID NO: 23263 - DNA, 1008 bp, Klebsiella pneumoniae
atggtaaaggtcggtattaacggttttggccggatcggacgcaatgtactgcgcgcagcactgaataatccggatattcaaattgtggcaatcaacgatttgacggacagcaaaacgctggcgcatctgctgaaatacgactcgcttctcggtaagctggatgcagaggtcaccgcgggtgaaggggggcttgttgttgatggtaaacccattaccgtattcagtgaacgcaacccggccagtattccgtggcgtcagtgtgaagtcgacatcgttattgaggctacaggattattcacggaccgtgaaaaggctgctgtacatatccacagcggtggcgccaagcgcgtgattatctctgccccgggtaaaaacgatgatttaaccattgtgatgggcgttaatgagagcctttactccccggataaacactacgtgatcagcaacggaagctgcaccaccaatggtcttgcacctgctgcgcaggtcctgcaccagcatttcggtattaaacatggtctcatgaacaccacccatgcctacaccaacagccaggcgctgcacgatcagccggaaaaagatctgcgcggggctcgtgccgccgcattgtcgattgtgccttactccagcggcgcagcgaaggctctgggtaaagttattcctgagctggatgggcgtttaacgggatactcgctacgcgtccctgtgccagtggtgtccattgttgacctcaccgtcacgcttgagcgagatgtgacggtcgaagaggtgaacaatgcttttcgcgaagccgccgcagcgggacctctgaaagggatcctgggttatagcgatgaaccgctcgtctccagcgattaccagggagacccacgctcgtcgattatcgacggtctatcaacgctggtgattggcggtaatatggtcaaaattctggcgtggtacgacaatgaatggggattctctaatcgtctcgttgatctggcattgatgatggcaaagcgtgaaagc

SEQ ID NO: 23264 - DNA, 1128 bp, Klebsiella pneumoniae
cgagctggtggcggcgatgggcgaagagaaccagacgctcgacctggccgcgcagccgccggccgtggtgctgatggctggcctgcaaggtgctggtaaaaccaccagcgtcggtaagctggggaaattcctgcgcgagaagcacaagaagaaagtgctggtcgtttccgcggacgtttaccgcccggcggcgatcaaacagctggaaaccctggccgagcaggtcggcgtcgatttcttcccgtctgatgtcgggcagaagccggtgatatcgtcaacgcggcgctgaaagaagcgaaactcaaattctacgacgtgctgctggtggataccgccggtcgtctgcacgttgacgaagcgatgatggacgaaatcaagcacgtccacgccgccattaacccggttgaaaccctgttcgtcgtcgatgcgatgaccggtcaggatgcggcgaataccgcgaaggcctttaacgaagcgctgccgctgaccggcgtggtgctgaccaaagtggacggcgacgcccgcggcggcgcggcgctgtcgattcgccatattaccggcaagccgattaaattcctcggcgtcggcgagaaaaccgaagcgctggagccgttccatccggaccgcgtcgcttcccgtatcctcggcatgggcgacgtgctgtcgctgatcgaagatatcgagagcaaggttgaccgcgcgcaggccgagaagctggcctccaagctgaagaaaggcgacggtttcgacctcaccgacttccttgagcagctgcgccagatgaaaaacatgggcggcatggccagcctgatgggcaagctgccgggcatggggcagatcccggacaacgtgaaagcgcagatggacgacaaagtgctggtgcgtatggaagcgatcatcaactcgatgaccctgaaagagcgcgctaagccggaaatcatcaaaggttcgcgtaagcgccgtatcgccgccggctgcggcatgcaggtgcaggatgtgaaccgtctgctcaagcagttcgacgacatgcagcgcatgatgaagaagatgaagtcgaaaggcggcatgatgaagatgatgcgcgggatgaaagggatgatgccgccaggcttcccgggtcgttaaaaa

SEQ ID NO: 23265 - DNA, 865 bp, Klebsiella pneumoniae
ctgcaacggttggagcagaggcctgctaacgttatactgcttctctttcttatttagccaacagccgacacctatgcctgtttttgctctactcgcccttgtcgcctactccgtcagcctcgcgctgattatccccggcttgctgcaaaaaaacagcagctggcggcgaatggcgattttatctgcgactatcgccttgatctgccatgcttttgcgctggaagcacggatattccccggcggcgagagcgggcaaaatctcagcttactgaacgtcgggtcgctggtcagcctgatgatctgtacggtgatgactatcgtggcctcgcgcaatcgcggctggctgctgctgcctatcgtctatgccttcgcgctgatcaacctggccttcgccacattcgtgcctaacgaatatatcactcacctggaaaccaccccggggatgctggtgcatatcggcctgtcgctcttctcgtacgccacgctgatcattgccgcgctgtatgcgctgcagctggcgtggatcgactaccagctcaagaataaaaagctggccttcagcagcgaaatgccgccgctgatgagcattgagcgcaaaatgttccacatcacccaggtcggcgtggtgctgctgaccctgacgctgtgcagcggcctgttctacatgcacaatctgttcagcagcgaaaatatcgataaagcggtgctgtcgattattgcgtggttcgtctatatcgtcctgctgtgggggcactatcatgaagggtggcgcggacgtcgtgtggtctggttcagcgtcgctggcgccggtctgctgacgctggcctattttggtagccgcgtgctgcagcagttcgtgagctaa

SEQ ID NO: 23266 - DNA, 480 bp, Klebsiella pneumoniae
atgactaagaaaaaagcccacaaacctggatcagccaccattgcgctgaataaacgcgcccgtcacgaatactttatcgaagatgaatacgaggctggtctcgccctgcagggctgggaggtcaaatccctgcgtgcaggcaaagccaacatcggcgatagctatgtcatcctgaaggatggcgaggccttcctgttcggcgccaactttacgcccatggccgtggcttccacccactatgtctgcgacccgacgcgcacccgtaagctgctgcttaaccagcgtgagctggacacgctgtacggccgcattaaccgcgaaggttacaccgtcgtcgccctgtcgctgtactggaagaacgcctggtgcaaagtgaaaatcggcgtcgccaaaggtaagaaacagcacgacaagcgtaccgacctgaaggatcgtgaatgggcgctggataaggcgcgtattatgaagcacgccggacgt

SEQ ID NO: 23267 - DNA, 876 bp, Klebsiella pneumoniae
atgaagaaccatttcaagtgtatcggcattgtgggacatcctcgtcaccccaccgccctgaccacacatgaaatgctctggcgctggctgtgcagcaaagggtatgaagtgctggttgaacagcagatcgcccatgaacttcagctcagcaacgtgaaaaccggcacgctggcggagattggccaacaggccgatctcgcggtggtggtgggcggcgacggcaatatgctcggcgcggcgcggaccctggcccgttacgacattaacgtcatcggcattaaccgcggcaacctcggctttctcaccgaccttgacccggacaacgccctgcagcagctcgccgacgtgctggaaggccactacatcgccgagaaacgctttctgctggaggcccaggtgtgtcagcaggattgccagaaacgtatcagcaccgccatcaacgaagtggtgctgcaccccggcaaagtggcgcatatgattgagttcgaagtctatatcgacgaagtctttgcgttctctcagcgatccgatggcctgattatctccactccgaccggctccaccgcctactcgctgtcggctggcggcccaatccttacgccgtcgctggacgccatcaccctggtgccgatgttcccgcacaccctttcagcgcgaccgctggtgatcaacggcgacagcaccatccgcctacgcttctctcaccgctgcagcgatctggagatcagctgcgacagccagattgccctgccgatccaggatggcgaagatgtcctcattcgccgctgtgattatcacctcaatctgattcaccctaaagattacagctatttcaatacattaagcaccaagctcggctggtcgaaaaaattgttc

SEQ ID NO: 23268 - DNA, 1776 bp, Klebsiella pneumoniae
gtggggtgtgtaatgaaattgccagtcagagagtttgatgctgttgtcatcggtgccggcggcgcaggtatgcgcgcggcgctgcaaatttcccagagcggacagacttgtgcactgctctccaaagtgttccctacccgttcccataccgtatccgcgcagggtggaatcaccgtcgcgctcggtaactcccatgaagataactgggaatggcatatgtacgacaccgtaaaagggtcggactatatcggcgaccaggacgccatcgaatacatgtgtaagaccggcccggaagcgattcttgagctggagcacatgggactgccgttctctcgtcttgacgatggccgtatttatcagcgcccgtttggcggccagtcgaagaacttcggcggcgaacaggcggcgcgtaccgcggcggcggctgaccgtaccggtcacgccctgctgcacactctgtatcagcagaacctgaaaaaccacaccactatcttctccgaatggtacgccctcgatctggtgaaaaaccaggacggcgcggtagtcggttgtaccgccctatgcatcgagaccggcgaagtggtctactttaaagcccgcgccaccgtgctggcgaccggcggcgcaggccgtatctatcagtccaccaccaacgcccacatcaatacgggtgacggcgtcgggatggccatccgcgccggcgtgccggtgcaggatatggaaatgtggcagttccacccgaccggtatcgccggggctggggttctggttaccgaaggttgccgcggcgaaggcggttacctgctgaacaaacacggcgaacgctttatggagcgttatgccccgaacgctaaagaccttgcgggccgtgacgtggtggcgcgttccatcatgatcgaaatccgcgaaggccgcggctgcgacggtccgtggggcccgcacgcgaaactgaaactggatcacctcggtaaagaggttctggaatctcgtctgccgggtatccttgaactttcccgtacctttgcccacgtcgatccggtgaaagagccgatcccggttatcccaacctgtcactacatgatgggcggtatcccgaccaaagtcaccggccaggcgttgaccgtgaatgagaagggcgaagacgtggtgatcccgggcctgttcgcggtaggcgaaatcgcctgcgtatcggtccacggcgccaaccgtctgggcggcaactcgctgctcgacctggtggtcttcggccgcgcggcgggcctgcatctgcaggaatccattgccgagcagggcacgctgcgcgacgctagcgaatccgatatcgaaggctcgctggatcgcctcaaccgctggaacaacacccgctctggtgaagatccggtggcgattcgtaaagcgctgcaggaatgtatgcagcataacttctcggtgttccgcgaaggcgatgcgatgcacaaaggtctggagcaactgaaagtgatccgcgagcgcctgaaaaacgcccgtctcgacgatacctccagcgagttcaacacccagcgcgttgagtgcctggagctggataacctgatggaaaccgcctacgcgaccgccgtatccgctaacttccgtaccgagagccgtggcgcccacagccgcttcgacttcccggatcgtgatgatgaaaactggctgtgccattccctgtacctgccagagtcggaatccatgacgcgtcgtagcgtcaatatggaaccgaaactgcgtccggcattcccgccgaagattcgtacttac

SEQ ID NO: 23269 - DNA, 2805 bp, Klebsiella pneumoniae
atgcagaacggcgcaatgaaagcctggctggactcttcttacctctctggttcgaaccagagctggatagaacagctctatgaagacttcttaaccgatcctgactctgttgacgccaactggcgttcaatgttccagcagttacctggcaccggagttaaaccggatcaatttcattccaaaacgcgtgattatttccgtcgactggcgaaggatgcctcacgttacacttcttcgatttccgacccagacaccaatgtgaagcaggttaaagtcctgcagctcatcaacgcataccgtttccgtggccaccagcatgcgaatctcgatccgctggggctgtggaagcaagagagagtggcggatctcgatccggcctaccacgatctgaccgaggccgatttccaggaaagctataacgtaggttcatttgccatcggtaaagacacgatgaagctgggcgagctgattgccgccctcaagcaaacctactgcggctccatcggcgcggaatacatgcatatcacctctaccgaagaaaaacgctggatccagcagcgcattgaatcggtagctggcaaagcgagctttaccgcggaagagaaaaaacgcttcctcagcgaactgaccgccgcggaaggtctggagcgctacctcggcgccaaattcccgggggcgaagcgcttctcgctggagggtggcgacgccctgatcccgatgctcaaagagatgatccgccatgcaggcaaaagcggcacccgcgaagtggtgctgggcatggcgcaccgcggccgtctgaacgtgctggtcaacgtgctgggtaaaaaaccgcaggacctgttcgacgagttcgcgggcaaacataaagaacacctcggcaccggcgacgtgaagtaccacatgggcttctcttccgatatggaaaccgaaggcggtctggtgcacctggcgctggcgtttaacccgtcgcacctcgagatcgtcagcccggtggttatcggttccgtacgcgcccgtctggatcgtctggacgagccaagcagcaacaaagttctgcctattaccatccacggcgacgccgccgtcaccggccagggcgtggttcaggaaactctgaacatgtccaaagcccgcggttacgaagtgggcggtaccgtgcgcatcgttatcaacaaccaggtgggcttcacgacctctaacccgctggatgcgcgctcaacgccgtactgcaccgacatcggtaaaatggtgcaggcgccgattttccacgtcaatgcggacgatccggaagcggtcgccttcgtcacccgtctggcgcttgatttccgcaatacctttaaacgcgatgtcttcattgacctggtgtgctaccgccgtcacggccacaacgaagccgatgagccgagcgcaacccagccgctgatgtatcagaagatcaaaaagcatccgactccgcgcaaaatctatgctgacaagctggagcaggagaaggtggcgactctggaagatgcgaccgagcaggttaacctctaccgcgatgcgctggatgccggcgaatgcgtggtgcaggaatggcgtccgatgaatatgcattcctttacctggtcgccgtacctcaaccacgagtgggacgagagctatccggataaagttgagccgaaacgtctgcaggagttggccaaacgcatcagcacggtaccggaaggtatcgaaatgcagtcccgcgtggcgaaaatttacgccgaccgccaggcgatggcggcaggcgagaagctgtttgactggggcggtgccgaaaacctggcctacgccacgctggttgacgaaggtattccggttcgtctgtccggcgaagactccggccgcggcaccttcttccaccgtcatgcggtgatccataaccagaccaatggttcaacctacacgccgctgcagcatgtccataacggccagggccagttccgcgtttgggactcggtactgtctgaagaagcggtgctggcgttcgaatatggttacgccaccgccgagccgcgcactctgaccatctgggaagcgcagtttggcgacttcgccaacggtgcgcaggtggtgatcgaccagttcatctcctccggtgagcagaagtggggaaggatgtgcggcctggtgatgctcctgccgcacggttacgaaggccagggcccggagcactcctccgcgcgtctggagcgttatctgcagctgtgcgctgaacaaaacatgcaggtctgcgtgccgtccacgccggcacaggtttatcacatgctgcgtcgccaggcgctgcgcggtatgcgtcgtccgctggtggtgatgtcgccgaagtcgctgctgcgtcatccgctggcggtctccagcatggatgagctggcgaacggcactttcctgccggctattggtgaaatcgatcaacttgatccgcaggctgtgaagcgcgttgtgctgtgctctggtaaggtttactacgacctgctggaacagcgccgcaaaaacgagcaaaaagatgtcgctatcgttcgcatcgagcagctctatccgttcccgcatcaggcggtgcaggaagcgctgaaagcgtatgcgcacgtgcatgattttgtctggtgccaggaagagccgctcaaccagggcgcatggtactgcagccagcatcacttccgtgaagtgattccgtttggggcctctctgcgttatgcaggccgcccggcctccgcctctccggcggtagggtatatgtccgttcaccagaaacagcaacaagatctggtcaatgacgcgctgaacgtcgat

SEQ ID NO: 23270 - DNA, 1183 bp, Klebsiella pneumoniae
atggaaaaccgtagcgccgctctcccccgacgcgggttcgatgtcacctcttccgccttcttaatcgtcgcctttctgacgggcatgccggggcgctgcaaaccccgaccctgagcctgtttctgaccaacgaagtgcacgtccgcccggcgatggtcggtttcttttttaccggcagcgcggttattggcattctggtcagtcagttcctcgccggccgctccgaccgtcagggcgatcgcaagcagctgattgtcgtctgctgtctgctgggggtgctggcctgcgtactctttgcctggaaccgcaactatttcattttgctgttcatcggcgtttttctcagcagctttggatcgaccgccaacccgcagatgtttgccctcgcgcgtgagcatgccgacaggaccggccgcgaagcggtgatgttcagctccattttacgtgcccaggtctccctggcatgggtgattggtcccccgctggcctacgccctggcgatgggatttggttttaccgcgatgtatctcagcgccgcggcggcgtttatcgtctgcgggatcatggtctggctattcttgcccagcatgcgcaaagcaaagccggtagcggccggccggctggaagctccgcgcacgcatcgccgcgatgcgctgctgctgttcagcatctgcactctgatgtggggtactaacagcctgtacatcattaacatgccgctgtttatcattaacgagctgcatctgccggagaagctggcggggctgatgatgggcaccgccgccggactggaaattccgaccatgctgattgccggttactacgcccggcgtttcggcaaacgctttctgatgcgtctttctgcagtggccggggtgctttttacgtcggcatgctgacggtgcatacgccagcgctgctgctggcgatgcaggtgctgaacgccatctatatcgggatcctcgccgggatcggcatgctctatttccaggacctgatgccggggcaggcgggcgcggccaccaccctctataccaatactacccgcgtcggctggatcatcgccggttcactggcgggggtagtggcggagatctggagctatcacgcggtgttctggattgcgctggcgatgggcgttgtcactcaggcctgcctgtggcggataagagacgtgtaagca

SEQ ID NO: 23271 - DNA, 629 bp, Klebsiella pneumoniae
atgatgtttaaatggccctggaaagcagatgatgagtccggcaacgcagagatgccctgggagcaagcgcttgccattccggttttagcccatctttcgtccactgagcagcacaagctcacgcagatggctgcccgttttttacagcaaaagcggctggtggcattgcaggggctggagctgaccccgctgcatcaggcgcgcattgctatgctcttttgtctgccggtgcttgagctgggcattgagtggctggatggcttccatgaagtgctgatctaccctgcccctttcatcgtcgatgatgaatgggaggatgatattggtctggtccacaaccagcgggtggtacagtcgggacaaagctggcaacagggtcctgtagtgctgaactggctggatattcaagactcttttgatgcgtcaggctttaaccttgtggtgcatgaagtggcgcataagcttgatacgcggaacggcgaccgggccagcggcgtgccgcttatcccgttgcgtgaagttgccggctgggagcacgatctccacgccgcgatgaacaacattcaggatgagatagatctggtcggcgaaagcgccgccagtattgacgcctatgccgccaccgatcc

SEQ ID NO: 23272 - DNA, 236 bp, Klebsiella pneumoniae
atgagcactatcgaagaacgcgttaagaaaattatcggcgagcagctgggcgttaagcaggaagaagttaccaacaatgcttccttcgttgaagacctgggcgctgattctcttgacaccgttgagctggtaatggctctggaagaagagttgatactgagattccggacgaagaagctgagaaaatcaccaccgttcaggctgccattgattacatcaacggccaccaggcgtaa

SEQ ID NO: 23273 - DNA, 794 bp, Klebsiella pneumoniae
atgtttttagtcgactcccactgccatcttgatggtctggattatcaaactctacacaaaaacgtcgacgacgtgctggcaaaagcggccgcacgcgatgtgaaattttgcctcgccgtcgccacgacgctgcctggctaccgcagtatgcgcgaactggtggggacgcgtgacaacgtcgtcttctcctgtggcgtacacccattaaaccaggacgagccctgggaggtagagactctgcgcgcgctggcagcggaagagggcgtcgtggcgatgggggagaccggtctggattatttttataccccggaaactaaagcccacagcaagctcgttccgcgaccacattcgtatcgccgtgagctcaataagccggtgatcgtccatacccgtgacgcgcgtgccgatactctggctattttgcgcgaagaaaaggtgacggattgcgtggcgtactacactgtttcactgaggacagggagacagcgggcaagctgctcgatatggggttctatatctcgttttccggtatcgtcacttttcgtaacgccgagcagctgcgtgatgcggcgcgctacgtgccgctggatcgcctgctggttgaaaccgattcgccgtacctggcgccggtcccccaccgcggcaaagagaaccagccggcgctggtccgtgacgttgccgagtatatggcggtactgaagggggtgtcgcttgagcagctggctcagcagaccaccgacaattttgccaccctgttccacatcgaccccgcccgtttgcaacctgcttgatct

SEQ ID NO: 23274 - DNA, 639 bp, Klebsiella pneumoniae
atgcgcagtaactatatcgtcatcgaggggctggagggcgccgggaagaccaccgcacgtcaactggtggtggagacgctgcagtcggcgggtattcacgatatggtgtttacccgcgagccggggggcacaatccttgccgaaaaactgcgtagcctggtgctggatatccagtccacgggcgatgaagtgattaacgataaagcggaagtgctgatgttttacgcggcgcgcgtccagttggtggaggccgtgattaagcccgcgctggcccgcggccagtgggtgatcggcgatcgtcacgatctgtcgacgcaggcctatcagggcggcggccggggaattgaccgcacgatgctggcgacgctgcgcgacgcggtactcggtgattttcgccccaatctgacgctgtatctcgacgtcacgccggaagtggggctgcagcgcgcccgggcccgcggcgagctggatcgcattgagcaggagtccatgaactttttcaaccgtacccgcgcgcgctatcttgagctggccgccgccgatccttctatccgcacggttgacgcaactcagccgctggatgccgtggcgcgcgacattcgcgccacgatcgcccagtggatggcggagcaagcggca

SEQ ID NO: 23275 - DNA, 807 bp, Klebsiella pneumoniae
atgttcttgataaacggcgttgtacaggacacgttggcagcgaacgatcgcgccacccagtttggcgacggctgttttaccaccgcccgcatccagcaagggcaggttgcgctactggacgcccatctgcagcgtttgcagacaacctgtgaaaaaatacatatcccatttaacgactggctgacgctgagcgaagagatgcagcgtctggctcagccgcacgcgcagggcgtgctcaaggtgactctcacccgcggcgttgggggaaggggatacagtacggcaggctgcgtgtcgcccactcgcattctcagcttctctccattcccggcgcattatgcgcgctggcgggaggagggcattactctgacccagagtccggtgcccctggggcgcaactcctggcttgccggcctgaagcaccttaatcgccttgagcaggtgctgatccgctctcatcttgagcagacggacgccgatgaggcgctggtccttgacagtgacgggtggcttacggaatgctgtgccgcgaatttattctggcgtcagggacgtgatgtatttactccgcgactcgattatgccggggtcaacggcattatgcggcagcgctgtatcgcgcagctggcaccatcgacgtttcgcgttgtcgaagtgacagcgcgtcccgagacattgcgggaggccgatgaagtgctgatctgcaatgcgctgatgccgctggtgccggttcgccgctgggaggagaccacctggtcctcgcgtgagctttaccattttttagcccctttgtgtgagctgtctggt

SEQ ID NO: 23276 - DNA, 1239 bp, Klebsiella pneumoniae
gtgtctaagcgtcgtgtagttgtgaccggactgggcatgttgtctcctgtcggcaataccgtagagtctacctggaaagctctccttgccggtcagagtggcatcagcctgatcgaccatttcgatactagcgcctatgcaacgaaatttgctggcttagtaaaggattttaactgtgatgacattatctcgcgcaaagaacagcgcaagatggatgccttcattcaatatggaattgtcgctggcgttcaggccatgcaggattctggccttgaagtgacggaagagaatgcaacccgtattggcgccgctatcggctccggtatcggcggtctcggcttgatcgaagaaaaccacagttcgctggttaacggcggaccgcgcaagatcagcccattcttcgttccttccacaattgttaacatggtggccggccatctgaccatcatgtttggtctgcgtgggccaagtatctctatcgcgaccgcgtgtacttcaggcgtgcacaacatcggccaggccgcgcgcatcatcgcctatggcgatgccgatgcgatggtggcaggcggcgcggaaaaagccagtaccccgcttggcgtgggcggcttcggcgcggcgcgtgcgctctccacgcgcaatgacaacccgcaggcggcgagccgtccgtgggataaagatcgtgacggcttcgtgctgggcgacggcgcgggtatggtggtgctggaagagtacgagcatgccaaaaaacgcggcgccaaaatctacgccgagatcgttggcttcggcatgagcagcgatgcttaccacatgacgtcaccgccggaagatggcgcgggcgccgcgctggcaatggtgaatgctattcgcgatgcgggcatcgaaccgggccagatcggctacgtcaacgcccacggtacctcgacgccggccggcgataaagcggaagcgcaagcggttaagtctgtcttcggtgatgcggcgagccgcgtactggtgagctctaccaaatccatgaccgggcatctgctgggtgcggcaggggcggtagagtcgatttactctatcctggcgctgcgcgatcaggcggttccgccgacgatcaacctcgacaacccggatgaaggctgcgacctcgacttcgttccacacgaagcgcgtcaggtttccggtatggagtacaccctgtgcaactccttcggctttggcggcactaacggttcgctgatcttcaaaaaagtg

SEQ ID NO: 23277 - DNA, 1731 bp, Klebsiella pneumoniae
gtgaatattcaggctcttctctcagaaaaagtcagccaggccctgatcgcggcaggcgcgcctgccgattgcgaaccccaggtccgccagtcagcaaaagttcagttcggcgactatcaggccaacggcgtgatggctgtcgccaaaaagctgggtatggcgccgcgacaacttgcagagcaggtactgtctcatcttgacctcaacggcattgccaacaaggttgaaatcgccgggccgggctttatcaatattttcctcgaccccgcgtttctggcggacaacgtcaaccgcgcgctgcagtctgagcgcctgggcgtcacgaaaccgcaggcgcagactatcgtcgtcgactactcggcacccaacgtagcgaaagagatgcacgtcggccatctgcgttcgaccatcattggcgatgcttcagtccgtaccctggagttcctgggtcataaggtgatccgcgccaaccacgtcggcgactggggcacccagttcgggatgctgatcgcgtatctggaaaaacagcagcaggaaaacgccggcgaaatggccctggccgacctcgaaggtttctatcgcgaagcgaaaaagcactatgacgaagacgaagccttcgccgagcgcgcgcgcagctacgtggttaagctgcagggtggtgatgagtacttcctgcagatgtggcgtaagctggtcgacatcaccatgtcgcagaaccagatcacctacgatcgcctgaacgtcaccctgacccgcgatgacgtgatgggtgagagcctgtacaacccgatgctgccggggatcgtcgccgatctgaaagccaaagggctggcggttgagagcgaaggcgctaccgtggtcttccttgatgagtacaaaaacaaggaaggcgaaccgatgggcgtcatcatccagaaaaaggatggcggctacctctataccaccaccgatatcgcctgtgcgaagtatcgctatgaaacgctgcacgccgaccgcgtgctctactacatcgactctcgtcagcaccagcacctgatgcaggcgtggaccatcgtgcgcaaggcaggctacgtgccggactccgtgccgctggagcaccatatgttcggtatgatgcttgggaaagacggcaagccgtttaaaacccgcgccggcggtaccgtgaagctggcggatctgctggacgaagcgctggagcgcgcccgtcgcctggtggccgagaagaacccggatatgtcggctgacgagctggaaaatctggcgaaagtggtgggtatcggcgcggttaaatatgccgacctgtcgaaaaaccgcaccaccgactacgtcttcgactgggataatatgctggcgttcgaaggcaacaccgcgccgtatatgcagtatgcctatacccgcgtgctctccgtgttccgcaaagccggcatcgacgaaaacgcgatgatcgacgcgccggtggtcatcgccgaagatcgcgaagctcagctggccgcgcgcctgctgcagtttgaagagaccctctccgtggtcgctcgcgaagggacgccgcacgtgatgtgcgcctacctctacgatctggcgggcctgttctccggcttctacgagcactgcccgatcctcagcgcggaaagcgaagagacccgtaacagccgtctgaagctggcgctgctcacggcgaaaaccctcaagctgggtcttgataccctcggtatcgaaaccgtcgagcgtatg

SEQ ID NO: 23278 - DNA, 939 bp, Klebsiella pneumoniae
  misc_feature (924)..(924): n=g, a, t or c
atgcgtacagaatattgcggacagcttcgacagtcccacgttgggcagcaggtgactctgtgtggttgggtcaaccgccgtcgcgatctcggtagcctcatttttatcgatatgcgcgaccgcgaaggcatcgttcaggtgtttttcgatccggatcgtgcggatgcgttgaagttagcctctgaactgcgtaatgagttctgcattcaggtcactggcaccgttcgcgcgcgtgaagagaaaaacatcaacgcggacatggccaccggcgctatcgaagtgctggcttccgatctgacgatcattaaccgctcagaatcgctgccgctggactccaatcacgtcaacaccgaagaagcgcgtctgaaataccgctacctcgacctgcgtcgtccggagatggcgcagcgcctgaaaacccgcgcgaaaattaccagctttgtgcgccgctttatggacgaccatggcttcctcgacatcgaaaccccgatgctgactaaagccaccccggaaggcgcccgcgattacctcgtgccttcccgcgtgcacaaaggcaaattctacgcgctgccgcagtcgccgcagctgttcaaacagctgctgatgatgtccggcttcgatcgctactatcagatcgtcaaatgcttccgcgatgaagacctgcgtgccgaccgtcagcctgaattcacccagatcgacgtggaaacctcctttatgaccgcgccgcaggtgcgtgagatcatggaggcgatggtgcgtcagctgtggctggaagtgaaaggcgtcgacctgggcgagttcccgatcatgaccttcgccgaagccgaacgtcgctatggctccgataaaccggatctgcgtaacccgatggagctggtggacgtcgcgactgtgaagtctgtggacttccagcacattggagcncagctgtcgagtcta

SEQ ID NO: 23279 - DNA, 564 bp, Klebsiella pneumoniae
atgttagaactcaatgcaaaaaacacggcgctggtggtaatcgatctgcaggaaggcattctgcctttcgccggtggcccgcatcgggctgacgaggtggtggcgcgcgccgctcgcctggcagacaagtgccggcaacagggttcgccggtcatcatggtccgcgttggctggtcggccgatttcgccgaagcgctgaaacagcctgtcgatgctcaggccggggcgcatacgctgcccgaaaactggtggacctacccggccacgctgggtaagcaggagagcgatatcgaagtgaccaaacgccagtggggcgcgttctatggcaccgaccttgagcttcagctgcgccgccgcgggatcgacaccattattctctgcggcatctccaccaacatcggcgtcgaatccaccgcccgcaatgcctgggagctgggttttaacctggtcatcgctgaagatgcctgcagcgccgcctccgccgagcagcatcagggcagtatgacgcatattttcccgcgcatcggccgggtgcgcagtaccgaggagatcctcacggcgcta

SEQ ID NO: 23280 - DNA, 1002 bp, Klebsiella pneumoniae
atgactaagcccatcgtttttagtggcgcacagccctcaggtgaactgaccattggcaactatatgggtgcgctgcgtcagtgggtaaacatgcaggacgattaccactgcatctattgcatcgtggaccagcacgccatcaccgtgcgccaggatccgcagcagctgcgcaaggcgacgctggacaccctggcgctgtatctggcctgcggcatcgacccgcagaaaagcactatcttcgtgcagtcgcacgtgccggaacatgcccagctaggctgggcgctgaactgctacacctatttcggcgaactgagccgcatgactcagtttaaagacaagtcagcgcgctacgcggagaacatcaacgccggtctgtttgattatccggtactgatggccgctgacattctgctgtaccagaccaaccaggttccggtgggcgaagatcagaaacagcaccttgagctaagccgcgatatcgcccagcgttttaacgccatctacggcgatatttttaaagtgcctgagccgtttatccctaaatccggcgcgcgcgtgatgtcgctgctggagccgacgaaaaagatgtccaagtccgacgacaaccgcaacaacgtcatcggcctgctggaggatccgaaatcggtggtcaagaagattaaacgtgcggtcaccgactccgacgagccgccggtagtgcgttacgatctgaaagagaaagcgggcgtctccaacctgctggatatcctctccgcggttaccgggaaaactattcctgagctggaacagcattttgaaggcaaaatgtatggccacctgaaaggcgaagtcgccgaagcggtatcgggcatgctgattgacctgcaggagcgctatcaccgtttccgtaacgacgaagcgtttctcaatcaggtgatgaaagacggtgcggaaaaggccagcgcgcgggcttctcaaaccctgaaagccgtatacgaagcgattggctttgtcgccaagccg

SEQ ID NO: 23281 - DNA, 2076 bp, Klebsiella pneumoniae
atgtggcgcaggctgatttaccacccggaagtcaactatgcactgcggcaaacgctggtgctgtgtctgcccgtggccatcggtcttctgctcggccatctccagcaggggctgttattttccttagtccccgcctgctgcaacattgccggtcttgataccccgcataagcgctttttcaaacgcctgattatcggcggctgcctgtttgccggatgcagtctggtggtgcagttgctgcttgcccaggcgatacccctgccgtttattctcagcggcctggcgctcttgctcggcgttaccgcggagatcagttcgctgcacgcgcggctgctgcccgcgtcgctgatcgccgccatctttaccctgagcctggcgggcaatatgcccatctgggagccgctgctgatctacgccttcggcacgctgtggtacggcgtgtttaactggttctggttctggctgtggcgcgaacagccgctacgggagtcgcttagcctgctttaccgggagctggcggactactgtgaagccaaatacagcctgctgacccagcataccgatccctcgaccgccctgccgccgctgctcacccgccagcagaaagtggtcgatctgattacccagtgctatcagcagatgcatatgctggccgctaaccaacgcaacgatcataagcgcctgctgcgggcgtttcagatggggctggatctacaggagcatatttcggtcagcctgcatcagccggaagaggtgcaaaagctggtggaacgcagccatgccgaagcggtgatccgctggaacgcgcagaccgtcgccgcccgcctgcgcgtgctggcggatgacatgctctatcatcgctttccaaagcgctttcagatggataaacagatcgaggctctggaaaagatcgccagacaacatccggataacccggtcggccacttctgcgcctggcacttcagccgcatcgcccgggtgctgcatacccagcgcccgctgtatgcccgggacctgatggccgacaaagagcgtcgtttaccgctattgcccgcgctaaagaactacctgtcgctaaaatcgcccgcgctgcgcaatgccgcccgcatcagcgtgatgctgagcgtcgccagcctgatgggcaacgccctgcacttgcctaagccctactggatcctgatgacggtgcttttcgtcacccagaacggctatggcgccacccgggtgcgtattgttcaccgggcggcgggtacgctcgccggcctgacgatcgccgggctgaccttgcattttcacgttccggagagctacaccctgagcgggatgctgctgattaccctgctcagctatctgatcattcgcaaacactatggctgggcgatggttgggtttacggtgacggcggtatataccctgcagctgctgacgcttaacggcgaacagtttattatcgcccggctgatcgacacccttatcggctgcctgatcgccttcggcgggatggtctggctgtggccgcagtggcagagcggcctgctgaaaaaaaatgcccacgatgcgctggaggccgaccagcaggcgattcgcctgatcctcagcgccgatccaaaagcccccgcgctggcctatcaacgcatgcgcgtcaaccaggcgcacaacgcgctctacaactccctgaatcaggcgatgcaggaacccgggtttaatacccactatctggaagatatgaagctgtgggtaacgcacagccagtttatcgtcgaacacatcaacgctatgaccaccctggcccgggagcatacgatgctgaccccggatcttgcccagcgctatctcgaatcctgtgagattgcgctgcagcgctgccagcagcggctggacagcgatggtcccggcagcgcaggggatgccaatattatggagtcgccggaaagcgaggcgccgatcggtccgttaagcaccctggagcagcatctgcaacgcattctgggccatctgaacaccatgcacaccatttcgtcagtggcatggcgtcagcggccgcaccatggcatctggctgcggaagatcaaccgt

SEQ ID NO: 23282 - DNA, 1218 bp, Klebsiella pneumoniae
atggcaactgaacaaccggcaatcacccgcgccacattcgatgaagttattttgccaatttatgcaccggcagaattcatcccggtgaaggggaaaggcagccgcgtctgggatcagcaggggaaagagtatatcgatttcgccggcggtatcgcggtgacggcgcttggccattgccatccggcgctggtggcggcgctgcatcagcagggcgaaacgctgtggcacaccagcaacgtctttaccaatgagccggcgctgcgtctgggacgtaaacttgtcgaggctaccttcgccgagcgcgtggtgtttatgaactccggcaccgaagccaatgaaacggcctttaagctggcgcgtcactatgcggtgacccgccatagcccgtataaaaccaaaatcatcgccttccataatgcctttcatggccgctccctgtttaccgtttccgtcggcggtcagccgaagtattccgatggtttcggcccaaaaccggcggatattgtccatgttcccttcaacgatctgcaggcggtaaaagcggtgatggatgaccacacctgcgcggtggtggtggagccgattcagggcgaaggcggcgtgacggcggccacgccggctttcctgcagggactgcgcgagctgtgcgagcagcaccaggcgctgctcgtctttgatgaagtacagtgtggtatggggcgtaccggatcgctgttcgcctatatgcactacggcgtgaccccggatattctgaccagcgccaaagcgctgggcggcggcttcccggtcagcgccatgctgaccacccacgagatcgccagcgccttccatgcgggctcccatggctcaacctacggcggcaacccgctggcctgcgcggtcgccaacgccgccttcgatctgatcaataccccggcggtgctggatggcgtgagcgcgaagcgcgaactgttcgtcaaacacctgcagcggctggatgccgagtttgatctgttcagtgatatacgcgggatgggcctgctgatcggcgcggaactcaagccgcagcacaaaggccgcgcgcgtgatttcctctatgccgcggccgacgccggcgtcatggtgctcaacgccgggccggacgtgatgcgttttgttccctcgctgatcatcgacgagcaggatattactgaagggatggcgcgctttgcccaggcggtggcaaaggtgattaacggt

SEQ ID NO: 23283 - DNA, 600 bp, Klebsiella pneumoniae
atgagcgataaattcggcgatgaacgcgatccttacctttatccggcgctgaacgtgctgcgcaaccgtctcggcatccgccaggctaaaaatctgcagcaggccgcctttgagatgacagcgctgcgggcggccactctgccgctgggcccgcgggtgcgcggcttaccctatttgtgcgctattcatcatcagttgtatcaggatctgtttgactgggcgggccgcttgcgtgaagtgaacctctacctgggcgatacgccgttctgccactttgcccggatcgaggaggaggggaatgccctgatgcaggcccttgagcaggaggattatctcagtggcctgccgcgcgataccttcatcgaacgcctgagctggttctatggtgaaattaatgtgctgcacccttttcgtcttggcaatggcctgacccagcgcattttctttgaacagctggcgatacatgccggctaccttcttaactggcgtgacgttgaccccgccggctggagtgcggcctgccagcagagcgcgatgggcgatctggccccgctggtggcgatctttcgcaaagtggtaagcgaagcgcgggaatctgag

SEQ ID NO: 23284 - DNA, 1857 bp, Klebsiella pneumoniae
atgccgattcaggttctgccgccgcagctcgccaaccagattgccgccggcgaggtggtggagcggcccgcgtcggtggtgaaagagctggttgagaacagtcttgatgcgggcgctacgcggattgacattgatatcgaacgcggcggcgcgaagcttattcgcatccgcgataacggcagcggcatcaaaaaagacgagctggcgctggccctggctcgtcatgcgaccagcaagatcgcctcgcttgacgatctggaagccattattagcctcggctttcgcggcgaagcgctggccagtatcagttcggtggcgcgcttaacgctgacttcgcgcacggcggagcagcaggaagcctggcaggcgtatgctgaaggccgcgatcaggcggtgacggtgaagccggcggcgcacccggtcggtaccactctggaagtcctcgatctgttctataacaccccggcgcggcgcaaatttatgcgcaccgaaaagaccgagttcggccacattgacgaggtggtgcgccgcattgcgctggcgcgcttcgacgtcactatcaacctcagccataacggcaaggtgatgcgccagtatcggggagtcgctcaggatggccagcgcgagcgccggctggggacaatttgcggcgccgcttttctcgaacatgcgctggcgatcgagtggcagcatggcgatctgaccctgcgcggctgggtcgccgatccgctacataccaccccggcgctggcggaaattcagtattgctacgttaacgggcggatgatgcgcgatcggctgatcaaccatgctatccgccaggcctgtgaagacaagctgggggccgatcagcaaccggcgtttgtgctgtatctggagatcgatccccatcaggtggatgtaaacgtccacccggccaagcatgaggtgcgttttcatcagtcgcgcctggtgcacgactttatctaccagggcgtactgagcgtactgcagcagcagcttgacgcgccgctggcggaaaaagacgacccgccggcgccgcgccagatgccggagaaccgcatcgccgcgggcggcaaccagtttgcgcggccagcggaagcgcgggaacctgcgacccgcttcagcatcacgccatcgcgtgagcctgcggcctccagcggtaaaccgggcggcgcgagctggccgcatgcgcagccgggttaccagaagcagcagggagcgctttatcgtcaactgctcgacacgccaacggcgccaaagccagcgttgcagcctccggcggcggcagagttggccggtcacagtcagagctttggcagagtgctgacgattgttggcggcgactgcgcgctgctggagcgcgagggcggtctggcgctgctgtcgttgaccgttgccgagcgctggctgcgccaggcgcagttgaccccgggagcggaggcggtatgtgctcagccgctgctgatcccgctgcggttaaaagttacggaaggggaaaagcaggcgctggccgccgctcagccggcgctggcgcagctagggatcgatgtgcataccgatgccctgcacgtgacggtgcgcgcggtccctttacccttaagacaacaaaatttacaaatcttgattcctgaactgataggctacctggcgcagcaaaacgcattcgacgtcggcaatatcgcccaatggatggcgcgtaatctgacgagcgaacagacgtcatggaatatggcgcaggcgattgcgctgctggcggacgttgagcgtctttgcccgcagctggtgagaacgccgccgggtggcctgttacaacctgtagatctccattcggcgatgaatgccctgaaagatgaa

SEQ ID NO: 23285 - DNA, 354 bp, Klebsiella pneumoniae
atggcctatatccccaaaaattacgcacgtctggaagtgggttaccgcgaaaaggcgctcaagctttttccctgggtgtgcggacgctgctcacgggagtttgtctactccaatctgcgcgagctgacggtgcaccacatcgatcacgaccactccaataacccggaagatggcagcaactgggagatgttgtgcctgtactgtcacgatcacgaacattccaagtacaccgaagccgatcagtatggctccacggtggtggcaggagaagatgcgcaaaagagcgtcggcgaggccacctacaacccgtttgccgatctgaaagcgatgatgaacaaaagtaagcgaagcggc

SEQ ID NO: 23286 - DNA, 549 bp, Klebsiella pneumoniae
atggatgctctcgatctactgcttaatcgccgcagcgcttcccgcctggcggaacctgccccggcgggcgaacagctggaaaacattctgcgcgccgggctgcgcgccccggatcatggcaccctgcagccgtggcgcttctttattatcgccgatgacggccgcgagcgcttcagccagttgctggaaaaaggggccagagaggccggccaggatgagaagggaattgagaaagcccgcaatgcgccgttccgcgcgccgctgattattaccgtggtcgcgcgctgtgaagaccaccctaaggtgccgcgctgggagcaggagatgtccgctggctgcgcggtgatggcgatgcagatggcggccctggctcagggattcaacggtatctggcgcagcggagcattgaccgagagtccggtggtgcgggccggcttcgagtgccgcgaacaggataaaattgtcggcttcctctatctggggacgccgcagctaaaagcctcaaccaccattgccctgccggataccgcgccgtttgtgacgcgattc

SEQ ID NO: 23287 - DNA, 521 bp, Klebsiella pneumoniae
atggctaaaccaaagtattcccctgaaacaaaactggctgtggttaatcattatttgtccggtaaagacggagaacagagtacagccgacctttttggtattgaaagaacatctgtccgtcgctgggtcagggcatggcagttccacggtgcagaaggcctgactgcaaaaaataatcattattccgatgaatttaaactcgtggtcgtccgggcggttatcagtgaccgcctgacgatgcgtgaagcggctgcccggtttaatctctccgcagaaatacttgtccggcgctggctcgacgtgtacaacgatgccggagcggaaggtcttttaaacatgcaatgcggacggcccggacaaatgacaaagccaaaaaatatcccaccactgacagataaagagctggaaaaactctcccccgaagagctcagggccgaactgcgttatctgcgggcagagaatgcctatctaaacagttgaaagccttggttcagagcgaacaaaatgggcaaaagccctga

SEQ ID NO: 23288 - DNA, 1047 bp, Klebsiella pneumoniae
atggcaacaggcacactgcccgatgctgggcagatccttaactcccttatcaacagtattttactggtcgatgatgacctggcggtgcactttgccaaccctgcggcgcagcagctgctggcgcagagctcgcgcaagctgtttggcaccccattacctgagctgttgagctatttttcgttgaatatcgggctgatgcaggagagcctgcaggcgggccaggggtttaccgataacgaagtgacgctggttatcgatggccgttcgcacatcctgtcgttgaccgcccagcggctgccggaaggctttattctgctggaaatggcgccgatggataatcagcgccgcctgagccaggagcagctgcagcatgcgcagcaggtcgccgctcgcgacctcgtccgcggcctggcgcatgagataaaaaacccgttaggcggcctgcgcggcgcggcccagctgctcagcaaagcgctgcccgacccggcgctaacggaatataccaaagtgatcattgagcaggccgaccggttaagaaatctggtcgaccgcctgctcggaccacagcatccgggcatgcacgttaccgaaagcatccacaaagtcgccgaacgggtagttaaactggtttccatggagttgccggacaacgtgaagttgatccgcgattacgaccccagcctaccagagctaccccacgacccggatcaaattgaacaggtgttgctgaacatcgtccgtaatgcgctgcaggcgctggggccggaagggggcgaaattattcttcgcacccgcaccgctttccagctgacgctgcacggggtgcgttatcgcctcgccgcccgcatcgacgttgaagataatggcccgggtattccgccccatctccaggatacgctgttctatccgatggtcagcggccgcgaaggcggtaccggcctgggcttatctatcgcccgtagccttatcgatcagcactccggcaaaattgaattcaccagctggccgggtcataccgaattttcggtatacctgcctattcggaag

SEQ ID NO: 23289 - DNA, 1407 bp, Klebsiella pneumoniae
atgtccgctgaacacgttttgacgatgctgaacgagcacgaagtgaagtttgtcgatctgcgcttcaccgataccaaaggtaaagaacagcacgtcacgattccgtctcatcaggtaaatgccgaattcttcgaagaaggcaaaatgtttgatggctcctcgattggtggctggaaaggtatcaacgaatctgacatggtcctgatgccggacgcgtccaccgcggtcattgacccgttctacgaagaaccgaccctgatcatccgctgcgatatcctcgagccaggcaccctgcagggctatgaccgtgacccgcgctccatcgcgaaacgcgctgaagagtacctgcgcgccaccggcatcgctgataccgtcctgttcgggccagaaccagaattcttcctgttcgacgacatccgttttggcgcctctatctccggctcccatgtcgcgatcgatgacattgaaggtgcgtggaactcctccaccaaatacgaaggcggtaacaaaggtcaccgtccgggcgtgaaagggggttacttcccggttccgccagtagactcttctcaggacatccgttccaccatgtgtatgatcatggaagagatgggtctggttgttgaagcccatcaccatgaagtagcaaccgcaggtcagaacgaagtggcaacccgcttcaataccatgaccaaaaaagcggatgaaattcagatttacaaatacgttgttcacaacgtcgctcaccgctttggtaaaaccgcgacctttatgccgaaaccgatgttcggcgacaacggctccggcatgcactgccatatgtctctggcgaaaaacggtaccaacctgttctccggcgacaaatacgccggtctgtctgagcaggcgctgttctacatcggcggcgtaatcaaacacgctaaagccatcaacgccctggcgaacccgaccaccaactcctacaagcgtctggtcccgggttacgaagcgccggttatgctggcttactctgcccgtaaccgctctgcctctatccgtattccggtggtgacctctccgaaagcgcgtcgtatcgaagtgcgcttcccggacccggctgccaacccgtacctgtgctttgcggcgctgctgatggctggccttgatggtatcaagaacaaaatccatccgggcgaagcaatggataaaaacctgtatgacctgccgccggaagaagcgaaagagatcccgcaggttgccggttctctggaagaagccctgcaggccctggatgctgaccgcgagttcctgaccgctggcggcgtgttcaccaatgacgctatcgatgcctacatcgccctgcgtatggaagagaacgaccgcgtacgcatgactccgcatccggttgagttcgaactgtactacagcgtc

SEQ ID NO: 23290 - DNA, 1821 bp, Klebsiella pneumoniae
gtgatcgaaaatctgcgtaatatcgccatcatcgcgcacgttgaccatggtaaaactaccctggttgacaagctgctacagcaatccggtacgttcgacgcacgtactgaagcacaagaacgtgtgatggactccaacgatttggagaaagagcgtgggattaccatcctcgcgaaaaacaccgcaatcaaatggaatgattaccgtatcaacatcgttgataccccagggcacgccgacttcggaggtgaagttgagcgtgttatgtccatggttgactctgtgctgctggtggtagatgcctttgatggcccgatgccgcaaacgcgcttcgtgaccaaaaaagcttttgcccacggtctgaagccgatcgtggtcatcaacaaagttgaccgcccgggcgcgcgtccggactgggttgtcgatcaggtgttcgacctgttcgttaacctcgatgcgaccgacgaacagctggacttcccgatcgtttacgcgtccgcgctgaacggtatcgcgggtctggatcacgaagacatggctgacgacatgaccccgctgtaccaggcgattgtcgatcgcgtgccggcgccggacgttgatcttgacggtccgctgcagatgcagatctcccagctggactacaacaactacgttggtgttatcggcatcggccgcatcaagcgcggtaaagtgaagccgaaccagcaggtcactatcatcgatagcgaaggcaaaacccgtaacggtaaagtcggtaaggtactgactcacctgggtctggagcgaattgagagcgacgtagctgaagctggcgacattatcgcgatcaccggtctgggcgagctgaacatctccgacaccatctgcgacccgcagaatgtcgaagcgctgccggccctgtccgttgatgagccgaccgtttccatgttcttcaacgtcaacacctctccgttctgcggtaaagaaggtaagttcgttacctctcgccagatcctggaccgtctgaataaagagctggtgcacaacgtggcgctgcgcgttgaagaaaccgaagacgctgatgcgttccgcgtttccggccgtggtgaactgcacctgtccgttctgattgaaaacatgcgtcgtgaaggtttcgagatggcggtttcccgtccgaaagttatcttccgcgaaatcgacggccgtaaacaagagccgttcgagaacgtgacgctggacgtcgaagagcagcaccagggttctgtcatgcaggcgctgggcgagcgtaaaggcgacctgaaaaacatgaatccggacggtaaaggccgcgtacgtctcgactacgtgatcccaagccgcggtctgatcggcttccgttcagagttcatgaccatgacctccggtaccggtctgctgtactccaccttcagccactacgacgacgttcgtccgggcgaagtgggccagcgtaacaacggcgtactgatctccaacggtcagggtaaagcggtagcgttcgcgctgttcggtctgcaggatcgcggtaagctgttcctcggccacggcgctgaagtttacgaaggccagatcatcggtattcacagccgttccaacgacctgacggtaaactgcctgaccggtaagaaactgaccaacatgcgtgcgtctggtactgacgaagccacggttctggttccgccggttaagatgaccctggagcaggctctggagttcatcgatgacgacgaactggtagaagttactccgacctctatccgtatccgtaaacgtcacctgaccgagaacgaccgtaaacgcgcgatgcgcggtgcaaaagaagag

SEQ ID NO: 23291 - DNA, 192 bp, Klebsiella pneumoniae
atgcagggcaccgtacttgaaacgttgcctaacactatgttccgcgtagaactggaaaacggtcacgtggtaaccgcgcatatctccggtaaaatgcgtaaaaactacatccgcattctgacgggcgacaaagtgactgttgagctgaccccgtacgacctgagcaaaggccgcattgtcttccgtagtcgc

SEQ ID NO: 23292 - DNA, 1200 bp, Klebsiella pneumoniae
atgacagattccctattcccccgcttagtgttagccaaaggacgcgagaaatccctgctgcgtcgccatccgtggatattctccggcggcgtcgcccgcatggaaggtaaagcccgcagcggtgaaaccatcgatatcgttgaccatcagggaaaatggctggcccgcggcgcttactcgccgtcgtcgcagatccgcgcccgcgtgtggaccttcgaccgcaatgaagccatcgatagcgccttctttgaacgccgtctgcagcaggcgcaaacctggcgtgcctggctggccgagcgcgatggcctcgacagctaccgcctgatcgccggcgagtccgatggcctgccgggcgtcactatcgaccgctttggcaactttttcgtgctgcagctgctcagcgcaggcgccgaataccagcgcgccgccatcatcagcgccctgcagaacctgttcccggactgcgccatttacgatcgcagcgatgtcgccgtgcgtaaaaaagagggactggagctggcccaggggccggtggtgggcgaactgcccccggcgctgctgccgatcaccgagcacggcatgaagctgttagtcgatatccagggcgggcacaagaccggctactacctcgaccagcgcgacagccgcctggccacccgccgctatgtcgcggataaacgggtgctgaactgcttctcctacaccggcggctttgcggtgtcggcgctgatgggcggctgccgccaggtcaccagcgtggatacctctcaggaggcgctcgacgttgcccgccagaacgtggagatcaacggactggatctgtccaaagcggagtttgtgcgcgacgacgtgttcaaactgctgcgtaaataccgcgatcagggagagaaattcgacgtgatcgtgatggatccgccgaagttcgtggaaaataaaagccagctgatgggcgcctgccgcggctataaagatatcaatatgctggcgatccagctgctgaaccccggcggcgtgctgctgacattctcctgctccgggctgatgaccaccgatttatttcagaaaatcatcgccgatgccgcaattgatgccgggcgtgatgtacaatttatagaacagttccgtcaggctgccgaccacccggtgatcgcaacctacccggaagggctgtatctgaaggggtttgcctgtcgcgtcatg

SEQ ID NO: 23293 - DNA, 861 bp, Klebsiella pneumoniae
ttgagcgacagccaatacgcagtgatttacgatctgcacagccataccaccgcctctgacgggcggctgactccgcaggaactggtccatcgcgcccatgagatgcgcgtcggcaccctggcgatcaccgaccatgacagcgtggcggcgatcccggcggcccgggaggagatcgcccgcgccggattacccttgaccctggtgaacggcgtcgagatttccaccctttgggagaatcacgagattcatattgtgggtctgaatattgatattgcgcacccaacgatgactgccctgctggaggagcagaaagcgcggcgccagcagcgcggtcagatgattgccgagcgcctggagaaggcgcggatccccggcgcctgggaaggggcgctgcgactggcggacggtggcgccgtcacccgcggccattttgcccgttttctggtggaggccggccatgcgaaaaacatggcggaagtcttcaaaaaataccttgcccgcgggaaaaccggttacgtgccgccgcagtggtgtacaataaaacaagcgattgatgtgattcatcattctggcggcaaggcggtgattgcccatcccgggcgctacgatctttccgccaagtggttgaagcggctgttggcccactttagcgagcagggcggtgatgccatggaagtggcccagtgtcagcaggcgccccatgaacgcgcccagctggccaccctggccgtgcagtttggtcttctggcgtcgcagggatccgattttcatcagccctgcgcgtggatcgaacttggccgtaagctctggcttcctgccggcgtggaaggcgtctggcacagttgggaagcggccgccgaa

SEQ ID NO: 23294 - DNA, 2595 bp, Klebsiella pneumoniae
atgggtaaagctctcgttatcgttgagtccccggcaaaagccaaaacgatcaataagtatctgggtaatgactacgtggtgaaatccagcgtcggtcatatccgcgatttgccgaccagtggatcagcttccaaaaagagcgccgactctaccgccaccaaaggggctaaaaagcctaaaaaggacgaacgtagtgctctggttaaccgtatgggcgtggacccatggcatgactggaatgcgcactatgaagtacttccgggtaaagaaaaggtagtttcagaactcaaacagttggcggaaaaagctgaccacatctatctcgcaaccgaccttgaccgcgaaggggaagccattgcctggcacctgcgggaagtcatcggcggcgatgaacatcgttacagccgcgtggtgttcaatgagatcaccaaaaacgctattcgtcaggcctttgaaaagccgggcgaactgaatatcgatcgggttaacgcccagcaggcgcgtcgttttatggaccgcgtggtgggctatatggtttcgccgctgctgtggaaaaaaatcgcccgtggtctttctgccgggcgcgtgcagtccgtcgcggtccgcctggtggtggagcgtgaacgtgaaattaaagcgttcgtcccggaagagtactgggaagtcgacgccagcaccaccacgccgggcggtgacgccctgccgctgcaggtgacccataaggatgataagccgttccgtccggtcagccgcgatgagaccatggcggcggtatcgctgctggaaaaagccagctacagcgtactggagcgtgaagataagccgaccagcagcaagccgggcgcgccgttcatcacctccaccctgcagcaggcggccagcacccgtctgggcttcggcgtgaaaaagaccatgatgatggctcagcgactctatgaggcagggcacatcacctatatgcgtaccgactccaccaacctgagtcaggacgcgctgaacatggttcgcggctacatcagcgacaaatttggcaaaaaatatctgccggatagcgcgaaccagtacgccagcaaagaaaactcgcaggaagcgcacgaagcgattcgtccgtctgatgtgaacgtgctggcggaaacgctgaaagatatggaagcggatgcgcagaagctttatcagctgatctggcgccagtttgtcgcctgtcagatgacgccggcgcagtacgactccaccacgctgaccgtggctgcgggtgatttcaaactgaaagcgcgcggtcgcactttacgtttcgacggctggacaaaagtcatgccggcgctgcgcaagggcgatgaagaccggacgctgccgctggtcaaacagggcgaccgcctgagcctggtggagctgacgcctgcgcagcactttaccaagccgccggcgcgtttcagcgaggcctcgctggtgaaagagctggaaaaacgcgggattggccgtccgtcgacctacgcgtcgatcatttcgaccattcaggatcgcggctacgtgcgggtggaaaaccgtcgtttttacgccgaaaaaatgggcgagatcgttaccgaccggctggaagaaaacttccgcgatctgatgaactacgattttaccgcgcagatggaggatcgcctcgaccaggttgcaaaccaccaggccgagtggaaagaggtgctgaaccacttcttcggcgattttaccacccagctggcgacggcagagaaagatccggaagagggcggcatgcagccgaacccgatggtgctcaccagcatcgaatgcccgacctgcggccgtaaaatggggatccgtaccgccagcaccggcgttttcctcggctgttcgggctatgccttgccgccgaaagagcggtgcaaaaccaccatcaacctggtgccggagaacgaagtcctcaacgtgctggaaggcgatgacgcggaaaccaacgcgctgcgcgccaaacgtcgctgccagaagtgtgggacggcgatggacagctaccttatcgatcctaagcgtaagctgcatgtctgtggtaataacccgacctgcgacggctacgagattgaagagggcgaattccgcatcaagggctatgacggcccggtggtggagtgcgagaagtgcgggtctgaaatgcacctgaaaatggggcgtttcggtaaatacatggcctgtaccaacgacgagtgtaagaacacgcgtaagatcctgcgcaatggcgaagtggctccgccgaaggaagatccggtgccgctgccggagctgccgtgtgagaagtctgacgcctactttgtgctgcgcgacggggcggcgggcgtcttcctggcggccaacaccttcccgaaatcacgggaaacgcgtgcgccgctggtggaggagctgtaccgcttccgcgatcgtctgccggaaaaactgcgttatctcgccgatgcgccgcagcaggatccggaaggcaataaaacgctggtacgctttagccgtaaaaccaagcagcagtacgtggcgtccgaaaaagagggcaaagcgaccggctggtcagcattctttatcgacggtaagtggacggaagccaaaaag

SEQ ID NO: 23295 - DNA, 759 bp, Klebsiella pneumoniae
gtgcattatcaaccacaacgtcacttgctgaaagatcgcatcatcctggtcaccggggccagcgacgggattggtcgtgaagcggccctgacctacgcgcgctatagcgccagcgttatcctgctgggtcgcaacgacgacaaactgcgcaccgtcgcccaggagattgaacgtgagggtggtattccccctcgctggtttaccctcgacctgctcacctgtacgccccaggcgtgccagcagctggcgcagcagatcagcatgcactatccccgccttgacggcgtgctccataacgctggcctgctcggcgacatctgcccaatggaagagcagaagccggaggtctggcagcaggtgatgcaggtgaacgttaatggcacctttatgctgacccaggcgcttcttcctttattactccgttcggaatcgggctcgctggtcttcacctcatccagcgtcggtcgtcagggccgcgccaactggggcgcctatgccgtttccaaattcgccaccgaagggatgatgcaggtgctggccgacgagtatcaaagccgccacctgcgggtaaactgtatcaaccccggcggcactcgcaccggaatgcgcgccagcgcgttcccgacggaagatccgctgaaactgaaaacccccgctgacattatgcccgtctatctgtggctgatgggtgacgacagtcgtcgcaagacgggaatgaccttcgacgcccaaccgggacgtaaaccaggaattgcccaa

SEQ ID NO: 23296 - DNA, 453 bp, Klebsiella pneumoniae
atgtcgacccctgagaaacgccccgttagcttctttagcttgttcaaccgcgggcagcattacgcaaagacctggcctctcgacaagcgcctcgcgccggtgtttattgaaaaccgcattattcgtgccacccgctatgccatccgcatcatgccgccaatcgccatttttaccctctgctggcagatagctcttggcggccagctgggccccgccgtcgctaccgcgctgtttgcgctgagcctgccgatgcagggactctggtggttgggtaagcgttcggtgacgccgctgccgccctccattcttaactggttctatgaagtgcgcggcaaactgcaggaggcggggcaggcgctggcaccggtcgaaggcaagcccgattatcaggcgctggctgacacgcttaagcgcgccttcaaacaactggataaaactttccttgatgatttg

SEQ ID NO: 23297 - DNA, 687 bp, Klebsiella pneumoniae
ggtgttcacttcggtcaccagacccgttactggaacccgaaaatgaagcctttcatcttcggcgcgcggaagaaagttcacatcatcaaccttgagaaaaccgtaccgatgttcaacgaagctctggctgaactgaacaagatcgctgctcgtaaaggtaaaatccttttcgttggtactaagcgcgctgcaagcgaagcggtaaaagacgctgctctgagctgcgatcagttcttcgtgaaccatcgctggctgggcggtatgctgactaactggaaaaccgttcgtcagtccatcaaacgtctgaaagacctggaaactcagtcccaggacggtactttcgacaagctgaccaagaaagaagcgctgatgcgcactcgtgagctggacaagctggaaaacagcctgggcggtatcaaagatatgggcggcctgccggacgcactgttcgttatcgacgctgaccacgagcacatcgctatcaaagaagcaaacaacctgggcatcccggtatttgctatcgttgataccaactctgatccggacggcgtagacttcgttatcccgggtaacgacgatgcaatccgcgcagtaagcctgtacctgggcgctgttgctgctaccgttcgtgaaggtcgctctcaggacctggcttctcaggcggaagaaagcttcgtagaagctgaa

SEQ ID NO: 23298 - DNA, 849 bp, Klebsiella pneumoniae
atggctgaaattaccgcttccctggtaaaagagctgcgcgaacgtactggcgcaggcatgatggattgcaaaaaagcgctgactgaagcgaatggcgacatcgagctggcaatcgaaaacatgcgtaaatccggcgcgatcaaagcggcgaagaaagcaggcaacgtggctgctgacggcgtgatcaaaaccaaaatcgaaggcaactacggttacattctggaagttaactgccagactgacttcgttgctaaagatggtggtttccaggcatttgccgacaaagtactggacgccgctgttgcaggtaaaatctccgacgttgaagttctgaaagcgcagttcgaagaagaacgtgttgcgctggttgctaaaatcggcgagaacatcaacatccgtcgtatcgctgttctggaaggcgacgttctgggcagctaccagcacggtgcgcgtatcggcgttctggttgccgctaaaggcgctgacgaagagctggttaagcagctggcaatgcacgttgctgcaagcaagccggaattcgttaagccggaagacgtgtctgctgaagtggtagagaaagagtaccaggttcagctggacatcgcgatgcagtccggtaagccgaaagaaatcgcagagaaaatggttgaaggccgcatgaagaaattcaccggcgaagtttctctgactggtcagcctttcgttatggagccgagcaaatctgttggccagctgctgaaagagcacaacgctgacgtgactggcttcatccgctttgaagtgggcgaaggcattgagaaagttgagactgactttgcagcagaagttgctgcgatgtccaagcagtct

SEQ ID NO: 23299 - DNA, 723 bp, Klebsiella pneumoniae
atggctaccaatgcaaaacccgtctacaaacgtattctgctgaaattaagtggcgaagcgctgcagggctcagaaggcttcggtattgatgcaagcatacttgaccgcatggctcaggagatcaaagagctggttgagctgggtattcaggttggcgtagtaattggtggcggtaacctgttccgtggtgctggtctggcgaaagcgggtatgaaccgcgttgtgggcgaccacatgggcatgctggcaacggtcatgaacggcctcgcaatgcgtgatgcgctccaccgcgcctatgtgaacgctcgtctgatgtccgccattccgctgaacggcgtatgcgacaactacagctgggcagaggcgatcagcctgctgcgcaacaaccgcgtagtgatcctctccgctggtaccggcaacccgttctttaccaccgattccgcagcctgcctgcgcggtatcgaaattgaagccgatgtggtgctgaaagccaccaaggttgacggcgtattcaccgctgacccggcaaaagatccttctgccaccatgtacgatcagctgacctacagcgaagttctggaaaaagagctgaaagtcatggatctggcggccttcaccctggcgcgtgaccataaattaccgattcgcgtcttcaacatgaacaaacctggcgccctgcgtcgcgtggtgatgggcgaaaaagaaggcacattgatcacggaa

SEQ ID NO: 23300 - DNA, 555 bp, Klebsiella pneumoniae
gtgattagcgatatcagaaaagatgctgaaatccgcatggaaaaatgcgtcgaagcattcaaaaaccaaatcagcaaaattcgcacgggtcgtgcttctccgagcctgctggacgggattgttgttgaatactacggtactccgaccccgctgcgccagctggccagcgtcaccgtcgaagactcccgtaccctgaaaatcaacgtctttgaccgttctatgtccgcggccgttgaaaaagcgatcatggcctccgacctcggtctgaacccaagctctgccggcagcgatattcgtgttccgctgccgccgctgaccgaagagcgtcgtaaagatctgaccaagatcgtgcgtggtgaagccgagcaggcgcgcgttgccgtgcgtaacgttcgccgtgacgccaacgataaagtcaaagcgctgctgaaagaaaaagagatcagcgaagatgacgatcgccgttctcaggacgacgtgcagaaaatgactgacgccgccatcaaaaaagttgacgcggcgctggcagacaaagaagcggaactgatgcagttc

SEQ ID NO: 23301 - DNA, 928 bp, Klebsiella pneumoniae
atgccttcaattcgactggctgatctcgcgcagcagttggatgcagaattacacggtgatggcgatatcgtcatcaccggcgttgcgtccatgcagagcgcgaaaacgggccaaatcactttcatggtcaaccctaagtaccgtgagcacctggccgcttgccaggcttctgccgttgtgatgacgcaggatgatttaccttttgcccatagcgccgcgctggtagtgcgtaacccctacctgacctacgcgcgcatggctcaaattcttgataccacgccgcagccggctcaggatatcgcgccgagcgcggtcatcgatccgtcggcgaagctgggtagtaacgttgccatcggcgccaacgcggttatcgaatccggcgtagtgctgggcaataacgtagttatcggcgcaggctgcttcgttgggaaaaatacgaaaataggcgccggctcgcgtttgtgggctaatgtgaccgtttaccatgagattgagatcggcgagaattgcctgattcagtccagcacggtgattggcgcggatggcttcggctacgcaaacgatcgcggtaactgggtaaaaatcccgcagctgggtcgcgtcattattggcgatcgcgtggagattggcgcctgcaccacgattgaccgtggtgcgctggacgataccgtgattggcaacggggttatcattgataaccagtgccagattgcgcataacgtggtgattggcgacaataccgcggtcgctggcggcgttatcatggcgggcagcctgaaaattggccgctactgcatgattggcggcgccagcgtgattaacggccatatggaaatctgcgataaggtcaccgtcacggggatggggatggtgatgcgtcctatcagcgaacctggcgtatattcctccggtattccgctgcagccga

SEQ ID NO: 23302 - DNA, 774 bp, Klebsiella pneumoniae
atggacttaaaacgcgtgatgttgtctgctaatcaaactgtcagcgaaatatcgcccacccatggctgccgtcatgtcgccattattatggatggcaacggccgttgggcgaaacggcaaggtaaaattcgcgctttcgggcataaggccggggcgaaatccgtgcgtcgcgcggtctccttcgcggcgaataatgggattgaggcgttaacgttatacgcgttcagcagcgaaaactggaaccgtccggctcaggaagtcagtgcgctgatggaactgttcgtctgggcgctggatagcgaagtcaaaagcctgcaccgacacaatgtgcgtctgcggattattggcgacaccacgcgcttcaatgcgcgcctgcaggagcggatccgcaaagcggaagcgctaaccgcaaacaataccggcttaacgctgaatattgcagccaattacggcggtcgctgggatattacccagggcgttcgtttgctggcgaaacaggtacaggacgggacgctgctgcctgagcagatcacggaagacatgctgagtcagcaggtctgcatgcatgaactggctcccgttgatttagttattaggaccgggggagagcaccgaataagtaactttctgatttggcaaattgcctatgccgaactttactttacggatgttctttggcccgattttgctgaacaggactttgaaggtgcactccatgcctttgttaatcgagagcgtcgtttcggcggcactgagccgggtggcagtcatgcc

SEQ ID NO: 23303 - DNA, 789 bp, Klebsiella pneumoniae
ttgccgccgatgggctttgctatcgtcaccctggtggtctgtatgctcgccgcctgggagtggggacaactgagcggttttacctcgacgtcgcagcgggtttggctggcggtgctgtgcggccttctgctggcggcgatgctttttctgctgcctgaataccattatgacgttcatcaaccgatggttgaagggtcgctatgggcctcttttgcctggtggatcgtcgcgttactgctggtgctctcatacccggcgtcggcggcattctggcgccactcaaaggtgctgcgcctcatcttcggcatcctgaccatcgtcccgtttttctggggcatgctggcgctgcgcgcctggcactatgccgataaccactacagcggcgcgctgtggctgctgtacgtcatgatcctggtgtggggcgcagactctggcgcctatatgtttggtaaaatgtttggcaagcacaagctggcgccgaaggtctcaccgggtaaaacctggcagggcttttttggcggtttgctgaccgcggcagtgatttcctgggcctacggcgtgtgggcccatcttgacgtcacgccgacggtgctgctggtctgttcggtggtggcggccctggcttcggtgctgggcgacctgacggaaagtatgtttaagcgcgaggccggcattaaggatagcgggcacttgattcccggacatggtggtattctcgatcgtatcgacagcctgacggcggcggtaccggtcttcgcctgtctgctactgttggtcttcaggacgatt

SEQ ID NO: 23304 - DNA, 536 bp, Klebsiella pneumoniae
gtgcgcgtaaacaatttaattgaggtggttatgttcagaaaattagcagccgaatgcttcggcaccttctggcttgtatttggcggctgcggtagcgccgtgctcgccgcggctttccccgagctgggtattggttttgccggcgtcgcgctggcatttggcttaacggtattaaccatggcgtttgcggtcggccatatttccggggggcatttcaacccggcggtcaccttaggcctgtgggccggcggccgttttccggcaaaagaggtcattggctatattatcgctcaggtggtcggcggaattattgccgcggcggtgctgtacgtggttgccagcggtaaagccggctttgatgccgccgccagcggctttgcctccaacggctatggcgaacactccccgggcggcttctccatgctgtcggctatcgtcattgaaattgtcctgacctgcggcttcctgctggttattcatggcgcgaccgataaacatgcgccggcgggctttgcccccatcgccatcggcctggc

SEQ ID NO: 23305 - DNA, 1656 bp, Klebsiella pneumoniae
atgcttcttgagcgcgtagaaatcgtcggttttcgcggtatcaatcgtttgtcgttgatgctggagcaaaataacgtcctgatcggggagaacgcgtgggggaagtccagtctgcttgatgcgctgaccctgcttttgtcgccggagttcgatctttatcactttgttcgcgatgatttctggtttcccccgggcgacatccaggggcgcgaacaccatttgcatattatcctgaccttccgcgaaacggagccaggccgccatcgggtccggcgtttccgtccgcttcagcgctgctgggtgccttgcgatgacgggtatcaccgggtgttctatcgcctggagggcgagctcgccgaagatgacagcgtgatgaccctgcggagctttatcgatggtgaaggcgaagcgttggtgctggaggagattgatgagctggcccgacacctggtgcgtttgatgccggtgctgcgcctgcgcgatgcgcgctttatgcgccgcatccataacgggacggtaccgcactcgccgcagatagagatcaccgcccgtcagctggattttctctcccgggaactggtcagccatccgcaaaatttatcggacggtcagatccgtcaggggctatcggccatggtgcaactgcttgagcattactttgccgagcaaagcagcgctcaaacgcggcatcgcctgatgcggcggcgctcccatgatgaacagcgcagttggcgttatctggatattatcaaccggatgatcgacaagcccggcgggcgcagccatcgggtgatcctgctggggctgtttgccaccctcctgcaggcgaaagggacggtgcgcctcgatcgcgacgcgcgaccgctgctgttgattgaagatcccgagacccgtctgcatccgatcatgctttccgtcgcctggcacctgctgaatttgttgccgctgcagcgtgtgaccaccaccaactccggagagctgctgtccctgacgccggtagagcaggtctgccggctggtgcgtgagtcgacgcgggtatcggcgtggcggttggggccgggcggaatgaatgccgaagagagccggcgcattgcttttcacatccgcttcaatcgcgcctcatcgctcttcgcccgctgctggctgctggtggagggagagacggaaacctgggttatcaacgaactggcccggcagtgcggtcatcattttgatgctgaaggggttaaggtgatcgaattcgcccagtccggcctgaagccattgatcaaatttgcccgccggatggggatccagtggcacgtgctggtggacggcgatgaggcggggaaaaaatatgccgcgacggtacgaggtctacttaataacgatcgcgagctggagcgcgaccatctgaccagtctgccggcgctggatatggaacactttatgtatcgtcagggatttgatgacgtttatcatcgggtggcgcagatcccggataatgtcccgatgaatatgcggcgggtgatcaccaaagccatccatcgctcatccaagccggacctggcgattgaggtggcgatggaggccggccgccgtggcgtggacgctgtgccgacgctgctgaagaaaatgttctcacgggtgctgtggttagcccgcggtcgtgccgat

SEQ ID NO: 23306 - DNA, 2522 bp, Klebsiella pneumoniae
gcgccagacaagctgacgttacagcgtaagacgcgcagtacgttaaatattccaggtaccggtggaaagagtaaatcggtacaatcgaagtccgcaagaaacgcacctttgtgaaacgcgatccgcaagaggctgaacgcctggccgcggaagagcaggcgcagcgtgaagcggaagagcaggcccgtcgtgaagctgaagaagcagcgaaacgcgaggcgcaattaaaagctgaacgtgaggccgcagaacaagctaaacgtgaagtcgctgataaagcgaaacgtgaagctgcggaaaaagacaaagtgagcaatcaacataccgacgaaatgaccaaaaccgcccaggctgaaaagatccgtcgcgagaacgaagccgcggaattgaagcgcaaatcggaagaagaagcacgccgcaaacttgaagaagaagcgcgccgtgtagcggaagaagcacgccgtatggctgaagaaaacgaaaaaaattggtctgaaacctcagacagcccggaagatagcagcgactatcacgtcaccacatcacagcatgctcgtcaggctgaagatgataacgatcgtgaagtcgaaggcggtcgcggccgtagccgtagcagcaaagcggctcgtccggcgaagaaaggcaacaaacacgctgaatcgaaagctgatcgtgaagaagcccgcgcggcagttcgcggcggtaaaggcggtaagcaccgtaaaggttccgctctgcagcagggcttccagaagccagcgcaggccgttaaccgtgacgtcgtaatcggcgaaaccatcaccgttggcgaactggctaacaagatggcggtgaaaggttctcaggtcatcaaagcgatgatgaagctgggcgccatggcgaccatcaaccaggtcatcgaccaggaaaccgcacagctggttgccgaagagatgggccacaaagttatcctgcgtcgtgaaaacgaactggaagaagccgtaatgagcgaccgtgacaccggcgcggcggctgaaccgcgcgcaccggtcgtgaccattatgggtcacgttgaccacggtaaaacctcgctgctggactacattcgttctaccaaggttgcctccggcgaagcgggtggtattacccagcacatcggtgcttaccacgtcgaaaccgacaacggcatgatcaccttcctggataccccgggccacgccgcgtttacctccatgcgtgctcgtggcgcgcaggcgacggatatcgtggttctggtggtggcggcagacgacggcgtgatgccgcagactatcgaagctatccagcacgctaaagcggcgcaggtaccggtggtagtggcggtgaacaagatcgataagccagaagccgatccggatcgcgtgaagaacgaactgtcccagtacggcatcctgccggaagagtggggcggcgagagccagtttgtccacgtttccgcgaaagcgggtaccggcatcgacgacctgctggacgcgatcctgctgcaggctgaagttcttgagctgaaagcggtccgcaacggtatggcgagcggcgcggtcatcgaatccttccttgataaaggtcgtggtccggtagctaccgttctggttcgcgaaggtactctgcataagggcgacattgttctgtgcggcttcgaatatggccgtgtgcgcgcgatgcgtgacgaactgggtcgcgaagtgctggaagcgggtccgtccattccggtggaaatcctcggcctgtccggtgtgccggctgccggtgatgaagtgaccgtagtgcgtgacgagaaaaaagcgcgtgaagtggcgctgtatcgtcagggcaaattccgtgaagttaagctggcgcgtcagcagaaatctaaactggaaaacatgttcgctaacatgaccgaaggcgaagttcacgaagtgaacatcgtactgaaggcggacgtacagggttctgtcgaagcgatttccgattccttactgaaactgtctaccgacgaagtgaaagtgaagatcatcggttccggcgtaggtggtatcaccgaaaccgacgctaccctggcagcagcatccaacgcgattctggttggcttcaacgttcgtgccgatgcctctgcgcgtaaagttatcgaagcggaaagcctggatctgcgttactactccgtcatctataacctgatcgacgaagtgaaagcggcgatgagcggcatgctgtctccggaactgaaacagcagatcatcggtctggctgaagtgcgtgatgtcttcaaatcgccgaaattcggcgccatcgcgggctgtatggttaccgaagggacgatcaaacgtcacaacccaatccgcgttctgcgtgacaacgtggttatctatgaaggcgagctggaatccctgcgccgcttcaaagatgacgttaacgaagtccgtaacggcatggaatgtggtatcggtgtgaagaactacaacgacgttcgcgttggcgatatgatcgaagtgttcgaaatcatcgaaatccagcgtagcatcgat

SEQ ID NO: 23307 - DNA, 1929 bp, Klebsiella pneumoniae
atggctgaattcgaaaccacttttgcagatctgggcctgaaggctcctatccttgaagcgctcaccgatctgggttacgaaaaaccatctccgatccaggctgagtgcattccgcatctgctggacggccgcgacgttctgggtatggcccagaccggtagcggtaaaaccgcagcattctctttaccgctgctgaacaacatcgatcctgagctgagagcaccgcagattctggtgctggcgccgacccgcgagctggcggtacaggttgctgaagcaatgacggaattctctaaacatatgcgcggcgtgaacgtggttgccctgtacggcggccagcgttatgacgtgcagctgcgcgccctgcgtcagggtccgcagatcgtcgtcggtaccccgggtcgtctgctggaccacctgaagcgcggcaccctggacctctccaaactgagcggcctggtactggatgaagcagatgaaatgctgcgcatgggctttatcgaagacgtagaaaccattatggcgcagatcccggaagggcatcagaccgcgctgttctccgccaccatgccggaagctatccgtcgcattacccgtcgctttatgaaagagccgcaggaagtgcgcattcagtccagcgtgacgactcgcccggatatcagccagagctactggactgcctacggcatgcgtaaaaacgaagcgctggtgcgtttcctggaagcggaagactttgatgcggcgattatcttcgtccgtaccaaaaacgcgaccctggaagtagctgaagcgctggagcgtaatggctacaacagcgcggcgctgaacggcgacatgaaccaggcgctgcgtgagcagactctggaacgcctgaaagatggtcgtctggatatcctgattgcgactgacgttgcggcccgtggcctggacgttgagcgtatcagcctggtggtgaactacgacatcccaatggattctgaatcctacgttcaccgtatcggccgtactggtcgtgccggtcgtgctggccgcgcgctgctgttcgttgagaaccgcgagcgtcgtctgctgcgcaacatcgaacgcaccatgaagctgaccattcctgaagtggaactgcctaacgcggagctgctgagcaagcgtcgtctggaaaaattcgccgcgaaagttcagcagcagctggaaagcagcgatctggatcagtaccgtgcactgctggcgaaaatccagccgacggcggaaggtgaagagctggacgtggaaacgctggctgctgcgctgctgaagatggctcagggcgaacgttcgctgatcgttccgccggacgcgccgatgcgtccacgtcgtgaattccgcgatcgtgacgatcgtttcgaccgtcgtggcgaccgtaatgatcgcggcccgcgcggcgatcgcgaagatcgtccgaagcgtgagcgtcgtgacgtgggtgacatggagctgtatcgcattgaagtgggtcgcgatgacggcgttgaagtgcgtcatatcgttggcgcgatcgccaatgaaggcgatatcagcagccgttacatcggtaacatcaagctgttcgcttctcactccaccattgagctgccgaaagggatgccgggcgaagtgctgcagcactttactcgtacccgtatcctgaacaagccgatgaacatgcagctgctgggcgatgcgcagccgcgcaccgaacgtcgtggcggcggtgagcgtcgcgaaggcggccgtggcttcggcggcgagcgtcgtgaaggcggccgtggcttcggtggcgaacgtcgtgaaggcggtcgtggtgaaggacgtcgtttcagcggcgaacgtcgtgaaggccgtgcgccgcgtcgtgacgatgcatccgcgccgcgccgcgatgactcagccggtcgccgtcgcttcggtggcgatgcg

SEQ ID NO: 23308 - DNA, 2133 bp, Klebsiella pneumoniae
ttgcttaatccgatcgttcgtaaattccagtacggccagcataccgtgaccctggaaaccggcatgatggcgcgccaggcaacggccgctgtgatggttagcatggatgacactgcggtattcgttaccgttgtgggtcagaaaaaagcgaagccaggccaggactttttcccgctgaccgttaactaccaggagcgtacctacgctgccggtaaaatcccgggtggtttcttccgtcgtgaaggccgtccaagcgaaggcgaaaccctgatcgcgcgtctgattgaccgcccggttcgcccgctgttcccggaaggcttcgttaacgaagttcaggttatcgccaccgtcgtttccgttaacccgcaggttaacccagacatcgtcgcgatgatcggtgcttccgctgcgctgtcgctgtctggtattccgttcaatggcccaatcggcgctgcgcgcgtgggttacatcaacgaccagtacgtactgaacccaacccaggaagaactgaagtccagcaaactggacctggtggttgccggtaccgaagcggccgtgctgatggtggaatccgaagcggaactgctgagcgaagaccagatgctgggcgcggtggtcttcggccacgagcagcagcagattgttattcagaacatcaacgacctggtgaaagaagccggaaaaccgcgttgggactggcagccggaagcggtcaacgaagcgctgaacgcgcgcgtggctgcgctggctgaatcccgtctgagcgatgcttaccgtatcaccgacaaacaagagcgttacgctcaggttgacgtgatcaaatctgaaaccatcgccacgctggttgctgaagatgaaaccctggacgctaacgagctgggtgaaatcctgcacgccatcgagaaaaacgtggttcgtagccgcgtactggccggcgagccgcgtatcgatggccgtgaaaaagatatgatccgtggtctggacgttcgtaccggcgttctgccgcgtactcacggttccgcgctgttcacccgtggtgaaacgcaggcgctggttaccgcgactctgggtaccgcacgcgatgcgcagaacatcgacgaactgatgggcgagcgcaccgactccttcctgttccactacaacttccctccgtactccgtaggcgaaactggcatggtggggtctccgaagcgtcgtgaaatcggtcacggtcgtctggcgaagcgcggcgtactggccgtgatgccgactattgaagaattcccgtacaccgtgcgcgtggtatcggaaatcaccgaatctaacggttcctcttccatggcttccgtctgcggcgcctctctggcgctgatggacgcgggcgtgccggtaaaagccgctgtggcgggtatcgcaatgggtctggtgaaagaaggcgacaacttcgtcgtgctgtctgacatcctcggtgacgaagaccacctcggcgatatggacttcaaagttgcgggttcccgcgacggtatctctgcgctgcagatggatatcaaaattgaaggtatcaccaaagaaatcatgcaggttgcattgaaccaggctaaaggtgcgcgtctgcacatcctgggcgtgatggagcaggcgattaacgcgccgcgcggcgatatctctgaattcgcaccgcgtatccacaccatcaagatcaacccggacaagatcaaagacgttatcggtaaaggcggttctgttatccgtgccctgaccgaagagaccggtactaccatcgagatcgaagatgacggtaccgtgaagatcgcagcgaccgacggcgacaaagcgcagcatgctatccgtcgtatcgaagagatcaccgctgagatcgaagttggccgcatctacaatggtaaagtaacccgtatcgttgactttggcgcattcgttgccatcggcggcggtaaagaaggtctggttcacatctcgcagatcgctgacaagcgcgttgagaaagtgactgactacctgcagatgggtcaggaagtaccggttaaggttctggaagttgaccgccagggccgtgtccgtctgagcattaaagaagcaactgaacagactccgtctgccgcagcgccggaagctccggctgccgagcagggcgag

SEQ ID NO: 23309 - DNA, 267 bp, Klebsiella pneumoniae
atgtctctaagcgttgaagctaaagcaaaaatcgtttctgagtttggtcgtggcgaaaacgacagcggttctaccgaagttcaggttgcactgctgaccgcacagatcaaccacctgcagggccactttgcagagcacaaaaaagatcaccacagccgtcgtggtctgctgcgcatggtttctcagcgtcgtaaactgctcgactacctgaaacgtaaagatgttgcccgttactctgcgctgattgagcgtctgggtctgcgtcgc

SEQ ID NO: 23310 - DNA, 942 bp, Klebsiella pneumoniae
atgagtcgtcctcgtcgtcgcggccgcgacgtgcatggcgtattgttgctggacaagcctcagggcgcctccagtaacgatgtgctgcaaaaagtaaaacgtatttataacgccaaccgcgccgggcataccggcgcgctggatccgctggcgaccggtatgctgccgatctgccttggcgaagcgaccaagttttcccagtatctgctggactccgataagcgttaccgcgtgatcgccaaacttggccagcgcacggatacctccgatgccgacggtcaggtggtggaagagcgcccgctgacctttagcgacgaacagctggcggcggcgctggacagcttccgcggcgagacgcagcaggtgccgtcgatgtattcggcgctgaaatatcagggcaagaagctatacgaatatgctcgccagggtattgaagttccgcgggaagcccggccgataaccgtctatgagctgctgtttattcgccgcgaaggcgatgagctggagctggagatccactgctcgaaaggcacctacatccggacgattatcgatgatttaggtgagaagctcggctgcggcgcgcacgtgattttcctgcgtcgcctggcggtaagcaaatacccggtcgagcggatggtgaccctcgagcagctgcaggcgctggtcgatgaggcggcggcgcaggatattcctgccgctcagttgcttgatccgctgctgatgccgatggacagcccggcctcggattacccgctggttaatattccagaaacctccgcagtctactttaagaacggcaacccggtacgtcagtcaggcgcgccgcttaacgggctggtgcgagtgatggagagcgagtccggcaagtttctcggcatgggcgaaattgacgatgaaggccgcgtggccccgcgtcgtctggtggtggaatacccggcg

SEQ ID NO: 23311 - DNA, 888 bp, Klebsiella pneumoniae
atgaatatgaaaaaactggcgaccctggtctctgctgttgcgctaagtgcgaccgttagcgcgaacgcgatggccaaagacaccatcgctctggttatctctaccctcaacaacccgttcttcgtgtcgctgaaagacggcgcgcaaaaagaagctgacaagctgggctacaacctggtggtgctggattcccagaacaacccggcgaaagagctggcgaacgtccaggatttaacggtgcgcggcaccaagctgctgctgatcaaccccaccgactctgatgccgttggcaacgccgtgaagatggcgaaccaggcgaaaatcccggtcatcactctcgaccgtcaggcgacaaaaggcgatgttgtgagccatatcgcctctgacaacgtgcagggtgggaaaatggctggcgattacatcgcgaaaaaagtgggtgaaagtgcaaaagtcattgagctgcagggcattgccggaacttctgcggcgcgcgagcgtggcgaaggctttaaacaggccgtggcggcgcacaaattcaacgtcctggccagccagccggccgatttcgaccgcaccaaaggcctgaacgtgatgcagaacctgctgaccgcacatcctgacgtccaggcagtgttcgcgcaaaatgatgaaatggcgctgggcgccctgcgcgcgctgcagaccgcaggcaagtccgatgtgatggtggttggatttgacggcactccggatggcgaaaaagcagtaaacagtggcaaactggcggcgaccgtcgcacagttgccggagcagatcggcgcgaaaggcgttgagactgctgataaggtactgaagggcgaaaaagtggaagctaactacccggttgagctgaagctggtcgttaagcag

SEQ ID NO: 23312 - DNA, 963 bp, Klebsiella pneumoniae
atgacaacccaggctgtttctggtcgccgctatttcacaaaagcgtggctgatggagcaaaaatcgctgattgccctgctggtgctgatcgcggtggtatcgaccatgagccccaacttttttaccgtcaataacctgttcaatattctgcagcaaacctccgttaacgccattatggcggtagggatgacgctggtcatactgacctcggggatcgatctgtccgtcggctccctgctggcgctcaccggtgcggtggcagcgtcgatcgttggcattgaggttaatgcgctggtggcggtcgcggctgccctcgcattaggtgcggcgatcggcgcagtcaccggggtgattgtagcgagaggccgcgtgcaggccttcatcgccaccctggtgatgatgctgctgctgcgcggcgtaaccatggtgtacaccaacggcagcccgatcaataccggctttagcgataatgccgatctgtttggctggtttggcatcgggcgtccgctggggatcccgacgccggtatggatcatggcgattgtcttcctggcggcctggtacatgctgcaccatactcgcctgggccgttatatttatgccctgggcggtaatgaagcggcgacgcgtctgtccgggattagcgtcaataaagttaaaattatcgtttacgccttgtgcggaatgctggcttcgctggccgggatcatcgaagtggcgcgtctctcctccgcgcagccgacggcggggacgggctatgagctggacgccattgcggcggtggtgctcggcggcaccagcctcgctggtggcaaaggacgcattgtcggcacgctgattggtgcgctgatccttggcttcctgaataatggtcttaatcttttaggcgtttcttcctattaccagatgatcgttaaagcggtggtgattttgctggcggtactggtagataacaaaaagcag

SEQ ID NO: 23313 - DNA, 417 bp, Klebsiella pneumoniae
atgaaaaaaggcaccgtacttaacgctgatatttccgcggtcatttcccgcctgggccacaccgatacgctggtggtctgcgatgccggattaccggttccccgcagcagcacgcgcattgatatggcgctgactcagggcgtaccttcatttatgcaggtgctggaagtggtgacgacggaaatgcaggttgaagcggctgtcatcgcggaagagattaaaacccataatccgcagctccacgcgacgttgctcactcacctcgagcagctgcagcagcaccagggaaataccattgaaattcgttacaccagccatgagcagttcaaaaaacaaaccgcagacagtcaggcggtaattcgcagcggggagtgttccccgtttgcgaatatcattctctgtgccggcgtcacgttc

SEQ ID NO: 23314 - DNA, 1865 bp, Klebsiella pneumoniae
agcactgataataaacaatcgttgccggcgttaacgctggcggccatcggcgtggtgtacggcgatatcggtaccagtccactgtataccctgcgcgaatgcctgtcaggtcagtttggctttggcgtagagcgcgatgccgtttttggctttttgtcgctgattttctggctgttaatctttaccgtatcgattaaatacatcaccttcgtgatgcgggcggataacgccggggaaggcgggatcttaacgctgatgtcgctggccggacgtaatacttcggccagaatgacctccgtgctggtgatcctcggccttatcggcggcagtttcttctatggcgaagtggtgattaccccggcgatttcggtaatgtcggcgatagaggggttagaaattatcgccccgcagctggatacctggattgtccctatctccattatcgtgctcaccctgctgtttgtgatccagaagcacgggactggcatggtcggcaagctgtttgcgccgattatgctgatctggttcctgttgctggcggtgctgggcgcgcgaagcatttacgctaatccggaagttctgcaggcgctgaacccctactgggctgtgcactttttcctgcaatacaagaccgtttcctttattgcgcttggcgcggtggtgctgtcgattaccggggtggaagcgctgtacgccgatatgggccacttcggcaactgccgatccgcgttgcctggttctccgtcgtgctgccctcgttggtgctgaactattttggccagggcgcgctgctgctgaagcacccggaagcgattaaaaacccgttcttcctgctggcgcctgagtgggcgctgatcccgatgctgatcatcgccacgctggcgacggttatcgcctcccaggcagtgatttccggggtcttctccctgacccgtcaggcagtgcgtctgggctatctgtcgccgatgcgcattatccatacctcggaaatggagtccgggcagatttacattccgttcattaactggctgctgtacgtttctgtggtcatcgttatcgtcagctttgagcattcgtctaacctggcggcggcgtatggtatcgccgtaacgggcaccatggtgctgacctccattctgtcggcgaccgtggcgcgcaaaaactggcactggaacaagctgtttgtcggtctgatgctggtggccttcctgtgcattgatattccgctgttctcggcgaacctcgataagattgtctccggcggctggctaccgttgtccctggggatggtgatgtttacggtgatgacgacctggaagagcgagcgtttccgcctgctgcgccggatgcacgagcatggcaactcgctggaagcgatgatctcttcgctggagaagtcaccgccagtgcgtgtgccgggtactgcggtgtatatgtcccgcgccctgaacgtgatcccgtttgccctgctgcataacctgaagcacaacaaggtgctgcatgagcgagtgatcctcctgaccctgcgtaccgaagatgcgccttacgtgcataacgttcgccgggtgcagattgagcagctgtcaccgtctttctggcgggtggtggccagctacggctggcgggaaacgcctaacgttgaagaggtgttccaccgctgtggcctggaaggactcagctgccggatgatggagacctcgttctttatgtcgcatgagtcgctgattatcggcaaacggccatggtatctgcgcctgcgcggcaagctttatctgctgctgcagcgtaacgccctgcgggcgccggatcagtttgagatcccgccaaaccgggttatcgagctcggtacccaggtcgaaatctga

SEQ ID NO: 23315 - DNA, 1896 bp, Klebsiella pneumoniae
atggctatcgaaatcaaagtaccggacatcggggctgatgaagttgaaatcaccgagatcctggtcaaagttggcgacaaagtagaagctgaacagtcgctgatcaccgtagaaggcgacaaagcctctatggaagtcccgtctccgcaggctggcgtcgtgaaagagattaaagtctccgtcggcgacaaaaccgagactggcaaactgattatgattttcgattccgccgaaggtgcagccgccgctgcacctgcgcaggaagagaagaaagaagccgctccggccgccgctgctccagcggctgccgcggcagcgaaagaagttcacgtcccggatatcggcggcgatgaagtcgaagtcaccgagatcatggttaaagtgggcgacaccatcgccgctgagcaatccctgatcaccgtagaaggcgataaagcctctatggaagttccggcgccgttcgccggtaccgtcaaagagatcaaaatcaataccggcgataaagtttccaccggctccctgattatgatcttcgaagtggcgggcgctgcgcctgcagccgctccggcacaggctgccgcgccggctgctgcggctccggctgccgcagcaggcgtgaaagatgttaacgtcccggacatcggcggcgacgaagttgaagtcaccgaagtgatggttaaagtcggcgataaagtcgcggcggaacagtccctgatcaccgtagagggcgacaaagcctctatggaagttccggcgccgttcgcgggtaccgttaaagagatcaaaatcagcaccggcgataaagtcaaaaccggttccctgatcatggtcttcgaagtggaaggcgctgcgcctgccgccgctccggctcaggctgctgccccggcaccagctgctgccccggctcaggccgctaagcctgccgctgcgccggctgcgaaagcagaaggtaaaagcgaattcgctgaaaacgatgcctacgttcacgcgaccccgctgattcgccgcctggcgcgcgagttcggtgttaacctggcgaaagtgaaaggcaccggccgtaaaggtcgtatcctgcgcgaagacgttcaggcctacgtgaaagacgcggttaaacgcgctgaatccgcaccggcggctgccgctggcggcggtatcccgggcatgctgccgtggccgaaggttgacttcagcaagtttggcgaagtcgaagaagtggagctgggtcgtatccagaaaatctctggcgccaacctgagccgtaactgggtgatgatcccgcacgttacccacttcgacaaaaccgatatcaccgatctggaagcgttccgcaagcagcagaatgccgaagctgagaagcgtaaactggacgtgaaattcactccagtggtcttcatcatgaaagcggttgccgctgcgcttgagcagatgccgcgcttcaacagctcgctctccgaagatggtcagcgcctgacgctgaagaaatacatcaacatcggtgtggcggtggataccccgaacggtctggtggttccggtcttcaaagacgtgaacaagaagagcatcaccgagctgtctcgtgaattgaccaccatctcgaagaaagcgcgcgatggcaaactgacggctggcgaaatgcagggcggttgcttcaccatctccagcatcggcggcctgggtaccacccacttcgcgccgattgttaacgcgccggaagtggccatcctcggcgtgtctaagtccgcgatggagccggtatggaatggtaaagagtttgtgccgcgcctgatgctgccaatctctctgtccttcgaccaccgcgtcatcgacggtgctgatggtgcccgcttcattaccatcattaacaacaccctgagcgacattcgccgcctggtgatg

SEQ ID NO: 23316 - DNA, 1425 bp, Klebsiella pneumoniae
atgatgagtactgaaatcaaaactcaggtcgtggtacttggggcaggccccgcaggttactctgcagccttccgttgcgctgatttaggtctggaaaccgtcatcgtagaacgttacagcaccctcggtggtgtttgtctgaacgtgggttgtatcccttctaaagcgctgctgcacgtggcaaaagttatcgaagaagcgaaagcgctggccgaacacggcatcgttttcggcgaaccgaaaactgacattgacaagatccgcacctggaaagaaaaagtcatcactcagctgaccggtggtctggctggcatggccaaaggtcgtaaagtgaaggtggttaacggtctgggtaaatttaccggcgctaacaccctggaagtggaaggcgaaaacggcaaaaccgtgatcaacttcgacaacgctatcatcgcggcgggttcccgtccgattcagctgccgtttatcccgcatgaagatccgcgcgtatgggactccaccgacgcgctggaactgaaatctgtaccgaaacgcatgctggtgatgggcggcggtatcatcggtctggaaatgggtaccgtataccatgcgctgggttcagagattgacgtggtggaaatgttcgaccaggttatcccggctgccgacaaagacgtggtgaaagtcttcaccaaacgcatcagcaagaaatttaacctgatgctggaaaccaaagtgactgccgttgaagcgaaagaagacggtatttacgtttccatggaaggtaaaaaagcaccggcggaagcgcagcgttacgacgcagtgctggtcgctatcggccgcgtaccgaatggtaaaaacctcgatgcaggtaaggctggcgtggaagttgacgatcgcggcttcatccgcgttgacaaacaaatgcgcaccaacgtgccgcacatctttgctatcggcgatatcgtcggtcagccgatgctggcgcacaaaggtgtccatgaaggccacgttgccgcagaagttatctccggtctgaaacactacttcgatccgaaagtgatcccatccatcgcctacactgaaccagaagtggcatgggtcggtctgaccgagaaagaagcgaaagagaaaggcatcagctacgaaaccgccaccttcccgtgggctgcttccggccgtgctatcgcttctgactgcgcagatggtatgaccaaactgatcttcgacaaagagacccaccgtgttatcggcggcgcgattgtcggcaccaacggcggcgagctgctgggagagatcggcctggctatcgagatgggctgtgacgctgaagacatcgccctgaccatccacgctcacccgactctgcacgagtccgttggcctggcggcggaagtgttcgaaggcagcatcaccgacctgccaaacgccaaagcgaagaaaaag

SEQ ID NO: 23317 - DNA, 588 bp, Klebsiella pneumoniae
atggaggagaacaccgtgctacgtgaagacgtcctggcagaagccattaagattcttgaaattgaaggtatcgccaacacgtcgctggagatggtcgctgagcgcgtgtcctgcccgacgagcgacctgaaacgcttctggcctgaccgcgaagcgctgctgtacgacgcgcttcgctatctgagccagcaggtggatgcctggcgtcgtcagctcctgctggacgagaccttaagcgcagagcaaaagctgctggcacgctatgccgcactcaccacctgcgtaagcaaccagcggtacccgggctgcctgtttatcgccgcctgcaccttctacccggatcctcagcaccccattcaccagctggcggaacagcagaagcaggcttcgctggcctacactcacgagctgctgactcagctggaggtggatgacccggaaatggtcgccaagcagatggagctgattgtcgagggctgtctgagccgtctgctggtcaaacgtagccagacggatgtggataccgcccggcggctggctgaagatattctacgcttcgcccagtgccgtatgggcggcgccttgacc

SEQ ID NO: 23318 - DNA, 1191 bp, Klebsiella pneumoniae
atgagcactttactgaacccctacttcggcgaattcggcggcatgtatgtgccgcagatcctgatgcccgccctgcgccagctggaagaagcctttgtcagcgcgcagaaggacccggcctttcaggcggaattcaccgacctgctgaaaaactacgccgggcgtccgacggccctgaccaaatgccggaatctgaccgaaggcacccgcaccaccctgtacctgaaacgcgaagatctgctgcacggcggcgcgcacaaaaccaaccaggtgctgggccaggctctgctggccaaacggatgggtaaaaccgaaattatcgccgagaccggcgccggccagcacggcgtcgcctcagcgctggccagcgccctgctcggcctgaaatgccgtatctacatgggtgccaaggacgtcgagcgccagtcgccgaacgtcttccgtatgcgcctgatgggcgccgaggtgatcccggtgcacagcggctccgccacgctgaaagatgcctgtaacgaggcgctgcgcgactggtccggcagctacgaaaaggcgcactatatgttgggcaccgccgccggtccgcacccgttcccgacgattgtgcgtgaattccagcgcatgattggcgaagagaccaaagcgcagatccttgaaaaagagggccgcctgccggacgcggtgatcgcctgcgtcggcggcggatcaaacgccatcggcatgttcgctgattttatcgaggaaaccaacgtcggcctgatcggcgtggagcccgccggacacggtatcgagagcggcgagcacggcgcgccgctgaagcatggccgcgttgggatctacttcggtatgaagtcgccgatgatgcagaccgccgacggccagatcgaagagtcttactccatttccgccgggctggacttcccgtccgttgggccgcagcacgcgtttctgaacagcaccggtcgcgctgactatgtgtcgatcaccgacgacgaagcgctggacgcgtttaaagcgctttcccgccacgaagggattatcccggcgctggagtcctctcacgctctggcccacgcgctgaagatgatgcgcgagaacccggaaaaagagcagctgctggtggttaatctctccggccgcggcgacaaagacattttcaccgtacatgacatcctgaaagcgcgaggggaaatc

SEQ ID NO: 23319 - DNA, 1356 bp, Klebsiella pneumoniae
atgcaaaccgttttagcaaaaatcgttgccgacaaagcgatttgggtggaagcccgcaaacaacaacaaccgttagccagttttcagaatgagatcgtcccgacgcagcgcaatttctatgacgcgctggccggcacccgcaccgcgtttattctcgagtgcaagaaggcctcgccgtcgaaggggttgattcgcgaggatttcgatccggcagcgatcgccagcatctacaagcactacgcctcggcgatctcggtgctgtgtgatgagaaatatttccagggcagcttcgatttcctgccgatcgtcagccaggtcgcgccgcagccgatcctgtgtaaggacttcaccatcgacccttaccagatctacctggcgcgctactatcaggccgacgcctgtctgctgatgctctcggtgctcgacgatgaacagtatcgtcagctctcggcggtggctcacagcctgaatatgggcgtgctgaccgaagtcagcaatgaagaggaactggagcgcgccatcgtcctgaaggcgaaggtggtgggcattaacaaccgcgacctgcgcgatatgtcgattgaccttaaccgcacccgtcagctggcggcgcgtctcggcccggatgtcacggtgatcagcgaatccggcatccatacctatgccgaagtgcgcgagctgagccacttcgccaacggcttcctgatcggctccgccctgatggagcaggcggatctggaagcggcggttaaacgcgtgctgctcggcgagaacaaagtgtgcggcctgacgcgcccgcaggatgcccgggtggcctgggagtccggcgccatctacggtgggctgatcttcgtcccgacctcgccgcgagcggtaaatgacgcccaggccaaagcggtgatcgccgctgcgccgctgcagtacgtcggcgtcttccgcaatgcgccgctggaggaggtggccgcccgcgcgcaggctctggggctggccgccgtgcagctgcacggtgatgaagaccaggcctatatcgacgcgctgcgcgacgccctcgcggataacgtccgcatctggaaagcgctgagcgtcggcgaaaccttcccggcccgtacgctccgccatgtcgacaagtacctgctcgacaacggccagggcggcagcggccagcgctttgactggagcctgctgcaggaccaggatctgcgcaacgtcatgctggcgggcggcctcggcgccgataactgtgtggaagcggccaaaagcggctgtgccggactcgatttcaattcaggcgtagagtcgcaacccgggattaaagacgccagcaagctggcctccgtattccagacgctgcgcgcatat

SEQ ID NO: 23320 - DNA, 1593 bp, Klebsiella pneumoniae
atggctgacattctgctgctcgataatatcgattcctttacctataacctggcagaccagctgcgcgccaacggccataacgtagtgatttatcgcaactccgttccggcgcaggcgctgattgagcgtctgggcaccatggacaacccggtgctgatgctctccccgggcccgggtacgccgagcgaagccggctgcatgccggagctgctgacccgtatgcgcggcaagctgccgatcatcggcatctgcctcggccaccaggccattgtcgaagcctacggcggctatgtcggccaggcgggggagatcctccatggcaaagcctccagcattgagcatgacggccaggcgatgtttgccggtctggctaacccgctgccggtggcgcgctaccactcgctggtcggcagcaatattcccgccgggctgacgattaacgccaatttcaacggtatggtgatggcggtgcgtcacgatgcggatcggatgtgcggcttccagttccacccggaatcgatcctcaccacccagggcgcgcgactgctggagcagaccctggcctgggcgctgcagaagctggagcataccaacaccctccagccgatccttgagaaactgtaccaggcggaaaccctgagccagcaggagagccaccagctgttctccgccgtcgtgcgcggcgaagtgaagcctgagcaactggccgccgcgctggtcagcatgaaagtgcgcggcgagcagccgcaggaaattgccggcgccgctaccgcgctgctggaaaacgccgcgccgttcccgcgcccggactacctgtttgccgacatcgttggcaccggtggcgacggcagcaacagcatcaatatctccaccgccagcgcctttgtcgctgcggcctgcgggttgaaagtggcgaaacacggcaaccgcagcgtctccagcaaatcaggctcttctgacctgctggcggccttcggcattaatctcgatatgaacgccgataaatcccgcgccgcgcttgatgagctgggcgtctgcttcctgttcgcgccgaagtaccacaccggtttccgccacgcgatgccggtccgtcagcagctgaagacccgcaccctgttcaacgtgctgggcccgctgatcaacccggcgcatccgccgctggcgctgattggcgtctacagcccggaactggtgctgccgatcgccgagactctgcgcgtgctgggctatcagcgcgcggcggtggtgcacagcggtgggatggatgaagtttcactgcatgcgcctacggtggtggccgaactgcataacggggaaattaaaagctatcagctgaccgccgacgacttcggcctgacgccttaccatcaggcgcagctggcgggcggcaccccggaagaaaaccgtgacattctgacgcgcttgctacaaggtaaaggtgaagccgctcacgaagccgccgtcgccgccaacgtcgccatgttgatgcgtttacacgggcatgaagatctgaaagctaacgctcagcaggtactggatgtgctgcacagcggcgcggcctatgacagagtgaccgccttagcggcaagaggg

SEQ ID NO: 23321 - DNA, 510 bp, Klebsiella pneumoniae
atgtgctggaaagacgtgccgccggatatgctgctggagaaaggcggcatcatcgccctgcttaatctgctgatcgagcacggtttaccggcggttgatgcgctgcgattcgccaccctcaacgccgctattcgcctgcagcgccacgatctcgggctgattgccgccgggcggcgcgccgatctggtggtgtttgattccctggagaaactggtggcccgcgaagtctacgtaggcggtaagctgctggcccgcgcgggcaacctgctgacaccgatcgcgcccgccgcgggcgtcacgccgccgcgcgatactttgcagatcgctcccctccgcgccgatgactttattctgcgcgtccagggcattcgtcacggcatcgcccgcctgcgccatatccgcggcgcgcgcttcacccagtggggcgaagtggctttccagcacagtggcgatgatatcagatctgccggtctccctatagtgagtcgtattaatttcgataagccaggt

SEQ ID NO: 23322 - DNA, 1200 bp, Klebsiella pneumoniae
atgacacaattcacttctcctgtactgcactcgctgcttgatacggatgcctataagctgcacatgcagcaggctgtcttccaccgctacggcgatgtgcatgtggcggcggagtttcgctgccgcggagacgacctgctcggcatctatgccgacgcgatccgcgagcaggtggagtccatgcgcgacctgaggctgcgggatgatgaatatcgctggctgtccacccttcccttttttcgccaggattacctcaactggctgcgcgattttcgctatgacccgagccaggtcacggtcagcaatgacaatggcaagctgaacattcgccttaccggcccatggcgggaagccatcatgtgggaagtcccgctgctggcggtgataagcgagttggtccatcgctatcgttcaccagagatgggcgtcgatcaggcgctcaacacgctggaacataagctaggcgacttcgccaccatgaccgctgacctcgacatgagcgccttccgtctgatggacttcggcacccgccgtcgtttctcacgcgaggtgcaggaaggtattgtgcggcgtctgcagcaggaaccatggtttgtcggcaccagcaattacgatctggcgcgccgtctgaatttaaccccgatgggtacccaggcccatgagtggttccaggcccaccagcagatcagccccagccttgccagcagccagcgggcggcccttgccgcctggctggaagagtatcccgaccagctgggcatcgcgctgaccgactgcatcactatggatgcgttcctgcgcgatttcggtccggaattcgccacccgctatcaggggttgcgccacgattccggcgacccggtggaatggggagaaaaagctatcgcccattatcagaagctgggtatcgatccgctgagcaaagtgctggtcttctccgataatctcgacctggcgaaagccgtcgatctgtatcgccacttcgcctcgcgggtgaagctcagctttgggatcggcacccgtttaacctgcgatctgccgcaggttaaaccgctcaatatcgtgattaagctggtggaatgtaacggcaagccggtggcgaaactctccgacagcccggggaaaactatctgccacgataaggccttcgtccgcgccctgcgcgaagcgttcgacctgccgccgattaaaaaggcaagc

SEQ ID NO: 23323 - DNA, 2613 bp, Klebsiella pneumoniae
atgacacaacagccccaagccaaataccgccacgactatcgtgcgccggagtatctgattagcgatatcgatttgacctttgacctggatgccgcaaaaaccgttgttacggccgagagcaaggtctcccgccacgcggctgcgtctgatgtgccattgcgcctggacggcgaagatctgaccctgatcgctctgcaggtgaacggccagccgtggagtgactataaagaagaaaacaatcagctggtgatcggcggcctgccggagcatttcaccctgaccatcgtcaatgagatcagcccggcggcgaacaccgcgctggaaggcctgtatcagtcaggcgaagcgctgtgcacccagtgcgaagcggaaggtttccgccatatcacctggtatctggaccgtccggatgtgctggcgcgctttaccaccaaaattatcgccgataaagcgaaatacccgttcctgctttccaacggcaaccgtatggcggaaggggagctggagaacggtcgtcactgggtacagtggcaggatccgttcccgaagccgtgctatctgtttgcgctggtggccggtgattttgacgtcctgcgcgattcattccgcacccgctctggccgcgaagtggcgctggagctgtacgtcgatcgcggcaacctcgatcgcgcgccctgggcgatgacctcgctgaaaaactctatgaagtgggatgaggagcgctttggcctcgagtacgacctcgatatctatatgattgtcgccgtcgacttctttaatatgggggccatggagaacaaaggactcaacgtctttaactccaaatatgttctggctcgtaccgataccgccaccgataaagactacctcgatattgagcgcgtgattggtcatgaatatttccataactggaccggcaaccgcgtcacctgtcgtgactggttccagctcagcctgaaagaggggctgaccgtgttccgcgatcaggagttcagttccgacctcggctcacgggcggtgaaccgcatcaacaacgtgcgcaccatgcgcgggctgcagtttgccgaagacgccagcccgatggcgcacccgatccgtccggatatggttatcgagatgaacaacttctacaccctgacggtctatgaaaagggtgccgaagtgatccgcatgttgcacaccctgctgggtgaagaaaacttccagaaagggatgcagctgtactttgaacgccatgacggcagcgccgccacctgcgacgatttcgtgcaggcgatggaagatgcctctaacgtcgacctgtcgcacttccgcctctggtacagccagtccggtacgccaatcgtcaccgtgcatgacgactataatccggagaccgagcagtatacgttgaccatcagccagcgtacgccgccgaccgccgagcaggccgagaagcagccgctgcatatcccgtttgccattgagctgtacgataacgagggcaaggtgatccccctgcagaagggcggtcacccggtacacccggtgcttaatgtgacccaggccgagcagacgtttgtcttcgataacgtttatttccagccggtgccggcgctgctgtgcgaattttcagcgcctgtgaaactggaatacaagtggagcgatcagcagctgaccttcctgatgcgtcacgcgcggaatgatttctcgcgctgggatgcggcgcagagcctgctggcgacttacatcaagctgaacgtcaaccgccatcagcaggggcagccgctgtcgctgccggtgcacgtagcggatgccttccgcgccatcctgctggatgagaagattgatccggcgctggccgctgagatcttaaccctgccgtcagccaacgaaatcgccgagatgttcgcgattatcgatccgatcgccatcgccgccgtgcgcgaagcgctcacccgcaccctggcgaacgaactggcggacgaattcctcgcggtttataacgccaataagctcgacagctatcgggtggagcacgccgatattggtaaacgtgctctgcgcaatacctgcctgcgctatctggcgtttgcggaaccgacgctgggcgataagctggtggcgacgcagtatcaccaggcagataacatgaccgacgcgctggccgccctgtcggcggcggttgccgctgagttgccgtgccgcgatgcgctgatgcaggagtacgatgacaaatggcatcaggacggtctggtgatggataagtggtttatcctgcagtccaccagcccggcagccaacgtggtggaaaccgtgcgcggtctgctgaaccaccgttcgttcagcatgagcaacccgaaccgtgtgcgctcgttaatcggcgctttcgccagcagcaacccggcggcgttccatgctgaagatggcagcggctatcagttcctggtggagatgctgaccgagcttaaccagcgtaacccgcaggtggcgtcgcgcctgattgagccgttgattcgtctgaagcgttatgatgagaagcgacaggcgctgatgcgcgccgcgctggagcagctgaaggggctggagaatctctctggcgacctgttcgagaaaatcagtaaggcgctggcg

SEQ ID NO: 23324 - DNA, 324 bp, Klebsiella pneumoniae
atgaagcgtgattatattcctgatgccggtgatattgtatggatggattttaatccgcaagccgggcatgaacaagcgggccatagaccagctttagtgttaagtcctgcggtatataacggcagaatagggctgttgttgtgctgccctatgacaacaaaaataaaaggttatccattcgaggtgcggaacggagaggggagtgctgtactcgctgaccaggtgaaaagccttgattggcgtgaacggggggccgttaagaaaggtaaagtgtctgcggctgtgttagctgaagtcaggtctaaattaaaagtattgattgga

SEQ ID NO: 23325 - DNA, 1533 bp, Klebsiella pneumoniae
gtgcagaagagcggagtcgttatgcaacagtctaccccttatctctcatttcgcggcatcaccatgacgttccctggcgtaaaggccttgtccgatatcagttttgactgctacccaggacagatccacgcgctgatgggcgaaaatggcgcaggcaaatcgacgctgttgaaaattctcagcggcaactatatcccgaccgcgggccatctgcagatcggcggccagcagatggcattcgccaataccatggaggcgctgaatgccggcgtggcaattatctaccaggagctgcatctgatcccggagatgaccgtcgccgaaaatatctatctcggtcagctgccgcacagaggcggcatcgtcaatcgctcgctgctcaactatgaggcccgcctgcagctggagcatctgggtctggatatcgacccggagacgccgctgaaatatctctccattggtcaatggcagatggtggagattgccaaagcgctggcgcgtaacgccaagattatcgcgttcgatgagccgaccagctcgctctccgccagagagatcgacaacctgtttcgcgtcatccgcgagttgcgggaggagggaagggtcatcatctatgtttcacaccggatggaagagatttttgccctcagcgatgccatcaccgtctttaaagatggccgctacgtttgcacctttgacgatatgccgagcgtcagccacgacgccctggtccaggcaatggtaggccgcaatctgggcgatatttatggctggaagcctcgcccctatggcgaggagcggctgcgcctggaggcggtcaaagcgccgggcgtgcgcacgccggttagtctctcggtgcgcagcggtgaaattgtcggtttgttcggactggtaggtgccgggcgcagcgaactaatgaaaggcctgtttggcggcacgcagataaccggcggtcaggtgtatatcgatggccagcccgtctccattcgcaaaccggcccaggccatccaggccgggatgatgctgtgcccggaggatcgtaaagcggaggggattattccggtgcattccgtgcgcgataacatcaatatcagcgcccggcgcaagcatattcacgctggctgcctgatcaacaacgcctgggaggcggacaacgccgatcaacatatccagtcgctgaatattaaaacgccgggcccggaacagctgattatgaacctgtcgggcggcaaccagcagaaagcgatccttggccgctggctgtcggaagagatgaaggtgatcctgcttgatgagccaacccgcggcatcgacgtcggcgccaaacatgaaatttacaatgtgatctatggcctcgccgcctccggtgtcgccgtggtgtttgcctccagcgacctgccggaagtgctgggcgtcgctgaccgcatcgtggtgatgcgcgaaggacaaatcgccggcgaactgctgcatgaagaagccaatgaacagcaggcgttaagccttgcgatgccaacagtgagccaggctgtcgcc

SEQ ID NO: 23326 - DNA, 507 bp, Klebsiella pneumoniae
atggcagttccaggaatggcacaaaagctaaacacccaaatgaatcttgagtttcacgcctctaacgtttacctaaacttaagtgagtggtgcgcccggcatcgcttcgacggcgccgcgacgtttctgcgcacccgcgcgcaaagcagcatcaccctcaccatgcgcgtatttgactacctgaaaaaagccggcagctggccgatcgtcaatcccgaccacgcctgtaaccctgagtgcacctcgctggaagatctgtttacccaaaccctgagcgattaccaacagcgcagtcgtctgctaagcggtctcgctcaggaagccaaagcgcaaagcgatgacagtacctggcggtttctcacgctgttggcggaagagcagcagcaggatggcctgctattgcaaagcgtgcttgaggaaattcgtaatgccgataaagccggtctcgggatggagcagaccgatcggcgtctgatggctatcgttggagaagcgcagaaagcgcat

SEQ ID NO: 23327 - DNA, 1368 bp, Klebsiella pneumoniae
atggataaaaattcttctgatggcgtgccgttgccgcaacgctatggcgccattctgaccatcgtgcttgggctgaccatggccgtgctcgacggggctatcgccaacgtcgcgctgccgactatcgccagcgatctcaacgcctcaccggcggcttcaatctggatcgttaacgcctaccaaatcgccattgtcatcgccctgctgccgctctccttcctcggcgacatggtcggctatcggcgtatctataagataggcctggtggtgtttatctttacctcgctggcctgcgcgctgtcgcgtagcctcgaaatgctaaccttcgctcgcgtcgcgcagggattgggcggcgccgcgctgatgagcgtcaacaccgcgctgatccgtctgatttatccgcagcgctttcttggtcgcggcatgggtatcaactcctttgtcgttgccgtctcttcggcggcaggcccgactatcgccgcagcgatcctctccctcgcctcatggcaatggctgtttttaattaacgtgcctctcggcatcgtcgcctttgttctggccatgcgctttctgccgcccaacagcgcgcgcagcaaaatcatccgcttcgatctgccgagcgccattatgaacgcccttaccttcgggctgctgatcaccgccctgagcggtttcgcccaggggcagtccactcagctggtgctggcggaggtcgccgctatgctggtggtggggttcttcttcgttcgccgccagctcacgatgcccgtccccctgctgccggtcgacctgctgcgtatcccactcttctctctctctatctgcacttccatctgctccttctgcgcgcagatgctggcgatggtctctctgcccttttttctgcagtcgatgatggggcgcagcgaagtggagacgggtctactgctaacgccgtggccgttagcgaccatggtgatggcgccgctggccggctatttgatcgagaaatgtcatgccgggctgctgggggctatcggtttgctgattatggcctgcggcctgttcggcctggcgctgctgccctcgtcgccctccgatctggatatcatctggcgcatggcgctgtgcggcgccggcttcgggctgtttcagtcgccgaacaaccataccatcgtcgcctcggctccgagccatcgtagcggcggcgccagcggcatgctgggcaccgctcgcctgctcggacagagcaccggcgcggcgctggtggcgctgctattcaatttgctcggtaacaacggcacccacaccgccctgctgctggccggcaccctggctatcgtcgccgcgctaattagcggtctgcgggtcactcagccgcgcgcagcc

SEQ ID NO: 23328 - DNA, 850 bp, Klebsiella pneumoniae
attactggacacactgagctgattggcctgatcgccaccccgattcgtcacagcatgtcgcccaccatgcacaacgaggctttcgcccatctcgggctggactacgtctatctcgcttttgaagtcggtaaccaggagctaaaagacgtggtgcagggcttccgggcgatgaagctgcgcggttttaacgtctctatgccgaacaaaaccgagatttgccagtatctcgataaactgtcgccggcggcacagctggtcggggcggtcaataccgtggtcaacgaccgacggcgtactgaccggacatatcaccgatggcaccggctacatgcgcgcccttagcgaagccggtatcgatatcatcggcaagaagatgaccgtactcggcgccggcggcgcggcaacggcgctctgcgtccaggcagcactggatggcgtgaaggcgatctccatcttcaaccgccgcgataaattcttcgccaacgcagaagaaaccgtggccaagatccgccacaacaccgactgcgagatccatctgttcgatctcgacgatcatgacaagctgcgcgccgaaattgacagcagcgtgatcctgaccaatgccaccggggtcggcatgaagccgttcgaaggccagatgctgctacctgacgacagcttcctgcgtccggacctgatcgtctccgacgtcgtctacaacccgcgcaaaacccacctgctggaagtggccgagaaaaaaggctgccgcacgctgaacggcctggggatgatgctgtggcaaggcgcgcgcgcgttcgaaatctggacgggcaaacagatgccggttgattacatcaagagcattctgttc

SEQ ID NO: 23329 - DNA, 1398 bp, Klebsiella pneumoniae
atggcgaagacgttatacgaaaaattatttgatgcgcacgtagtgtatgaggcgcagaacgaaaccccgctgctgtatatcgaccgccatctggtgcacgaagtcacctctccgcaggcgtttgacggtctgcgcgcccatggccgccaggtgcgccagccgggtaaaaccttcgctaccatggatcataacgtctcgacgcagaccaaagacattaacgcgtccggtgagatggcccgcattcagatgcaggagctgattaagaactgtaaagagttcggcgttgaactgtacgacctgaaccacccgtatcagggcatcgtccacgtcatgggcccggaacaaggggttaccctgccggggatgacgatcgtgtgcggtgactcccataccgccacccacggcgcgttcggtgcgctggcgttcggtatcggcacctccgaagtggagcatgtgctggcgacccagaccctgaaacagggccgcgcgaagaccatgaaaatcgaagtccagggcaaagcggcgccgggcattaccgccaaagatatcgtgctggccatcattggtaaaaccggtagcgccggcggcaccggccatgtggttgagttctgcggcgaagcgatccgcgatctgagcatggaagggcgtatgaccctgtgcaacatggcgatcgagatgggcgccaaagcgggcctggtcgcgccggacgaaaccaccttcaattacgtacgcggccgtctgcatgcgccgaaaggcaaagattttgacgatgccgtagcatactggaaaaccctgaaaaccgacgacggcgcgacgtttgataccgtggtaacgctgcaggcggcggaaattgccccgcaggtgacctggggcaccaacccgggccaggtgatctcggtgacggataacatccccgatccagcgtcgttcagcgatccggtggaacgcgccagcgccgaaaaagcgctggcctatatgggactgaaatccgggatcccgctgacggaagtcgctatcgataaagtgtttatcggctcctgcaccaactcgcgcatcgaagatttacgcgccgcggcggaaatcgctaaagggcgtaaagtggcgccgggcgtccaggcgctggtggtgccgggttctggtccggtgaaagcgcaggcggaagcggaaggtctggataagatctttatcgaagccggctttgagtggcgcttacctggttgctctatgtgtctggcaatgaataatgaccgcctgaatccgggcgaacgctgtgcctcaaccagcaaccgtaactttgaaggccgtcagggccgcggcggacgcacgcacctggtgagcccggcaatggccgcggcggcagccgttaccggccatttcgccgatatccgtaatctgaag

SEQ ID NO: 23330 - DNA, 519 bp, Klebsiella pneumoniae
gtggttgagcaaaacggagaggacctgattatgcgccggatattatcggtattactggaaaacgaatcgggcgcattgtcccgcgttatcggcctcttttcccagcgtggctataatatagaaagcctgactgtcgcgccgacggacgatcccactctctccagaatgaccattcagaccgtgggcgatgaaaaagcgattgagcagattgaaaagcaactgcacaagctggtggatgtcctgcgggtcagcgagctggggcagggggctcatgttgaacgcgaaattatgctggtgaaggttcaggccagcggctatggccgtgaagaagtgaagcgcaacaccgaaatcttccgcggacagattatcgacgtgacgccttctatctataccgtccagctcgccggcaccagcgataagctggatgcatttctggcctcgctgcgcgatgtcgctcggattgtggaagtggctcgctccggcgtggtcggcctgtctcgcggtgataaaatcatgcgc

SEQ ID NO: 23331 - DNA, 489 bp, Klebsiella pneumoniae
gtgaaaaaaatcactacgctagccgtttctctgctgaccgccgcctgcatgtccgctggcgcattggccgcagaccagccgctggaaaaagtcgcgccgttcccgaaagcggaaaaaggcatgaagcgtcaggttattcagctgccgcagcagcaggatgagtcggcgctcaaggttgagctgatgatcggccagacgctggaagtcgactgcaaccatcatcgtctcggcggggaactggaaagtaaaaccctggaaggctggggctatgattactatgtctttgagaagctgagcggcccggtatccactatgatggcctgcccggacggcaaaaaagagaagaaatttgtcactgccggcctcggggatgacgccatgctgcgctacaacagcaaactgccgatcgtggtatacacgccgagcaatgtcgatgtgaaatatcgcatctggcgcgccgacgagactatcggcaacgccgtcgtccgc

SEQ ID NO: 23332 - DNA, 1632 bp, Klebsiella pneumoniae
atgaataaaaagatggccgtaccacgctcacaggcggttggtcccaacagcactcggaccaacacccgccatgagcaagagacggatgtattgttgattggcggcggcattatgagcgccacactgggaacctggctgcaggagcttgagccagactggtctattaccatggttgagcagatgtccagcgtggcggaagagagctcaaacgggtggaataatgcgggtaccggccacgcggcgctgatggagctgaactacacgccgcagaccgccaacggcatcaatatcgacaaagcggtcgacatcaacgaagccttccatatctcgcgtcagttctgggcgcatcaggtgacgcgcggcgtcctgaacaaaccaaaatctttcattaacagcgtgccgcacatgagctttgtgtggggcgaagataacgtcaacttcctccgtgcgcgctacgcggcgctgcagcaaagtgaactgttccgcggtattcgctattctgaagaccatcagcagatcaaagcctgggcgccgctggtgatggaaggccgcgacctgctgcaaaaggtcgccgccactcgctcagaagtgggaaccgacgtcaactatggtgaaattacccgccagctgatcgccggtctgcaaaagcatgataatttctccctacagctgggcaccgtggtgcgtcgcttcaagcgtaacgccgacaagagctggacggtcaccctggcggatgccgacaatcgtcgtcagaagcgggtcattaaagctaaatttatctttatcggcgccggcggcgcagcgctgaccctgctgcaggagaccggcattccgcaggccaaagagtatgcgggcttcccggtcggcggccagttcctggtctgcgaaaatccggaggtggtgaaccaccatctggcgaaggtctacggtcaggccgaagtgggcgcgccgccgatgtcggtgccgcacatcgatacccgtattatcgacggtaaacgcgtggtgctgttcggaccattcgccaccttctcgacccgtttcctgaagaacggttcgctgtgggatctgctggcctcgacgaatacctcaaatattttgccaatgctcaacgtcggcctggacaacttcgatctggtaaaatatctgattagccaggtgatgcagaaagataaagatcgtctggccgcgctgtgcgaatattatccggaagcgcggaaagaggactggcggttgtggcaggccggtcagcgcgtgcagatcattaagcgcgacgcgaagaagggcggggtactgcgcctgggcaccgaagtggtcagcgatgatgaaggcaccgtcgcggcgcttctcggcgcgtcgccaggggcctccaccgcggcgcctattatgctgcagctaatggaaaaagtgtttaaagataaagtcaattcgccggaatggcaggccaagctgaaggcgatcatcccaacctacggtattcgtcttgacggcaatccggcggagatcgagaaagcgctggcgtggaccagtgaagtgctggaactgaaatatgagccagccggggcggtggatgaggtaccgcaggcggagctgaagccgctgagcggcggcaagccgatggcggatatcgcgctc

SEQ ID NO: 23333 - DNA, 1434 bp, Klebsiella pneumoniae
atgtccgttttgcataaaaaaagcgcccgcttgcgtgacgaagagcgcgcccgtctgatttggctcttgagcaccgataaagcggtgacttccgcgctgctgggcaaactgacgctggctgagcgctatgatgaagggacgctggccgatgacctggccgaagtggaaatgctggtctcgcatctgccgccgccggatctcgccgatgcgctggaagcgcttccctatgacgcccgcaccgcgctatggtgcctggtgcccgacgataaacgcggcgaagtgctgctggaggcctcagagaacgtctggggcgacctgatcgacaagatgagcgaccccgagctgctgcaggccatgcagccgctggatatcgatgaacaggtttacctgctgcagcatctgccgcgcaacctaaccggacggctgctggcgaccctgccggccgagaagcgcgcccgtattcgccagattatgcgctacgccgacaacagcgtcgggtcgatcatggagtttgaggtcattacggtgcgaccggaggccaccctggcggcggtgcagcgctatctgcggcgtctcggaaaaatgccggaaaacaccgataagctgttcgttaccacccgtaacaagctgctgctcggcgagctggagctgcagaccattctgctcaatgatgcgcagaagcgggtgggggaggtgatggagggcgacccggtcacctttcagccgcacgaagaggccgagaaggtggcgcgcaccttcgaacgcgacgacttactcagcgccgccgtcattgatgccgacggcaagctgatcgggcgcctgaccatcgatgagatcgtcgatgtggtttatgaagaaaccgataacgatctgcggcggatgggcggcctgagcgatgaagaggatgtcttcgccccggtcagcaaagcggtgaaaacccgctgggcatggctggcggtcaatctgtgtacggcgtttattgcttcccgggtcatcgacggcttcgaacacaccatttcacagctggtggcgctggcctcgctgatgccgatcgtcgccgggatcggcggcaacaccggcaaccagacgatcaccatgatcgtccgggcgatggcgctgcagcagatccagcccggcagctttacctttctgatcctgcgtgaaatgggggtcgccctgattaacggtctggtgtggggcgggattatgggggccatcacctggtggctgtatgacgatccgcagctcggcggggtgatgacgctggccatgatgctcaacctgctgatggcggcgatgatgggcgtgataattccgatggtcatggtgaagctggggcgtgacccggcggtcggctccagcgtaatgatcaccgccatcaccgacaccggcggcttctttatttttctgggtctggcgacgctgtttctgatg

SEQ ID NO: 23334 - DNA, 807 bp, Klebsiella pneumoniae
atgcctgaattaccagaggttgaaaccagccgccgcggcatcgagccgcacctggttggcgcaaccattctgcacgccgtcgtgcgcaacggacggctgcgctggccggtttccgaagagatctatcgcctgagcgacgttccggttctcagcgtgcgtcgccgcgccaaatacctgcttctggagctgccggacggctggatcatcgtccatcttgggatgtcggggagcctgcgcatcctgagcgaagagctgcctgctgaaaaacacgatcacgttgacctggtcatgagtaacggcaaggtgttgcgctacaccgatccacgccgctttggcgcctggttgtggaccagaacgctggaaggccatccggtactggcccatcttggcccggagccgctcagcgacgcgttcaacgccgactatctccagcaaaaatgcgcgaagaagaaaaccgcgatcaaaccctggctgatggataacaagctggtggtgggcgtggggaatatctacgccagtgaatcgctgttctccgccgggatccatcctgaccggctggcgtcctcgctgtcgcgggaagagtgtgagcagctggtgaaggtgattaagctggtcctgctgcgttcgatagagcagggcggcaccacgttaaaggatttcctgcaaagcgatggcaagccgggctacttcgcccaggagctacaggtctatggccgcaagggcgaaccctgccggatctgcggcacgccggtcgtcgggaccaaacatgcccagcgggcgaccttttattgccgtcagtgccagaag

SEQ ID NO: 23335 - DNA, 1125 bp, Klebsiella pneumoniae
atgagtaaattcaggctggctctggtgcggcagaagtaccgcccggacggcggcgcagaacggtttgtctcccgcgcgctggaagccctcgacagcagtcatctgcaactgaacgtcatcacccgcgaatggcaggggccggtgaaaccggactggcagatccatatctgtaacccacgtaaatgggggcgcatcagccgcgagcgcggctttgccaacgccgcgcgcgcgctctggcagcgcgagtccttcgacctggtgcagagccatgaacgtattcccggctgcgatctctaccgcgctggcgatggcgttcatcgccgctggctgcagcagcgctcgcgcattttaccggcctggaaaagccgcctgctgttcgccgaccgttaccaccgctacgtcatgcaggcggagcgcgagatgtatgaagactcacacctgcgcggggtgatctgcaacgccgagatgatcaagcgcgagatcatcgaagactttggcctgccggcggagaagatccacgttatttataacgccattgataaccagcgcttcctgccgccggacgaagagacctttgccgccttacgcgccaaatggcagctaccgctgcaggcgacctgcctgatctacgtcggctccggctttgagcgcaagggactggcggcggcgatccgcgccatcgctcccaccgatcgctacctgctggtggtcggcaaagataaggatcagccgcgctatcaggcgctggcgaagagcctgaactgtgaagcgcgggtgcgcttcttcggcatgcagtcggagacattgcccttctatcaaatggccgatggtctgctgctgccgaccctctacgatccgttccccaacgtcatcctcgaggcaatggcctgcggtctgccggtgatcaccactaccggctgcggcggggcggagtttatcgtcgacggccacaatggttacgtctgcgacgctctggatatcccggcgctacagcaggcggtaatggccctgcccgcgcgcgcgctgggctccgcggaaggcggtcacgcccgcgagcgcattatggcctgcaccagcgagcgactctcaacccagctgctttctctttatcaggatctggtgaaa

SEQ ID NO: 23336 - DNA, 165 bp, Klebsiella pneumoniae
atggctaaaggtattcgtgagaaaatcaagctggtttcttccgctggtactggtcacttctacaccaccacgaagaacaaacgtaccaaaccggaaaaaatggaactgaaaaagtacgatccggttgtacgtcagcacgttatctacaaagaagctaaaatcaaa

SEQ ID NO: 23337 - DNA, 234 bp, Klebsiella pneumoniae
atgtcccgagtctgccaagttactggcaagcgtccggtgaccggtaacaaccgttcccacgcactgaacgcgactaaacgccgtttcctgccgaacctgcactctcaccgtttctgggttgagagtgagaagcgttttgtcaccctgcgcgtatctgctaaaggtatgcgtgtaatcgataagaaaggcatcgatacagttctggctgaactgcgtgcccgtggcgaaaagtac

SEQ ID NO: 23338 - DNA, 2625 bp, Klebsiella pneumoniae
atgagcaagagcaccgctgagatccgtcaggcgtttctcgactttttccatagcaagggacatcaggtagttgccagcagctccctggtgccgcacaacgatccgaccctgctgtttaccaatgcggggatgaaccagttcaaggatgtcttccttggtctcgacaaacgtaattattcgcgtgcgaccaccgcacagcgttgcgtgcgtgcgggtggtaaacacaacgatctggaaaacgtcggttacaccgcgcgtcaccacaccttttttgaaatgctgggcaacttcagctttggcgattacttcaagcaggatgccatcaaatacgcgtgggaactgctgaccggtgagaactggttcgcgctgccgaaagaaaaactgtgggttaccgtttacgagaccgatgacgaagctttcgacatctgggccaatgaagtaggcgttccgcgcgagcgtattatccgcatcggcgacaacaaaggcgcgccgtttgcttctgacaacttctggcagatgggcgacaccggtccgtgcggcccgtgcaccgaaatcttctttgaccacggcgatcacatctggggcggccctccgggaagcccggaagaagatggcgaccgttacattgagatttggaacatcgtcttcatgcagttcaaccgtcaggctgacggtaccatggagccgctgccgaagccgtccgtcgacaccggtatgggtctggagcgtattgctgcggtgctgcagcacgttaactccaactatgacatcgacctgttccgcgatctgatcgccagcgtggcgaaagtcaccggcgcgaccgatctgacgaacaagtcactgcgcgttatcgccgaccacattcgctcctgcgccttcctggttgccgacggcgtgatcccgtcgaatgaaaaccgcggctacgtgctgcgtcgtatcattcgccgcgcgatccgtcacggcaacatgctgggcgcgaaggacaccttcttctggaaactggttgccccgctgatcgatgtgatgggctccgccggcgacgagctgaagcagcagcaggctcaggttgagcaggtgctgaaaaccgaagaagagcagtttgcccgcaccctcgagcgcggcctggcgctgctggatgaggagctgtcgaagctgaaaggcgacaccctggacggcgaaaccgccttccgtctgtacgacacctacggcttcccggtcgacctgaccgccgatgtgtgccgcgagcgcaacatcaaggttgatgaagctggttttgaagccgcaatggaagagcagcgccgccgcgcgcgcgagtccagcggtttcggcgccgactataatgcgatgatccgcgttgacggcgcctctgaatttaaaggctacgatcatctggagctgaacggcaaggttaccgccctgtttatcgacggcaaagcggtggatagcgttagcgctggccaggaagcggtggtgatccttgaccagaccccgttctatgcggagtccggcggccaggtgggcgataaaggcgaattaaaaggcgcgggcttctctttcgcagttagcgacacgcagaagtacggccaggctattggtcatatcggtaaagtcgccagcggctcactgaaagtgggtgacgcggtgcaggccgacgtagatgaggctcgccgtcagcgtatccgtctcaaccactccgcgacgcacctgatgcacgcggcgctgcgccaggtgctcggcacccatgtggcgcagaaaggttcgctggtcaatgataaagcgctgcgctttgacttctcgcattttgaagcgatgaagccggaagaaattcgtgcggtggaagacctggtcaacacgcagatccgtcgtaacctggctatcgaaaccaacattatggatatcgatgccgcgcgcgcatccggcgccatggcgctgtttggcgagaaatacgacgatcgcgtgcgcgttctgcggatgggcgacttctccacggaactgtgcggcgggactcacgcggcgcgtaccggcgatatcggcctgttccgcatcacgtcagagtccggcaccgctgctggcgtgcgccgtatcgaagcggtgactggcgaaggcgcgatggccatcctgcatgcgcagagcgatcagctcaatgatatcgctcagctgctgaagggtgacagccacaatctcggcgagaaggttcgcgccgcgctggagcgtacccgtcagctggaaaaagagctgcagcagctgaaagagcaggctgcggcgcaggagagcgcaaacctctccagcaaagcggaagagattaacggcgttaagctgctggtcagcgaactgaccggcgttgagccgaaaatgctgcgtaccatggttgacgatctgaagaaccagctcggttcgacgatcgttgtattagctacggtagcggatggtaaggtttctctgattgcaggtgtgtctaaggatgtgacagaccgcgtgaaagcaggggagctggttggtatggtcgcccagcaggtgggcggtaaagggggcggtcgtccggatatggcgcaggccggtggtaccgatgcgtctgctctccctgcagcgttagccagtgtgaaaggctgggtcagcgcaaaactg

SEQ ID NO: 23339 - DNA, 1072 bp, Klebsiella pneumoniae
atgttgaagcgtcgctatctggctttacttcccctttgtgtgctcctcgctgcctgcagcagcaaacccaagacccccgcggaaacggagatggcgagtggaaccggcggctttttgctggaaccgcagcataacgtgatgcagatgggcggcgacttcgccaacaacccggcggcggcgcagtttatcgataagatggtggcgaagcacggcttcgacaggcagcagctgcaggagatcctgtcgcaggcaaagcgcctggattacgtcctgcggctgatggatcgtcaggcgccgaccggcctgccgccaaccgggccgaccggcgcctggctgcgctacaagaaacagttcattaccccggataatgtgcagaacggcgtggtgttctggaatcagtatcaggacgcgctcaaccgcgcttatcaggtttacggcgtgccgccggaaatcatcgtcggcattatcggcgtggagactcgctggggccgggtgatgggcaaaacccggatcctcgacgcgctggcgacgctgtcgtttagctacccgcgccgcgccgaatacttctcgtcggagctggaaactttcctgctaatggcgcgcagcgaaagcgacgacccgctggatctgaaaggctctttcgccggggcgatgggctacggtcagtttatgccgtcctcctataagcagtatgcggtcgattttaacggtgacggacatatcaacctgtgggacccggtggatgctatcggcagcgtggccaactacttcaaacagcatggctgggtgagcggcgatctggtggcggtgcaggcgctggggcaggccccggggctggagaatggtttcaagactaaatacagcgtttcgcagctggcggccgcagggctgaccccgacccagccgctgggtaaccatcaggcaggccagcctgctgcggctggacgtcggcaccggctatgagtactggtacgggctgccgaacttctacaccatcacccgctacaaccacagcacccactacgcgatggccgtctggcagctgggcctggcggttgcgcaggcccgcggc

SEQ ID NO: 23340 - DNA, 498 bp, Klebsiella pneumoniae
gtgactgaaccttcatcacgccgctccggctacgcccgcctgctggaccgtgctatccgcattctggcgatgcgcgaccacagcgagcaggagctgcgacgcaagctggtcgctccggtgatgagcaaaaacggtcctgaggcgctggacgccacccccgacgagctggagcaggttgtcgcctggtgtatcgaaaaccgctaccttgacgacaaccgcttcgtcggccagttcatcgccagccggagccgcaaaggctatggtccggcgcgcattcgccaggagctcagccagaaaggcattgcgcgccaggtcgttgaccaggcgatgcgcaaatgcgatatcgactgggtgagccttgccagggagcaggcacagcgtaaatacggcgaaccgttaccttccgcctttactgaaaaagtgaaagttcagcgattcctgctttaccgcggctacctgatggaagatatccaggaaatctggcgaaattttgcagat

SEQ ID NO: 23341 - DNA, 1056 bp, Klebsiella pneumoniae
atggcgatcgacgaaaacaaacagaaagcgttggcggctgcactgggccagatcgaaaagcaattcggtaaaggctccatcatgcgcctgggtgaagaccgcaccatggatgtggaaaccatctccaccggctcgctttctctggatatcgcgctgggcgccggcggtctgccaatgggccgtatcgtcgagatctacggtccggaatcctccggtaaaaccaccctgacgctgcaggttatcgccgcagcgcagcgtgaaggtaaaacctgtgcgttcatcgatgctgaacatgcgctggatccggtctatgcacgcaaactgggcgtcgatatcgacaacctgctgtgttctcagccggacaccggcgagcaggcgctggagatctgtgacgcgctggcgcgctctggtgcggttgatgttatcgtcgtcgactccgtcgcggcgttgacgccgaaagcggaaatcgaaggcgaaatcggcgactctcacatgggccttgcggcgcgtatgatgagccaggcgatgcgtaagctggcgggtaacctgaagcagtccaacacgctgctgatctttatcaaccagatccgtatgaaaattggcgtgatgttcggtaacccggaaaccactaccggtggtaacgcgctgaagttctacgcctctgtgcgtctggacattcgccgcatcggcgcggtgaaagagggcgacaacgtcgtcggcagcgaaacccgcgtcaaagtggtgaaaaacaagatcgccgcgccgtttaaacaggccgaattccagatcctctacggcgaaggcatcaacttctacggcgagctggtagacctcggcgtgaaagagaagctgattgagaaagcgggtgcctggtatagctacaacggcgacaaaatcggtcagggtaaagcgaacgcgatcacctggctgaaagagaacccggcggcggcgaaagagattgagaagaaagtgcgcgaactgctgctcaacaatcaggatgcgaagccagacttcgttgttgacggcaacgacgcagaagaaaccgaacaggatttc

SEQ ID NO: 23342 - DNA, 878 bp, Klebsiella pneumoniae
agcagagctgatgttgccgatcttatttatttcatggcgattgcacgtcatcgcagcttcagccgtgcggcaattgaactaggtgtcagtgcatcagcgctgagtcatgccctgaaggggctggaaacccggctcggggttcgcctgcttaatcgcacgaccaagagcgtcacccctacggcagctggtgaggaactggttcagtctgttcttcagcctttcgacaccatagaaggcgcgcttgaatcgcttaaccggtatcgcaatacccctaccggtcgtatccgcatcaatgcagccgttgaagcggcaaatcttttgcttgcgccggtcatgcccgcttttatggatcgctatcccgatattgaaatcgatattgtggccagcaaccgaatggttgacgtgactgatgcgggcttcgatgccggcatccgctacggtggcaccgtcccggaggacatggttgcccggcgtttatctgccgatattcgctgggttatcgcggcctcccctgattacctggaacgctacggaacgcctgaacatccggatgatttattacaccatcgctgcatcagcaatcgtctcggtgacgatcgggtttatcgctgggaacttgcgcgagacggcgaaacataccaaatgacagtgccaggctcagtgacggtcaatcatgccgaaacgggtctggtggccgtattgggcggggctggcctaatgtattttccggagcctcttgttgcaccctatgtcaaggatggacggctccgtctggtgcttacggaatggtccccactggaggaaggttttcatatctattattcaagccgccggcaatgccgaccgggcttcgccttctgattgagttcatacaggag

SEQ ID NO: 23343 - DNA, 273 bp, Klebsiella pneumoniae; identical to SEQ ID NO: 19918

SEQ ID NO: 23344 - DNA, 501 bp, Klebsiella pneumoniae; identical to SEQ ID NO: 19919

SEQ ID NO: 23345 - DNA, 693 bp, Klebsiella pneumoniae
atgcccgctatcgctccgctcgcctcaccgccgcaaagtcaggaacagttgctggcccaggcccgccagctggccggctattcgctgggcgagctggcggcgctggcggggatccccattccgcgcgatctgaagcgcgataaaggctggacgggcattctgctggagctgtggctgggcgccagcgcaggcagtaaacccgagcaggatttcgccgcgctgggggtcgagctcaaaacgatccccatcgacagccggggacgcccgctggagaccactttcgtctgcgtcgccccgttaaccggcaatagcggcgtcacctgggagagcagccatgtacggcataagctgcagcgcgtcctgtggatcccggtggagggtgaacgcaccatcccgctggcggcgcggcgcgtcggcgcaccgctgctgtggagcccggacgaagacgaggagcgccagctgcgcatggactgggaagagctgatggatctcattgttctcggtgaggtcgagcgcattaccgcccgccacggcgaggtactgcagttaagaccgaaagccgccaacagcaaggcgctgaccgaagccatcggcgcccgcggggagacaatcctcacgctgccgcgcggtttctatctgaaaaagaattttaccgccgctctgcttgcccgccatttcttgttacaacacgat

SEQ ID NO: 23346 - DNA, 771 bp, Klebsiella pneumoniae
gtggaaaaagcgatagttccgccggaaaagaagccctatcaggagattggtgatgacctgcgcgcccagatcgcgcaggggcgctacccggttgggtcgcgtttgccgccggaacgccatattgccgaaacctatggcgtcagccggaccatcgtgcgcgaagcgctgctgatgctggagctgcaggggacggtggatattcgtcagggatccggggtgtatgtcatgcgcattccccacgagaacgacagcgaagaggagcagctgctcagcagcgacgtcggcccgtttgaaattctccaggcgcgccagctgctggagagcaacatcgccgcctttgccgcgaaaatggccacccgcgccgatatcgacaatctgaagcggattattgaacaggagcagcgggcaatcgctctcaacgacaccgcgcaggataacgctcgtctgttccatctggtgctcgccggggcgacgcagaaccagatgctgttggcgacggtagagcggatctggctgcagatggacagcagcccgctgtggcagcagttcaatgtgcatattgccagccgcgcctggcggctgaaatggctcggcgaccggcagaccctgctcgccgcgctgcggcgtcgcgatgtgatgggcgcctggcaggcgatgtggcagcatctggaaaacgtcaaaaacagcctgctggagctgtccgatgaggacgcccccgactttgacggctatctgttcgactcagtgccgatttttcaggggaagctggta

SEQ ID NO: 23347 - DNA, 3137 bp, Klebsiella pneumoniae
ctgaagagccattctcatatcgcggcgatcgatatcccgcttagcggtaaggagaaagcatggctggcggcgcagcctacgctgaccgtcgggacctggcttcccgagaggacgcccatcgtctatgacggcgacgagaaaagttatcagggcattaacgccgactatctggcgctgatggcgcacagcctcggactgaaggtgattatccgccagtatgacaccgagcagcaggcgctcaccgccctggccgaccgccaggtggataccctgctcactcaggtggcgcaccgggatgcgctcgccccgggcctggatcaatccgcgccgctgcttaaaacctggccgacgctggtcacctcgctgaaatcccctctgccgccgctgaccactgaccgccgcgtcacgctggcctgcacccgcgattgcgcttttttcgatattattcagcaggcgtttcccaacgccaaaatcaccctttatgatagcgactatcaggctctcgcctcggtggtcagcggcgagaatcagtattttatcggcaacaacatcaccactggccactgcatctcgaaatatttctcgcaatcgctggttatcgcgcactattttcgtcagcaggagcaacacaaccgctttgtcacccgtgacgatcggccagagctgcatcaactcctcgaccgttttatccatgccgtcgacagcgacaccgcgatgcggatcatgcaaactggctcaaccgtggcgatctgtcgtttctcaataccccgcttacctttagccccgaagagctgcgctggctgcagaagcatcgtcgcgtccgcctgctggtgaacccctattttccgccatttaccctggtggataacgaggatgaactgcgcggcatcatggccgatatgctgaatattgtctcactccagaccggcctgcagtttgaccctattctggtgcgcaaccgtcaggctctggcaaagcgcatggaaaaagaggactgggcgatcatgcccgccgccaccctgatcccacagccgcaggcctacgtcaccctcagcgatccgctcattaacgtggcctttgtgctggtcgcccgcggcagcgcccccgaccagcatctgctgacgcgctcggcgcggatcgccctgccggtcgggcctatcgccgcccatgatctgaaagcgcgttttccgttgattaactgggtggaaacggataacgttggcgtcgccatgaagatggtagaggaaggcgaagtggatgccgccgtagcctcggagctttccgcccgctatatgatcgaccactactatccacagggtctgcactacacccgcatcgatggactccccgtcgcggccattcggctggccatcccgcgcgatgaaccggtgctggccgccattcttaacaaagcgctgcaggttattccgccacgggatattctgcagatgaccgagaagtggtcgaaaatctccagtcagcaaatagagaactggagccagtacagccgccagttttaccagctgatcgcctttgcgctggtgctgatcgccatcagcctcggctggggactctccctgtgtcgggaagtgcgcaaacgtaaagactcccagcagcggctcgaggaggagttggcgcagaaggaggccctctcctgtgcgctggaacgcgaaaaagacaaagcgattcaggcgacaaaagccaagagccgctttctggccagcatgagccacgagctgcgcacgccggtgagcgccatcgtcggctttctggagctgctggcgaaacctgagctgaacgtcagccagcgtaaagaggcgatcgagctggcggggtcgacggcgcaaaccctgctgggacttatcggcaatattcttgatatcgacaagattgaatcgggaaaatactaggttaccccgcagtggagcgatgtcgcacagttagtgtcgcagcagtgtcataccttcgatgcgctggcgcagcaaaagggcatcgatctgcactaccataacgcgctgcaggaagggaccatgctgtgggtcgacccgcaggcgctacggcaaatcctcaataatctcatcggcaatgcgctgaagtttaccgtcgaaggcgcaattcaggtctcctgccggctgacgccggcgaatgagacacagggagagttggccctcatggttagcgacagcggctgcgggatcagtgaagcagagcaggccaccctcttccaccgctatgcccaggcgcgccagggacgacagcagaccggctccggactggggctggtcatttgcaaagagctggttgcgctgatgcagggtcgcctggagatggtcagccgtccgggcgtggggaccactttcactatcacgctgccggtcaaggcgagccgctgcgcgatccacgcgccgcaggcgtcgcccgccagaccgcaggctctacccgggctggcgatactgatagcggacgatcaccccaccaaccggctactgctcaagcgccagctcagcactatcggctatagcgtcgatgaagcctgcgacggtgaagaggcagagaataagctcgccagcaaacattacgatctgctgataacggacctcaatatgccgaagaaagatggcctggcgctggcggcctcgctacgccgtcgctatccgggcctggtaatttggggcgtgactgccagcgcgctgccgcaatcgcgggaggcgtgtctggccagcggcatgaatatgtgtctgtttaagccggtgtcggtccagacgctgagtcatgagctcagccgtttagcggtgggccgagcatcacctcacgctacccggcacctgaagctcagcgtgctgagcgagaatacggggggagaccaggcgctgatgaatgagatgctggagacgttccgcgatgcgtcggccgcggatttacaggctgccggacaggcaatcgcccggcatgagccgcagatttttctgcgggcgctgcaccgtctgcacggttcagcacaaattctggggattactgcgctacaacaactgtgcgccccttttgaggcaaagcggcctgattcgctgacgccggcaagctgtctggaggtggtacagcgcatcaccggcgtcatgcgcgagatcgatggcgaaatc

SEQ ID NO: 23348 - DNA, 1011 bp, Klebsiella pneumoniae
atgaccatgattgaaacggcaaaagcgccgcaagcgcagagccacagcgggctactgctggacgtgaaagatcttcgcgtcacctttaaaacgccggatggcgacgtcaccgccgtcaatgatctgaacttcaccctgcaggcgggcgagacgctcggcattgtgggcgaatccggctccggtaaatcgcaaaccgccttcgccctgatgggactgctggcggccaacggtcgcatcgggggttccgccacctttaacggtcggcaaatcctcaatttgcccgagcgtgagctgaacaaactgcgcgctgaacaaatctcaatgattttccaggatccgatgacctctcttaacccctatatgcgggtgggcgagcagttaatggaagtcctgatgctgcataaagggctgagtaaagccgaagcgtttgaagagtcggtgaagatgctcgacgcggtaaaaatgccggaagcgcgtaagcgcatgaaaatgttcccgcacgagttctccgggggcatgcgtcagcgcgtgatgattgccatggcgctgctgtgccggccccggctgctgattgcggatgaaccgaccactgccctggacgttaccgtgcaggcgcagatcatgacgctgttgaatgagcttaaacgcgaattcaacacggccattatcatgatcacccacgaccttggggtggtggcaggtatctgcgataaagtgctggtgatgtacgccgggcgcaccatggagtacggtcaggcgcgcgatgtcttctatcaaccgtcgcacccatactctattgggctgttgaatgcggttccacgtctggatgcggaaggcgatgcgttgttgaccattcccggcaacccaccgaacctgctgcgattgccgaaaggctgtccattccagccgcgttgcccgcatgccatggagcagtgcagcagcgcgccgccgctggaatcgttcgcgccaggccgcctgcgcgcctgctttaaaccggtgggggatctgcta

SEQ ID NO: 23349 - DNA, 831 bp, Klebsiella pneumoniae
gtgggtatgctttctgccgctcgtctgcggctttatcatttacttttcgatcagaaccgacgttccggccgccgctttgaagggctgtgcggacttttcgccctgctcagcgtactggtgatatttatcgagtcgggactgggcacgcaatatcacctgacattagatgaatggcatattttcgtctggctggagctgctggtgaccgcggtctttaccctggaatacctgctgcgtatcgctacctggcccaatccgctccactatattttcagcttttgggggctgattgacctggcgacgattttaccgctgtatgtgatgtggctatggccggaaattagcctcaattatgtattcgcctggcgggcaatgcgggcgatccgcgcgctgcgtattctcaaactactgcgctttatgccttcgctcaacgtgttctggcgagcgattgtcagcgcgcgccatcagctgatcctgttttattcgtttatcgccattgtgatggtgattttcggctcgttaatgtatctgattgaggggccggaatacggctttaccacgcttaacgcctcggtctattgggccatcgtgaccatcaccaccgtcggctacggagacatcacgccgcacacgccgttgggtcgcatcctggcctccattcttatcctgatcggctactccattattgccataccgaccggacttatcaccacgcatatgaccagcgccctgaatcgtcgacgacagcagcgcctgtgtccgcagtgtcagcagggcgaccatgacgataacgcccgtttctgccatgcctgcggtcatgccttgccgaag

SEQ ID NO: 23350 - DNA, 645 bp, Klebsiella pneumoniae
atgttttcaataagccctgtatttttttgggctaacatttatgtacctgccgattttgaggattattgtgtgaataccctgaaaaaaaccgcattgctttctgtacttgccttatatattcctgtgtcgcaagccgcggctaaggaatacagtcttgatccacagcatacctcggttgtgatctcctggaaccatttcggcttctcaaaccctaccgcctatgtctctgatgtttcagggaaactggcctttgataaagagaatccggagaaatcctcggtgaacgtcacgctgccagtgaaaaccattgacgctcacgtcaaggcgttaacggatgagtttttaggcaaagagtattttgatgttaaaacgtttcccgacgccactttccagagtaccaaagtggaaagcaaaggcgacaataaatatgatgtggaaggtaatttgaccattaaaggcatcaccaaaccggtggtcctgcatgccgtcctgaataagcaggatatgcacccaatggtgaaaaaagaggccattggatttgatgccaccggggtgataaaacgttcagactttaagcttgataaatatgtgccggcggtaagtgataacgtcaccatcacgttatccacggaagcctatgcaaaa

SEQ ID NO: 23351 - DNA, 660 bp, Klebsiella pneumoniae
atggctttccgtgaccaacctttaggcgagctggcgctgaccatcccgcgcgcctccgccctgttccgtcaatacgatatggattactgctgcggcggcaaacagaccctggcgcgcgccgcgtcgcgcaaagcgctggatgtcgcggtgattgaagccgagctggcgaaactggccgaacagcctctctcccgcgactggcgcgcggcgcccctcgcggagattatcgaccatatcatcgttcgctatcacgaccggcaccgtgaacagctgccggagctgatcctgcaggccaccaaggttgaacgcgtccatgccgataaaccgaacgtgccgaaaggactgactaagtacctgaccatgctgcatcaggagctttccagccacatgatgaaagaggaacagatcctgttcccgatgatcaaacagggaatgggcgcccaggccgggaggccgatcagcgtgatggaaagcgagcatgatgaagcgggtgaactgctggaagtcattaagcacatcacccacaacgtgacgccgccgccggaagcctgcaccacctggaaggcgatgtataacggtatcaacgagatgatcgacgatctgatggaacacatcagcctggaaaataatgtgctgttcccgcgcgccctcggcggaaag

SEQ ID NO: 23352 - DNA, 447 bp, Klebsiella pneumoniae
atgggatcattaaattttgtgaaagaagcgggcgagaaaatatgggatgccgtctccggcgacagtaaagaagatcgggctgaaaagctgaaaaaacatatcgatggacttaatctgcctggcgccgaaaaggtcaatattgatgttgcggaagatggcaccgcaacggtcactggtgatgtcgcttcgcaggaggataaggaaaaaattctggttgcggtcgggaatgtcactggcgtaggccaggtcagtgacggcgttaaggtgacgcaaagcggggcggaaagtcgtttttacacggtcaaatccggtgacactctgagcgcaatctcaaaagcgatctatggctcggccaatgagtatcaacgcatttttgaagccaataaaccgatgctgacccatcccgacaaaatctatccgggtcaggtgctgattatcccggcgaag

SEQ ID NO: 23353 - DNA, 1040 bp, Klebsiella pneumoniae
ctgccggttggcgttagcagcggttatgtaatgactgtgcttggcccactgccgattaacgaaatgggcgttactctgatgcatgagcatattctgctggatgcctccggcaaatgggtgccgccctgctgctgcagcgatcgccatcttgccgaaatgccggtgaaaatggaaaaccttggcgaactgtcgctcaacccgctgatgagccgcgataactgtcagctgtttgatgtcgacgttgcgattgacgagctgactaaatatcgcgcccttggcggagaaacggtagtcgacccgaccaatatcggcattggccgcgatccgaaagcgctggcgcgcatcgcgcggtgaccggtctgaacatcattatgggtaccgggctctatctggaaccttcgcaccctgagtgggtaaaaatcagcagcgtcgaacagctgaccgaacggctgatttacgatcttggcggcgcggaggagaaaccggaggtgctcgccgggctcatcggcgaaatcggtatctccagccgctttacgccggatgaggagaaatccctgcgcgctgcgggtcgggccagcgccgcgaccggcgtgccgatcgaggtccatctgcccggctgggagcggctgggccatcgggtgctggatattctcgagcaggaaggcgccgatttacgccataccgtgctgtgccatatgaatcccagctttgccgataagcgctaccagcgcgaactggcgcagcgcggggcgtttctcgaatacgacatgattggcatgagctattactacgccgacgagtcggcgcagtcgccctccgacgaggagaacgcccgcgcgatccgcgagctgattgacgacggctacatccagcaaattctgctgtcgcaggacgtcttcctgaaaaccatgctcacccgctacggcggccacggttatggctacatactcaagcattttgttccccgtctgcggcgccacggcgtcagcggcgaacaacttgaaaccttaatgattggaaacccccagcgggtctttggc

SEQ ID NO: 23354 - DNA, 432 bp, Klebsiella pneumoniae
gtgagtctgagagaagctatcgaaaaggctgaagaggctggagtagatttagttgaaatcagccctaacgccgagccgccagtttgtcgtatcatggactacggcaagttcctttatgaaaagagtaagtcttctaaggaacagaagaagaagcagaaagttatccaggttaaggaaattaaattccgccctggtactgatgaaggtgactatcaggtaaaactccgcagcctgattcgctttctcgaagatggcgataaggccaagatcacgctgcgtttccgcggtcgtgagatggcccaccagcagatcggtatggaagtgcttaaccgcgtgaaagacgatctggttgaactggcagtagtcgaatccttcccaacgaagatcgaaggccgccagatgatcatggtgctcgctcctaagaagaaacag

SEQ ID NO: 23355 - DNA, 195 bp, Klebsiella pneumoniae
atgccaaaaattaagaccgtacgcggtgctgctaagcgcttcaaaaaaaccggtaaaggtggttttaagcacaagcacgctaacctgcgtcacattctgactaaaaaagctaccaagcgtaaacgtcacctgcgtccgaaagccatggtttccaaaggcgatctgggcctggttatcgcgtgcctgccgtacgca

SEQ ID NO: 23356 - DNA, 354 bp, Klebsiella pneumoniae
atggctcgcgtaaaacgtggtgtaattgcacgtgcacgtcacaagaaaattttgaaacaagctaaaggctactacggtgcgcgttctcgcgtataccgcgttgccttccaggctgttatcaaagctggtcagtacgcttaccgtgaccgtcgtcaacgtaaacgtcagttccgtcaactgtggatagcacgtatcaccgcagcagcacgtcagaacggtatttcttacagcaaattcatcaatggcctgaaaaaagcctctgttgaaatcgaccgtaagatcctggctgacatcgctgtattcgataaagtagcgttcaccgctctggtcgaaaaagcgaaagcagctctggca

SEQ ID NO: 23357 - DNA, 981 bp, Klebsiella pneumoniae
atgtcacatctcgcagagctggttgccagtgccaaggcagccattaacgaggcatcagatgttgctgcgctggacaacgtccgcgtggaatacctgggtaaaaaagggcatctgaccctgcaaatgaccaccctgcgtgagctgccgccggaagagcgtccggcagccggtgcggtcatcaacgaggcgaaagagcaggtgcagcaggcgctgaacgcgcgtaaagctgaactggaaggcgcagcgctgaatgcgcgtctggccgcagagaccattgacgtctcgctgccgggtcgccgcattgaaaacggcggcctgcatccggttactcgcaccatcgaccgtattgaaagtttcttcggtgagctcggctttaccgtggcgacgggcccggaaatcgaagacgattaccacaacttcgatgcgctgaatattccgggtcaccatccggcgcgcgctgaccacgacactttctggttcgatgccactcgcctgctgcgtacgcagacctccggcgtgcagatccgcaccatggaaaaccagcagccgcctatccgtattatcgcgccgggccgcgtctatcgtaacgactacgatcagacccacaccccgatgttccatcagatggaaggtctgatcgttgataaaaatatcagcttcaccaacctgaaagggacgctgcacgacttcctgaacaacttctttgaagaagatctgcaggtccgcttccgtccgtcctacttcccgttcaccgaaccgtctgcggaagttgacgtaatgggtaaaaacggcaaatggctggaagtgctgggctgcgggatggtgcacccgaacgtgctgcgtaacgtgggtatcgatccggaagtctactccggcttcgccttcggcatgggcatggagcgtctgaccatgctgcgctatggcgtcaccgatctgcgcgcgttcttcgaaaacgatctgcgtttcctcaaacagtttaaa

SEQ ID NO: 23358 - DNA, 984 bp, Klebsiella pneumoniae
atgctgactctcgcccatcttcaacagcgccgcagccggcgttggctcttcggattaacgctgttgctgctggtcaccctgctgatcagcctgtgcgcgggggagcaatggatcccgcccggcgagtggctcagcgccaaaggtcagctgtttatctggcagatccgcctgccgcgaaccctggcggtgctgctggtgggggcggcgctggcgctctccggggcgattatgcaggcgttgtttgaaaatcctctggcggagccggggctgctgggggtctccaacggcgcgggcgtcgggctgattgccgccgtcctgctgggcaaaggagtcttgcccggctgggcgctcggcctgtgtgccatctttggcgcgctgctgatcacttttattctgctgcgttttgcccgccgccatctgtctaccagccgtctgctgctggcgggggtggcgctggggatcatctgcagcgccctgatgacctgggcagtctacttctccacctcttttgacctgcgtcagctaatgtactggatgatgggcgggtttggcggcgtcgactggcaacagctgtggctgatgatagccctcctgccggtgctctgctgggtctgtctgcagtcgcaacccctgaatttactggcgctgggcgaagtctccgctcgtcagcttgggctgccgctgtggctgtggcgcaaattactggtggtggcgaccggctggatggtcggcgttagcgtggcgctggcgggggcgattggctttatcggtctggtgatcccgcatattctgcggctatgcggcttgagcgatcaccgggtgttgctcccggcctgtatgctggccggggcaagcgccttgctgggggcggatatcattgcccggctggcgctttccgccgcagagctgccgattggcgtggtgacggcgaccctgggcgcgccggtctttatctggttgctgctgcgttcgcgggggcgggga

SEQ ID NO: 23359 - DNA, 2385 bp, Klebsiella pneumoniae
atgaaattcagtgaactgtggttacgcgaatgggttaacccggcgatcgacagcgaagcgctttccgatcagatcaccatggcgggcctcgaagtagatggcgttgagccggtcgccggcagcttcaacggcgtcgttgtcggtgaagtggtggagtgcggtcagcacccgaacgccgacaaactgcgcgtcaccaaagtcaacgtcggcggcgaacgcctgctggacatcgtctgcggcgcgccaaactgccgtcaggggctaaaggtcgcggtagccaccatcggcgccgtgctgccgggcgatttcaaaatcaaggccgcgaagctgcgcggcgagccgtctgaggggatgctgtgctccttctccgagctgggtatttccgacgaccatagcggtatcgtcgagctgccggcagatgcgcccatcggcaccgatattcgcgaatacctcaagcttgacgataacaccatcgaaatcagcgtcacgccaaaccgcgccgattgcctgggcatcatcggtgtggcgcgcgatgtcgctgtcctgaacaaagcgccgctgaacgcgccggaaatcacgccggttgccgcgacgattgacgacgtgctgccgattcaggttgacgcgccgcaggcttgcccgcgctatctggggcgcgtggtgaaaggtatcaacgtcaaagcgccgacgccgctgtggatgaaagagaagctgcgccgctgcgggatccgctccatcgacgcggtggttgacgtgaccaactatgtgctgcttgagctgggccagccgatgcacgcctttgaccgcgaccgtattgaaggcgggatcgtggtgcgcatggcgaaagaaggggaaaccctggtcctgctcgatggctctgaagcaaagctcgacagcgacacgctggtcattgcagaccataacaaagcgctggcgatgggggggatcttcggcggggaacactccggcgttaacgacgaaacccaaaacgtgctgctggaatgcgcgttcttcagcccgctgtccattaccggccgcgcgcgccgtcatggcctgcacaccgatgcctctcaccgctatgagcgcggcgtcgatccggccctgcagtataaagcgctggagcgtgccacccgtctgctgatcgacctctgcggcggtgaagccggcccggtcattgacgttaccagcaaagagaatctaccaacacgcgccaccattacgctgcgtcgcagcaagctggatcgcctgattggccaccatatcgctgacgcgcaggtcaccgacattctgcagcgcctcggctgcgaagtgacggttggcgagggcgaatggcaggcggttgcgccgagctggcgtttcgacatggagatcgaagaagatctggttgaagaagtggctcgcgtttacggctacaacaacattcctgacgagccggtgcaggcgggtctgatcatgggaacccaccgcgaagcggacctgtcgctgaagcgcgtgaaaacgctgctgaacgacaaaggctatcaggaagtgatcacctacagcttcgtcgacccgaaagtccagcagctgatccacgccggggaagaggcgctgatcctgccaagtccgatctccagcgaaatgtcggcgatgcgcctgtcgctgtggaccggcctgctgggcaccgtggtctacaaccagaaccgtcagcagagccgggtgcgcatctttgagagcggcctgcgctttgtgccggacaccaatgcgccgctgggcattcgtcaggatgtgatgctggccggggcgatctgcggcaaccgctacgaagagcactggacactggcgaaagagacggtcgatttctatgatctgaaaggcgatctggaagccgttctggatttaaccggaaaattagcggatatcgaattccgtgctgaagcgaccaccgcgctgcatccgggacaatccgcagcgatttatcttaaaggtgaacgcattggtttcattggggttgttcatcctgagctggaacgtaaactggatctgaacggtcgcactctggtgttcgaactggagtggaacaagctcgcagaccgcgtggtgcctcaggcgcgcgatatttcccgcttcccggcgaaccgtcgcgacatcgcggtgctggtcgcggaaaacgtggctgccgccgatgttttagccgaatgtaagaaagttggcgtaaatcaggtagttggcgtaaacttatttgacgtgtaccgtggtaagggtgtggcggaagggtataagagccttgcgattagcctgatcctgcaggataccagccgtacactcgaagaagaggagattgccgctaccgttgccagatgtgtagaggcattaaaagagcgattccaggcatcattgagggat

SEQ ID NO: 23360 - DNA, 1446 bp, Klebsiella pneumoniae
atgcaactcaacgatatgacactgtttcgccagcaggcgctgatcgatggccagtggcgcgatgcgcccaacggcgacgtgattgcggtcaccaacccggccaacggcgagcagctcggcagcgtgccgaaaatgggcgccgatgaaacccgcgaagcgattgaagccgccaatcgcgccctacccgcctggcgcgccctgaccgccaaagagcgggcgaacattctgcgccgctggttcgatcttatgatggagaaccaggacgatctcgctcgcctgatgaccctcgagcagggaaaaccgctggcggaagccaaaggcgaaatcagctacgccgcctcctttattgagtggttcgccgaagaaggtaagcgcatctacggcgacaccattcccggccaccaggccgacaagcgcctgctggtgattaagcagcccatcggcgttaccgccgccatcacgccgtggaacttcccggcggcgatgatcacccgcaaagcgggcccggcgctggccgccggctgcaccatggtcctgaaaccggccagccagacgccgttttccgcgctggcgctggccgaactggcgaatcgcgccgggatccccgccggagtattcaacgtggtcaccggctccgccggcgcggtcggcggcgaactgaccagcaacccgctggtgcgcaagctctcctttaccggctctaccgagattggccgccagctgatggagcagtgcgcgaaagacatcaaaaaagtctccctggagctgggcggcaacgcgccgtttatcgtctttgacgatgccgacctcgataaagccgtcgagggggcgctggcgtcgaagttccgcaacgccgggcagacctgcgtctgcgccaaccgcctgtacgtccaggacggggtgtatgaccgtttcgccgagaagctgcagcaggcggtggaaaaactgcgcattggcgacggcctgcaggacggcgtcaccaccggcccgctgatcgacgagaaagccgtggccaaagttgaagaacacattgccgatgccatcgccaaaggcgcgaaggtggtcaccggcggcaaaccgcacgccctgggcggcaacttcttccagccgaccatcctggtcaacgttcccgacagcgccaaagtggcgaaagaggagaccttcggcccgctggccccgctgttccgctttaaagatgaagccgacgtcattgcccaggccaacgataccgagttcggtctcgccgcctatttctacgcccgcgatctgagccgcgtcttccgcgtcggcgaagcgctggagtacggcatcatcggcatcaataccggcattatctccaccgaagtcgcgccgttcggcggcgttaaggcctccggcctcggccgcgaagggtcgaagtacggcatcgaagattacttagaaatcaaatatatgtgcattggcctt

SEQ ID NO: 23361 - DNA, 177 bp, Klebsiella pneumoniae
gtggtgcgtaacggcaaaagcaccgccggacatcagcgctatctctgctctcactgccgtaaaacatggcaactgcagttcacttacaccgcttctcaacccggtacgcaccagaaaatcattgatatggccatgaatggcgttggatgccgggcaaccgacccgcattatgggcgt

SEQ ID NO: 23362 - DNA, 1398 bp, Klebsiella pneumoniae
atggggcaactgtcgcaatcacaggatttaggggcggggctgaagtcgcgccacgtcacgatgttatctatcgccggggtgatcggcgcgagtttatttgtcggctccagcgtcgccattgccgaggcaggcccggcggtgctgctggcctatttgtttgccgggctgctggtggtgatgattatgcgtatgctggccgaaatggcggtcgccacgccggataccggctccttttccacctacgccgataaagccatcggccgctgggcggggtataccatcggctggctatactggtggttctgggtcctggttattccgctggaagccaatatcgcggcgattattctgcattcgtgggtgccgggcgtcccggtgtggttgttctccctggtcatcactctcgccctcaccggcagtaacctgctgagcgtcaagaactacggcgaattcgagttctggctggcgctgtgcaaagtgatcgctattctggcgtttatcgtactgggcgcggtcgccattaccggcttttatccctatgccgaagtgagcggcatttcgcggctgtgggaccacggcggctttatgccgaatggcttcggcgcggtgctgagcgcgatgctgatcaccatgttctcgtttatgggcgcggagatcgtcaccatcgccgccgccgaatcggataccccggataaacatatcgtgcgcgccaccaactcggtgatctggcgtatctctattttttatctgtgctcgatctttatcgtcgtcgccctcatcccatggaatatgccggggctgaagagcatcggctcctaccgctcggtgctcgagctgctgcatattccctatgccaagctgattatggacggcgtgatcctcctgtcggtcaccagctgtctgaactcggcgctgtataccgcctcgcggatgctctactccctgagccgtcgcggcgatgcgccggccattatgggccggaccaacagcagcaaaacgccatacgtggcggtgctgctctccaccggcgcggcgttcctcaccgtagtggtgaactactatgcccccgccaaggtgtttaaatttctcatcgacagctctggcgccatcgccctgctggtctatctggtgatcgccgtttcacaactgcggatgcgcaaaatccttcaggcgcaaggcggtgagatccgtctcagaatgtggctctatccatacctgacctggctggtgatcgcctttatcaccttcgtgctggtggtgatgctgtttcgtccggcgcagcagctggaggtgatctctaccggcctgttagctctgggaattatttgtacggtaccgattatgtcacgctggaaaaagctggtattgtggcaaaaactgccgctgcaaaatacgcgt

SEQ ID NO: 23363 - DNA, 627 bp, Klebsiella pneumoniae
atgaactggcaactcatctcattttttggcgatagcaccgttttgctgcccagcgcagcggcgctgtttattgtcctgatgctgcgtaaaacgtcgcggttgctggcgtggcagtggagtttgctgttcggcatcaccggcgctatcgtctgcgcctccaaactggcctttatgggctggggtctgggcattcgtgagctggattacaccggcttcagcggccactccgcgctctccgcggccttctggcctatcttcctgtggctgcttagtgctcgtttttccgcgggttggcaaaaagcagccgtcgccaccggctatattctggccgctgtggtgggttattcacggctggtcatccatgcgcattccgtctcggaagtgattgccggcctgctgctgggcgctgctggcagcgctttgttcctggtgttgcaaaaacgtacctctgatccggaaagcgtgaatatttcatggggcggtgtcgcatgcctggtgatggtccctcttatcctgttacatagcggcagcaaagcgccgactcagtccctgctgggacaaatcgccaccgcggtggggccgctggataaaccctttacgcgtaccgatctgcacaagcaggcttgg

SEQ ID NO: 23364 - DNA, 1420 bp, Klebsiella pneumoniae
ttgtcggcatggcgacgatccgctaaagtcgccccccttcttcaccggcatggggattttgcagacgatgtttattggttttgactacggcaccgccaactgttcggtggccgtgatgcgggaaaacaccccccagctgttaacgctggaaaacggcagcgccctgctgccctccatgctctgcgcgccgacgcgcgaagcggtcagcgagtggctctatcgccatcatgacgtccccacccacagcgacgaaaaccaggcgctgctgcgtcgggccatcgccgccaaccgcgacgaagacatcgaggtgctgcgcaacagcgtgcagttcggtctcgcctccctgcagcagtatgttgaagatccgcaagaggtctacttcgttaaatcgcccaaatccttcctcggcgccagcgggctgaagccgcagcaggtggccctgtttgaagacctggtctgcgccatgatgctccacattaaactgcaggccgaaagccagctgcccgagcagatcgaccaggcggtgattggccggccgattaacttccagggcctcggcggcgatgaggcgaacgcccaggcgcaggggatccttgagcgggccgcccaccgcgccggtttccgcgatgtggtctttcagtttgaaccggtggccgccgggctcgatttcgaagcgaccctcagtgaagaaaagcgggtgctggtcgtcgatatcggcggcggaaccaccgactgctccctgctgctgatgggcccgcagtggcgggagcgcgccgaccgacagcagagcctgctcggccacagcggctgccgcatcggcggtaacgatctcgacattgccctggccttcaaatgcctgatgccccttctcggcatgggcggcgaaacggagaaaggcaccgcgctgccgatcctcccgtggtggaacgcggtggcgatcaacgacgtgccggcgcagagcgatttctacagcaccgccaacggccgcctgctgaacgatctgctgcgcagcgcccgggatgccgacaaggtggctctgctgctgaaggtctggcgccagcgtctcagctatcgtctggtgcgcagcgccgaagagagcaaaatcgccctctccagcgccgccagcgtcgaaaccgcgctgccgtttattcaggacgatctggccaccgccatcgcccagcagggtctggaagccgcgctggatcagcccctgacccgcattatggaacaggtgcggctcgcgctcgacagcagccagaccaccccggacgtgatctatcttaccggcggcagcgcccgttcgccgctgatcaaaaaggcgctggccgctcagctgccgggtattccgctggccggcggcgatgattttggctcggtgaccgccgggctggcccgctgggcgcaagtggttttccgctag

SEQ ID NO: 23365 - DNA, 723 bp, Klebsiella pneumoniae
atgcatacccccgttctgtttgaacatcctcttaatgagaaaatgcgcacctggctgcgcatcgaatttctgatccagcagatggcttttcgtccgcagattgccagccatgccgatgcgctccattttttccgtaacgccggcgatctgctggatgtcctggagcgcggcgaggtgcgcactgacctggttaaagagctggaacgccagcagcgtaagctccagtcatgggcagaagtgccgggcgtcgatcaggagcgcattaacgagctgcgccaccagttgaagcagtcctccagcaccctgatggccgcgccgcgcattggtcagtttctgcgtgaagatcgcctgattgcgctggtgcgtcagcgcctgagtattcctggcggctgctgcagcttcgatttaccgaccctgcatatctggctccatatgccacaggcgcatcgcgacgagcaggtggccagctggcttgccagcctcgatccgctggtccagtccctgagcctgatcctcgatcttatccgcaactccgcgctgttccgcaaacagaccagcctcaacggcttttatcaggataatggcgaagatgccgatctgctgcgcctgcgtctcgatctggctcaccagctttatccgcaaatttccggccataagagccgtttcgccatccgtttcctggcgctggacagtgaatatgggatcgtgccggagcgctttgat

SEQ ID NO: 23366 - DNA, 777 bp, Klebsiella pneumoniae
atggcctacagcaaaatccgccaaccaaaattatccgatgtgatagagcagcagctggagtttctgattcttgaggggaccttgcgccccggtgaaaaactcccgccagaacgcgaactggctaaacagttcgacgtttcccgcccctcgctgcgtgaggcgattcaacgcctcgaagccaagggcttgttgcttcgtcgtcagggaggtggaacgtttgttcagagccgcctgtggcagagcttcagcgatccgctggttgagctgctgtccgatcaccctgaatcccaattcgatctgcttgagacccgtcacgcgctggaaggcatcgcggcctattacgcggcgctgcgcagcaatgatgaggatcgcgaccgtatccgtgagctgcatcaggctattgaacgcgctcagcagtcgggcgatttggacgctgagtccggcgccgtcgtccagtatcaaatcgccgtcaccgaggcggcacacaatgtggtgttgcttcatctgctaaggtgtatggagccgatgttggcgcaaaacgtgcgtcagaactttgaattgctgtatgcccggcgggaaatgctcccgttggtcagcaaccatcgcactcgcattttcgaggcgataatggccggggagccggagcaggcgcgtgaagcgtcgcaccgtcacctggcgttcattgaggaaattttgctggatcgtagtcgtgagcagagccgtcgagagcgctcactgcgtcgtttacagcaacgaaaggacgagaactccggttct

SEQ ID NO: 23367 - DNA, 1206 bp, Klebsiella pneumoniae
atgtgcgaactcgatattttacacgactctctttaccaattctgccccgaattacacttaaaacgactcaacagcttaacgttggcttgccacgccttacttgactgtaaaactctcactcttaccgaacttggccgtaacctgccaaccaaagcgagaacaaaacataacatcaaacgaatcgaccgattgttaggtaatcgtcacctccacaaagagcgactcgctgtataccgttggcatgctagctttatctgttcgggcaatacgatgcccattgtacttgttgactggtctgatatccgtgagcaaaaacggcttatggtattgcgagcttcagtcgcactacacggtcgttctgttactctttatgagaaagcgttcccgctttcagagcaatgttcaaagaaagctcatgaccaatttctagccgaccttgcgagcattctaccgagtaacaccacaccgctcattgtcagtgatgctggctttaaagtgccatggtataaatccgttgagaagctgggttggtactggttaagtcgagtaagaggaaaagtacaatatgcagacctaggagcggaaaactggaaacctatcagcaacttacatgatatgtcatctagtcactcaaagactttaggctataagaggctgactaaaagcaatccaatctcatgccaaattctattgtataaatctcgctctaaaggccgaaaaaatcagcgctcgacacggactcattgtcaccacccgtcacctaaaatctactcagcgtcggcaaaggagccatggattctagcaactaacttacctgttgaaattcgaacacccaaacaacttgttaatatctattcgaagcgaatgcagattgaagaaaccttccgagacttgaaaagtcctgcctacggactaggcctacgccatagccgaacgagcagctcagagcgttttgatatcatgctgctaatcgccctgatgcttcaactaacatgttggcttgcgggcgttcatgctcagaaacaaggttgggacaagcacttccaggctaacacagtcagaaatcgaaacgtactctcaacagttcgcttaggcatggaagttttgcggcattctggctacacaataacaagggaagactcactcgtggctgcaaccctgcttactcaaaatctattcacacatggttacgttttggggaaatta

SEQ ID NO: 23368 - DNA, 722 bp, Klebsiella pneumoniae
gtgttaagtattcaagatttacacgtcgccgtcgaagataaagcgatcctgcgcgggctgaaccttgaggtgcgcccgggagaggtccacgccattatggggccgaacggctcaggcaaaagtacgctttcggccaccctggccgggcgtgaagattatgaggtgactggcggtcgcgttgaatttaagggcaaaaacctgctcgaactcgctgcggaagatcgcgccggggaaggtatctttatggccttccagtatccggtagagatccccggcgtcagcaaccagtttttcctgcagactgcgctgaatgccgtgcgcaactatcgtggccaggaggcgctggatcgtttcgatttccaggacttaatggaagaaaagatcaagctgctgcagatgccggaagatctcctgacccgctcggtgaacgttggcttctccggcggtgagaaaaagcgcaacgatattctgcaaatggcggtgcttgagccggagctgtgcattctcgatgaatcggattcggggttggatatcgatgccctgaaaatcgtctcccagggaggtgaatgccctgcgcgacggcaaacgcgcctttatcattgtcacccactatcagcgcatccttgactatatcaagccggactatgtccatgtgttgtatcaggggcggattgtgaagtcgggcgatttctctctggtcaaacagctggaggagcagggct

SEQ ID NO: 23369 - DNA, 1239 bp, Klebsiella pneumoniae
atgactagcagtcgcgttgagaatagcagtagtcgcgccgcgcgcaaggtgaagctcgccttaatgggcccggctttcgtcgctgccattggctatatcgatccgggtaatttcgccactaacattcaggccggcgccagctttggctaccagctgctgtgggtcgtggtgtgggctaacctgatggcgatgctgatccaggtgctttctgccaaactgggcattgccaccggcaaaaacctggccgagcagatccgcgaccattacccgcgtcctgttgtctggttttactgggtacaggcggaaattatcgctatggccaccgatctggctgaatttatcggcgccgcgattggctttaagctggtgctcggcgtgtcgcttctgcagggggcggtgctgaccggggtggcgacttttctgatcctgatgctgcagcggcgcggacaaaaaccactggagaaggtgatcggtggattgttgctgtttgtcgccgtggcctatgtcgtggagttgatcttttcccagcccgcgctggctcctctgacgaaagggctggtgatccccacgctgcccaacggggaggcggtattcctggccgccggggtactgggtgcgacaatcatgccgcacgttatctacttacactcatcgctgactcagcatctgcatggcggaacgcgaaaagaacgctataacgcgacccgctgggatgtggcgatcgctatgaccattgccgggttcgtcaatctggcgatgatggcgaccgctgcggcggcattccactttaatggccataccggcgtcgccgatcttgatcaggcctacatgacgctggagccgctgctgagccacgcggcggcgaccatctttggcctcagcctgattgccgccggtttatcgtcgaccgtggtgggcactctggcaggtcaggtcgttatgcaggggtttatccgctttcatattccgctgtggtttcgccgggcgatcaccatgctgccgtcgtttgtcgtcattctgctggggctggatcctacgcgcatcctggtaatgagtcaggtgttgctcagctttggcattgcgcttgccctggtgccgctgctgatatttaccagcaatgcgaagctgatgggggacctggtgaatacccgttgggtgagaggcatcggctgggcgatagtcgctattgtggtgagcctgaacggctggttaatagtggggtcgctgctcggggtggat

SEQ ID NO: 23370 - DNA, 990 bp, Klebsiella pneumoniae
atggtttaccaggcaagcaccacgcgatatcaaacgatggagtaccgtcgctgcggccgcagcggtctgcaactaccggccatttcccttggcctgtggcataactttggcgatgaaacgcgagtggaaaccagccggcagatgctcctgcacgcttttgacctcggtataacccatttcgatttggccaacaactatgggccgccgccgggctcggcggaaagcaactttggccgcatcctgaaagagtcgctcctgccttatcgcgatgagttaatcatctccactaaagcaggttacacgatgtgggacggcccttacggcgactggggatcgcgaaaatatctggtagccagtcttaaccagagccttaaacgcatggggctggaatacgtcgatattttttaccatcaccggcctgatccacagacgccgctgatggaaacgatgcgtgcgctcgatcatctggttcgtcagggtaaagcgctatatgtcgggatctccaactatcctctggcccaggcgcgggaggcggtgaagatccttaacgacctcggcaccccctgcatcatccaccagcctcgctactcgatgttcgaacgcggcgtggaagaaggactgctggattttctgcagacggaagggattggaagcatagcgttttcaccgctggccggtgggcaacttaccgaccgctatctcaacggcattccggccgactcgcgcgccgccagcagcagtcgttttctgcagccggagcaactgactcctgcccgattagaaaaaattcgtcagcttaacaggcaggcggaagcgcgtgggcagaagctgtcgcagatggcgctggcctgggtgttgcgcgaagagaaagtcacctcggtgctgatcggcgccagcaaaaccgcgcaactggatgatgccgtcggcatgctgcagaatcgccatttcaccaccgaggagtgcacggccatcgacgccatccttgcgctg

SEQ ID NO: 23371 - DNA, 1233 bp, Klebsiella pneumoniae
atgctccatcctcgcgccagaacaatgctgatcctgtcggtgccggccatcctgataggcatcgcctgcagcctgatcctgatcgtggcgatgaaggttgccgcgctgctgcagcgcgtgctgtggagcaatctgcccgcgcagttgggggtgagcgccgacagcccgctgtggatcatcgccatgctgacggcgacagggatcgcggtgggtctggtcattcgttacagccccgggcacgccgggccggatccagcgaccgagtcgttaatcggcgctcccattgccaccggcgcgctgcccggactcctggccgcgctgatcctcggcctcgccggcggcgtcagcctcggcccggagcatccgattatggtggtgaatatcgcgctggctgtcgccgtcggctcccgactgtttccgcgcgtcagctcgctggactggaccatcctcgcggcctcaggcaccatcggcgccctcttcggtaccccggttgccgccgcgctgattttttcgcaaaccctcaatagcagcaacgatacgccactgtgggatcgcctctttgctcccctcctcgccgccgccgccggcgcgttgacgacggatctgtttttccatccccatttttcgctgccgatcccgcactatggtcagatgcgcttcgttgatattctcagcggcattatcgtcgccctgatcgctatcgccgtcggcatggtggccgtctggtgtctgccgcgactgcatgccctgatgcatcggttgaaaaatccaatcctgaccctcggcatcggcgggctgctgctggggatcgtggggacgataggcgggcccttaacgctatttaaagggctggatgagatgcagcagctggccttcagccagacgctaaccgccgcggattttctgcttatcgcgctggtcaaactggcggccctggttcttgcctcagccagcggctttcgcggcgggcgaattttcccggcggtgttcgtcggggtagcgctggggctgatgctgcatgctcatgttgacgcagtgccggcggcaatcaccgtttcctgcgcgatcctcggcatggtgctggtcgtcactcgcgacggctggttgagcctgtttatggccgccgtggtggtcccggatacgactctgctgccgctattgtgtatggtgatgctcccggcctggctgctgctggccgggagaccgttgatgattgccaaacggcataccgat

SEQ ID NO: 23372 - DNA, 1212 bp, Klebsiella pneumoniae
atggctgaatccagtcctgaacgccgttttacgcgtatcgatcgtctccctccgtacgtttttaacattactgctgaactgaaaatggctgcgcgtcggcgcggcgaagatattatcgatttcagtatgggtaatcccgatggcgcgacgccgccgcatatcgtggaaaaactttgcaccgttgctcaacggcctgacacccatggttactctacctcgcgggggatcccgcgcctgcgtcgcgccatttcacgctggtatgaagaacgctataacgtcgatatcgatccggaatcggaagcgatcgtcaccattggttcgaaagaggggctggcgcacctgatgctggcgacgctggatcatggcgacaccgtactggtgccgaaccccagctatccgattcatatctatggcgcggtgattgccggggcgcaggtgcgctcggtgccgctggtggaaggggtggatttttttaacgagctggaacgcgccatccgcgagagctatccgaagccgaagatgatgatccttggctttccctcaaatccgaccgcgcagtgcgtcgaactggatttctttgaaaaggttgtcgctctggcgaagcagtatgacattctggtcgtccacgatctggcctatgccgatatcgtgtatgacggctggaaagcgccatccatcatgcaggtgcccggcgcgcgggatgtcgccgtcgagttctttaccctgtcgaaaagctataacatggccggctggcgcattggctttatggtgggtaataagactttggtgaatgccctcgctcgtatcaaaagctatcatgactacgggacttttactccgctgcaggtggcggcgatagctgcgctggagggcgatcagcagtgcgtgcgcgatattgccgaacagtataagcgccgtcgcgatgtgctggtcaaagggcttcatgaggccggctggatggtggagtgtccgaaagcgtctatgtacgtgtgggcgaaaataccggaaccttacgccgccatggggtcgctggagtttgcgaaaaagctgcttaatgaagcgaaggtttgcgtctcgccggggattggctttggcgactatggtgatacccacgtccgcttcgcgctgatcgagaaccgggaccgtacgcgccaggcgatccgcggtatcaaggcgatgttccgcgcggatggtctgctggcctccgcgagc

SEQ ID NO: 23373 - DNA, 249 bp, Klebsiella pneumoniae
gtggcttctgtttctatcagctgtccctcctgttcagctactgacggggtggtgcgtaacggcaaaagcaccgccggacatcagcgctatctctgctctcactgccgtaaaacatggcaactgcagttcacttacaccgcttctcaacccggtacgcaccagaaaatcattgatatggccatgaatggcgttggatgccgggcaaccgcccgcattatgggcgtggcctcaacacgattttccgccatt

SEQ ID NO: 23374 - DNA, 503 bp, Klebsiella pneumoniae
atgccgggcaaccgcccgcattatgggcgtggcctcaacacgattttccgccatttaaaaaactcaggccgcagtcggtaacctcgcgcatacagccgggcagtgacgtcatcgtctgcgcggaaatggacgaacagtggggatacgtcggggctaaatcgcgccagcgctggctgttttacgcgtatgacaggctccggaagacggttgttgcgcacgtattcggtgaacgcactatggcgacgctggggcgtcttatgagcctgctgtcaccctttgacgtggtgatatggatgacggatggctggccgctgtatgaatcccgcctgaagggaaagctgcacgtaatcagcaagcgatatacgcagcgaattgagcggcataacctgaatctgaggcagcacctggcacggctgggacggaagtcgctgtcgttctcaaaatcggtggagctgcatgacaaagtcatcgggcattatctgaacataaaacactatcaataa

SEQ ID NO: 23375 - DNA, 717 bp, Klebsiella pneumoniae
atgcgacttgataagtttatcgctcagcagctcggcgtcagccgggctattgccgggcgtgaaattcgcggcagccgcgttaccgtggacggcgacattgtgaaagatgcctcttttaagctccagccggagcacgaggtggagtatgacggaaatacgctgacccagcagaatggcccgcgttactttatgctcaacaagccgcaagggtacgtctgttccaccgacgatcccgatcatccgactatcctttatttcctcgacgagccggtggcgcataagctgcacgccgccggacggctggatatcgacaccaccgggctggtgctgatgaccgatgacggccagtggtcgcatcgcattacctcgccgcgccaccactgtgaaaaaacctatctggtggcgctggaaagcccgctggcggaagggaccgcggagctgttcgccaaaggcgtccagctgcataacgaaaaagatctcaccaaaccggcgttgctggaagttatcactccgaccgaagtgcgcctcaccatcagcgaaggccgctaccatcaggtgaaacgcatgttcgccgccgtgggcaaccacgtggttggcctgcatcgggaacgcatcggcgacatcctgctggatgaatcgctggcgccgggtgaatatcgtccgctgacggaagcggaaatcgccagcgtgggcgccccgcagccacggagtaaaacg

SEQ ID NO: 23376 - DNA, 1189 bp, Klebsiella pneumoniae
gtgacgctgaagcagaattcttcactggggattgtgtttatccttggcctgctggccatgctgatgccgctgtctattgatatgtatcttccggccctgccggtgatcgccgcccagtataacgtcccggacggcagcgcgcagatgacgctcagcacctatatcctcggctttgcgctgggtcagctgctgtacggcccgatggcggacagccttggccgcaagccggtgatcctcggcgggacgctggtcttcgcggcggcggcgggagcctgcgccctgtcgcaaaccgtcgatatgctgattgtcatgcgtttcttccacggtctggcagccgcggctggccagcgtggtgattaacgccctgatgcgcgacatctatccgaaagatgagttttcgcgcatgatgtcgtttgtcatgctggtcacgaccattgcgccgctggtggcgccgatggtcggcggggcggtgttggtctggttcagctggcatgccatcttttggatcctcgccctggtggccctgctggcctcgctgatgatcggcctgtttgtccgcgaaacgctgccggctgaaaggcgtcagccgttccatctgcgcaccacgctgggtaactttgccacgctgttccgccacaagcgggtactgagctatatgctggcgagcggctttagcttcgcgggcatgttctctttccttagcgccggtccctttgtctacatcaatataaaccacgtcgcgcctcagcactttggctactattttgcgctgaacatcgtttttctgtttctgatgaccatgttcaacagccggtttgtgcggcgggtaggggcgttgcgtatgttccgcgccgggctgtggatccagtttgccatggcggtgtggatggtggtctgcgcgctgctggatgtcggcttttggtcactggtgatcggcgtagcggcctttgtcggctgcgtatccatggtgtcgtctaacgccatggcggtgatcctcgatgagtttccgcatatggcgggcactgcttcgtcgctggcggggactttccgtttcggtatcggggcgattatcggcgcgctgctgtcgatggcgacgtttaccaccgcctggccgatgctgatctctattgccttctgcgcaacctgctctattttcttttcgctttacgcatcccggcggcgaaaaatc

SEQ ID NO: 23377 - DNA, 282 bp, Klebsiella pneumoniae
atgtttactatcaacgcagaagtacgtaaagagcagggtaagggtgcgagccgccgcctgcgcgcagctaacaagttcccggcaatcatctacggtggcgaagctgctccggttgctatcgaactggaccacgacaaagtatggaacatgcaggacaaagctgagttttacagcgaagttctgaccgtcgttgttgatggcaaagaagaaaaagtcaaagttcaggctgttcagcgccacgcgttcaagccgaaactgactcacatcgacttcgttcgcgcg

SEQ ID NO: 23378 - DNA, 1756 bp, Klebsiella pneumoniae
gcatactattcgccagttaattagccccgtgaattcatgacttttacattacgtccttaccaacaagaagccgtcgatgccaccctcgcctggttccgtcgccataccgagccggcggcgattgtcctgcccaccggcgcgggcaaaagtctggtgatcgccgagcttgccaggctggcgcgcggccgcgtgctggtgctggcccatgtcaaagagctggtggcgcagaaccatgccaaatactgcgcccttggcctcgaggcggatatcttcgccgccggtctgcagcgaaaagagagccacggcaaagtggtgttcggcagcgtgcagtcggtggcacgcaatctcgaccagtttcgcagcgaattttcgctactcatcgtcgatgaatgccaccgcatcagcgatgatgacgacagccaatatcagcagatcatcggtcacctgcggcaggtcaatccgcagatccggctgctcggcctgacggccacgccgttccgccttggcaagggctggatctatcagttccattatcatgggatggtgcgcggcgatgaaaaggccctgttccgcgactgcatctatgagctaccgctgcgctatatgattaaacacggctatctgacgccgccggagcgcctcgatatgccggtggtgcagtacgatttcagtcgcctgcaggcgcaaagcaacggcctgttcagcgaagccgatcttaaccatgagctgaaaaaacaacagcgtatcacgccgcatattgtcagccagatcgtggagttcgccgaaaaccgcaaaggggtgatgatctttgccgccaccgtggaacacgcccgggaagtgaccggcctgctgccggtaggccaggcggtgctgatcaccggcgaaacgcctgggccggagcgggatcgcatcatcgaggcctttaaagcgcaggcgtatcgctatctggtgaacgtcgcggtgctgaccaccggcttcgacgccccgcacgtcgacctgatcgccatcctccgccccaccgagtcggtgagtctttaccaacagatcgttggccgcggtctgcgcctggcgccggggaaaaccgactgtctgatcctcgactacgccggcaatccgcatgacctgtatgccccggaagtggggacgccgaagggcaaaagcgacaacgtgccggtgcaggtcttctgcccggcctgcggcttcgccaataccttctggggcaaaaccaccgccgacggcaccttgattgaacactttggccgccgctgccaggggtggttcgaagatgacgacggccaccgcgaacagtgcgacttccgctttcgctttaaaaactgcccgcagtgtaatgcggaaaacgacatcgccgcccgccgctgccgggagtgcgacactatactggttgacccggacgatatgctgaaggcggcgctgaagctgaaggacgcgctgggtgctgcgctgcagcggcatggccctgcagcacggcggcgacgagaagggcccgtggctgaaaatcacctactacgatgaagacggggcggatgtcagtgagcgcttccgtctgcagacccccgcccagcgcaccgccttcgaacaactgtttattcgcccgcatacccgcacccccggggtgccgctgcgctggataacgccggcggatatcgtgacccagcaggcgctgctgcgccatccggactttgtcgtcgcccgcatgaaggggcagtactggcaggtgcgggaaaaagtgttcgat

SEQ ID NO: 23379 - DNA, 1686 bp, Klebsiella pneumoniae
atgtcgcaaagcaaatatcgccagctggacgtccgtgcgccaagaggcacgacgctgaccgcgaagagctggctgaccgaagccccgctgcgtatgttaatgaataaccttgatcccgatgtcgccgaaaacccgcacgagctggtggtctatggcggtattggtcgcgcagcgcgcaactgggaatgctatgacgctatcgtgaaggcgctgaagaacctggaaagcgatgaaaccctgctggtgcagtccgggaagccggtgggcgtattcaaaacccatgaaaactcaccgcgtgtgctgatcgccaactccaacctggtcccgcactgggccacctgggaacactttaacgagctggatgccaaagggctggcgatgtacggccagatgaccgccggcagctggatctacatcggcagccagggcatcgtgcagggtacctacgaaaccttcgtcgaagccggtcgccagcactaccagggcagcctgaaaggccgctgggtattaaccgccggtctgggcggcatgggcggcgcgcagccgctggccgcgacgctggccggcgcctgctcgctgaacatcgaatgtcagcagagccgcatcgatttccgtctgcgtacccgctacgtggatgagcaagccacctcgctggatgacgccctggcgcgcatcaaaaaatacaccgccgaagggcgggccatctctatcgcgctgtgcggcaacgccgcggagatcgtaccggagctggtgaagcgcggcgtgcgcccggatatggtcaccgaccagaccagcgcccacgacccgctgcatggctatctgccgaaaggctggagctgggaagagtatcagcagaaagccgaatccgacccgcagggcactattctggcggcgaaacgctcgatggccgatcacgtgcaggcgatgctggccttccatgagatgggggtcccaaccttcgactacggcaacaacatccgccagatggcgcaggaagtgggcgtcagcaacgccttcgatttcccgggcttcgtgccggcctatatccgcccgctgttctgccgcggtatcggcccgttccgctgggtagcgctgtccggcgatccgcaggatatctacaaaaccgacgcgaaagtgaaagagatcatcaaagatgatcagcatctgcaccactggctggatatggcgcgcgagcgcatcagcttccagggactgccggcgcgtatctgctgggtcggtctggagtggcggcaaaaactcggtctggcgtttaacgaaatggtgcgcagcggcgaagtctccgcgccgatcgtcattggccgggatcaccttgactccggctccgtcgccagcccgaaccgcgaaaccgaagcgatgcgcgatggttctgatgcggtctccgactggccgctgctcaacgccctgctcaataccgccagcggcgcgacctgggtgtcgctgcaccacggcggcggggtaggcatgggcttctcgcaacactccgggatggttatcgtctgcgatggtaccgatgaagcggcggcgcgtatcgcccgcgtcctgcacaacgacccggcgaccggcgtaatgcgtcatgccgacgcggggtatgagattgccattgaatgcgcagcagaacagggtctgaatcttccgatggtggcggcaacgcaggggaacgctaaa

SEQ ID NO: 23380 - DNA, 1038 bp, Klebsiella pneumoniae
atggctcaccaacctcgctggacaatgtcgcaagtaacggaattatttaataaaccgctgatcgatctgctattcgaagcgcagcaaatccatcgtcaacactttgatccgcgccaggtgcaggtcagcaccctgctgtcgatcaaaaccggcgcctgcccggaagattgtaaatattgcccgcagagcgcacgctacaaaaccggcctcgaagccgagcgcctgatggaggttgagcaggtgctggaatcagcgcgccaggcgaaaaacgccggctccacccgcttctgcatgggcgcggcgtggaaaaaccccaatgaccgcgatatgccttatctggagcagatggtgaaaggggtgaaggcgctggggctggagtcctgtatgacgctcggcaccctgaccgacagtcaggcgcagcgcctggccgaagcgggcctcgattactacaaccacaaccttgatacctcgccggaattttacggcaacatcatcaccacccgcacctaccaggagcgcctggatacgctggataaagtgcgtgatgctgggatcaaagtctgctccggcggcatcgtcgggctgggagagagcgtaaaagatcgcgccggactgctgctgcaactggctaatctgccgacgccgccggagagcgtaccgatcaacatgttggtgaaggtcaagggcacgccgctggcggataacgacgacgtcgacgctttcgatttcatccgcactatcgccatcgcgcgcatcatgatgcccacctcctacgtgcgtctctccgccggccgcgagcagatgaacgagcagacccaggcgatgtgctttatggccggggcgaactcgattttctacggctgcaagctgctgaccacgccgaacccggaagaggacaaagacctgcagctgttccgcaagctggggatcaacccgcagcagacggcggtgctggaaggcgacaatgagcagcagcagcgtctggagcaggccttactcaccccggacactgaggaatattacaacgcggcggcgcta

SEQ ID NO: 23381 - DNA, 1305 bp, Klebsiella pneumoniae
atggtttacaagtcgcttatgacactggacgatctcgctttcgatcggcgccacatctggcacccctacacctctatgacttcccccctgccggtctacccggtggtgtccgcccacggttgcgagctgtccctcgccggcggcgaacagttggttgacggtatgtcttcctggtgggcggcgatccacggctacaatcacccacgcctcaatgcggcgctgaaggggcaaattgaccaaatgtcgcacgtgatgttcggcgggatcacccatccgccggcagtagcgctatgccgtcagctggtggcgatgaccccggcctcgctggagtgcgttttcctcgccgactccggttcagtggcggtagaggtggcgatgaaaatggcgctgcagtactggcaggctaaaggcgaaccacgtcgtcgttttctgaccttccgcaacggctatcacggggataccttcggagcgatgtcggtctgcgatccgcagaactcgatgcacagcctgtggcagggctacctgccggataacctgttcgcccccgcgccgcaaagccgctttgacggcgagtgggacgagatggatatggtgccgtttgcccgcctgatggccgcgcatcgtcatgaaatcgccgcggtgatcctcgaacctatcgtccagggggcgggcggcatgcggatgtaccatccggagtggctgaagcgggtgcgtaaaatgtgcgaccgggaagggatactgctgatcgccgatgagattgccaccggctttggacgcaccggcaagctgttcgcttgtgaacacgccgggattaccgccgacattctgtgtctgggcaaagcgctgaccggcggcaccatgaccctttccgccgccatcaccacccgaacggttgctgaaaccattagcaatggcgaagccggttgctttatgcacggccccacctttatgggcaatccgctggcctgcgcggtggccggcgaaagcctgcgcctgctggagagcggcgaatggcagccgcaggtgacggcgattgaagcccagctgcaggccgagctggccccggcgcggggatctgcgctggtcgcggacgtccgcgtgctgggcgctattggcgtggttgaaacccgtcgcccggtcaacatggccgccctgcagcgctttttcgtcgagcagggagtctggatccgtccgtttggccggctgatttatctgatgccgccgtacatcatcacgcccgagcagctgacccgcctgacccgtgcggtcaaccaggcagtgcaggacgaaacattttttagcgaa

SEQ ID NO: 23382 - DNA, 1525 bp, Klebsiella pneumoniae
atgaaatctttaactttgatcccgggtcaactcagcctgtcgcagctccgcgacgtttacagccacccggtaaatattaccctcgacagcggcgcgtttgccgccattgacgagagcgtggcctgcgtcaacgccatccttgccgaagggcgtaccgcctacggcatcaacaccggttttggcctgctggcgcaaacccgtatctcgacggaagatctggagaacctgcagcgttcgctggtgctgtcccatgcggcgggcgttggcgagccgctggacgatgatctgacgcggctgattatggtgctgaagattaacagcctgtcccgcggtttctccgggatccgcctgagcgtgatccaggcgctgattggcctggtgaatgccggcgtgacgccgtggatcccggccaaaggctccgtcggcgcttccggcgacctcgcgccactggcgcatatgtcgttaaccctgctcggagaaggtaaagcgcgggtacgcggcggcgactggctgccggccaccgaagcgctgcgtcaggtggggctggagccgattaccctggcggcgaaagaggggctggcgctactcaacggcacccaggcctcgaccgcttttgccctgcgcggtctgttcgaagccgaggatctgttcgcctccgcggtcgtctgcggggcgttaaccaccgaagcggcgctgggctcacgtcgtccgtttgatgcgcgcatccatgaagtgcgcggccagcgcgggcagattgatgcggcggcgctgtatcgccacctgctgaccgacgatagcgcgatctcgcagtcgcaccataactgcagcaaggtgcaggacccgtactccctgcgctgccagccgcaggtgatgggcgcctgcctgacgcagatccgccaggcggctgaggtgctgctggctgaagccaacgcggtctccgataacccgctggtctttgccgccgaaaatgacgtcatctccggcggtaacttccatgccgaaccggtggcgatggccgcggataatatcgcgctggcgatcgccgaaatcggctcgctctccgagcgccgcatcgcgctgatgatggacagccatatgtcgcagctgccgccgttcctcgtcaaaaatggcggcgtcaactccgggtttatgattgcccaggtcacggcggcggccttagccagtgaaaacaaagcgctgtcgcacccgcatagcgttgacagcctgcccacctccgcgaaccaggaagaccatgtttccatggcgccggcttgccggtcgccgcctgtgggcgatggccgagaacacccgcggggtgctggccgttgagtggctggcggcggcgcaggggctggatatgcgcgaaggactgaccaccagtccgctgctggaagaggcgcgtcacttgctgcgcgaacgcgtgccgcactatacgcaggatcgctacttcgccccggatatcgataacgccattgcgcttctggcggcccgtcacctgacgcgtctgctgcctgccgtactgcat

SEQ ID NO: 23383 - DNA, 714 bp, Klebsiella pneumoniae
atgaacgaaatttttccattagcaagcgccgccgggatgaccgtcggccttgccgtttgcgcgctcgtcatcggcctggtcctggcgatgctctttgcggtactggagtcagtgaaatggcgcccggtagcctggcttgcaaccggcatagtgaccatcctgcgcgggctaccggaaattctggtggtgctgtttatctatttcggctcttcccagctgctgctgacgctctctgacggtttcaccatcccgctcgggttcacgcagatcccggtgcagatgcagattgagaactttgacgtcagcccgttcctctgcggggcgatcgccctgtcgctgctgtacgccgcttacgcctcgcaaacgctgcgcggcgcgctgaaagcggttccgcagggccagtgggagtccggccaggcgctggggctgtcgaaagcggccatattcttccgtctggtgatgccgcagatgtggcgccatgccctgcccggcctcggtaaccagtggctggtgctgctgaaggacaccgcgctggtgagcctgatcagcgtcaacgatctgatgctgcagaccaaaagcatcgccacccgcactcaggaaccctttaactggtatatcattgcggcggcaatctatctcgtcatcaccctgttgagtcaatacatccttaagcggattgaccagcgtgcgacgcgcttcgaacggagaccaggc

SEQ ID NO: 23384 - DNA, 1716 bp, Klebsiella pneumoniae
atgaaacagaccgtggcggcatacattgccaaaacgctggaacaggccggcgtgaaacgtatctggggcgtcaccggagattccctcaatggattgagcgatagccttaaccgcatgggcaccatcgactggatgcccacccggcacgaagaggtcgccgctttcgccgctggcgcggaagcgcagctgaccggcgagctggcggtctgcgccggctcctgcggaccgggcaacctgcatctgattaacggtttgtttgactgtcatcgcaaccatgtcccggtgctggccatcgccgcccacatcccatccagcgaaatcggcagcggctattttcaggaaacccatcctcaggagctgttccgcgagtgcagccattactgcgaactggtctccacgccggaacagatcccgcaggtgctggcagtggcgatgcgtaaggcagtgattaaccgcggcgtctcggtggtggtgctacccggcgatgtggcgctgaaggccgccccggaaagcgccagcagccactggtatcatgcgccgctgccgacggtcaccccggcggaagaagagctgcgcaagctggcgcagcttattcgctactccagcaatatcgcgctcatgtgcggcagcggttgcgccggcgcccaccaggaactggtggagttcgcagccaaaattaaagcccccatcgtccacgccctgcgcggcaaagagcacgtggagtacgacaacccgtacgatgtgggcatgaccgggctgattggcttctcctctggcttccacaccatgatgaacgccgataccctgatcctgctgggcacccagttcccctatcgcgccttctacccaaccgacgcgaaaattatccagatcgacatcaaccccggcagcatcggcgcacacagtaaggtcgacatggcgctggtgggcgatattaaatcgacgctgaaggcgctggtgccgctgctggaagagaaaaccgatcgccacttcctcgataaggcgctggagcactatcgcgacgcgcgaaaagggctcgacgatctggctaaacccagcgataaagccattcacccgcaatatctggcgcagcagatcagtcattttgccgatgaagatgccattttcacctgtgatgtcggcaccccgaccgtctgggcggcacgctatctcaaaatgaatggtaaacgccgcctgctgggctcgttcaaccacggctcaatggccaacgccatgccgcaggccatcggcgccaaggccactgcgccggagcggcaggtagtggccatgtgcggcgacggcgggttcagcatgctgatgggcgattttctgtcgctggcgcagatgaagctgccggtgaagattgtcatctttaacaacagcgtgctgggcttcgtggcgatggaaatgaaggccgggggctatctcaccgacggtacggagctccacgataccaacttcgcccgcatcgccgaggcctgcggtatcaaaggtatacgcgttgaaaaagcctccgaggtggatgaagcgctgcagaccgccttccgcaccgacggtccggtgctggtcgacgtcgtcgtcgccaaagaggaactggcgatcccgccgcagatcaagctggagcaggccaaaggctttagcctgtatatgctgcgggcgatcatcagcgggcgcggcgatgaggtcatcgaactggcgaaaaccaactggctcagg

SEQ ID NO: 23385 - DNA, 966 bp, Klebsiella pneumoniae
atgactatgccaacctcccagtgcccgtggcggatgcaggttcaccacattcaccaggaaaccccggacgtgtggaccctttcgctgctgtgccacgattactatccgtaccgcgctggccagtacgctctggttagcgtgcgtaactcggcggaaacgctgcgcgcctataccctctcctcgacgccgggggtcagcgaatacattacgctgaccgttcgccgtattgacgagggtacgggttcgcagtggttgacccgcgaggtcaaacgcggtgattacctttggctgtccgatgcgatgggcgagtttacctgcgacgataaagcggaagataaattcctgctgctggccgccggttgcggcgtgacaccgatcatggcgatgcgccgctggctggctaagcatcgaccgcaggccgacgtacaggtgatttataacgtgcgttcgccggaagatgtaatctttgccgaagagtggcgcaacttcccggtcaccctggtagcggagcacaacgcgacgcacggttttgtcgccggccgtctgacccgggagctgctgcagagcgtgccggatttagccagccgcaccgtgatgacctgcggcccggcgccttatatggagaaggtcgagcaggatgttgccgccctgggcgtcacccgcttctttaaggaaaaattcttcaccccggtggctgaggccgccaccagcgggctgaaatttactaaactgcagccggcgcgcgagttttacgcgccggtgggcaccacgctgctcgacgcgctggagagcaataaagtgccggtgaccgtcgcctgccgcgccggcgtctgcggctgctgcaaaaccaaagtggtttccgggaagtacagcgtcaccagcaccatgacgctgaccgacgccgaaatcgccgacggctatgtgctggcctgctcctgtcatccgcagagcgatctggttctcgcc

SEQ ID NO: 23386 - DNA, 897 bp, Klebsiella pneumoniae
atgttttcgggactctttattattctgttgccgctggtcgtcggctatttactgcctcttcgtcactcctccgcgctaaagctgataaaccgcatgctcagctggattgtctatgtaatccttttttttatgggtatcagcctggcgttcctcgacaatctggccagcaacctgctggcaatattgcattacgccgcggtgagcgtggttatcattttactgtgtaatatcgccgccctgctgtggctggaaagtaaaatgccatggcgcagtcagcatcgtcaggagaaattaccctcgcgcctggccatggccctggaatcgctgcagctgtgcggtgtggtcgtgctcggttttctgctcggtctgaccagactgccttttttacagcacgcgacagaagccagcgaatatacgttgatttttctcctgttcctcgttggtatccaattacgcaataatggaatgagtctgcgacaaatagtccttaaccgccggggaatgatcgtcgccgtggtggttacggccagttcattactcggcgggatacttaacgcctttattctcggtctgccgttaaagaccggtctggcaatggccagcggtttcggctggtattcgctctccggtattttactcaccgaatcctttggcccggtcatcggtagcgcggcgttctttaacgatctctgtcgcgagctgctggccatcatgttaattccgggccttattcgccgcagccgctccacggcgctggggctatgcggcgccacctcgatggacttcaccttaccggtactgcagcgttccggcggcgtcgaaatcgtccctgccgccatcgtgcacggttttctgcttagtttgctggtcccgatcctgatcgccttttttaccgcc

SEQ ID NO: 23387 - DNA, 1011 bp, Klebsiella pneumoniae
atgaaggtactggttaccggtgcgaccagcggattaggccgcaacgcagtggaatatctgcgcaacaagggcatcagcgtgcgagcgaccgggcgcaacgaagcgatgggcaagcttctgagcaaaatgggggcggaattcatcccggcagatttaaccgagctggtctcttcgcaggctaaagtgatgctcgccggtatcgataccctatggcactgctccagctttacctcgccatggggcactcagcaggctttcgatctcgctaacgtccgcgccacccgtcgtctgggcgaatggtcagtggcatggggagtgcgcaatttcgtccatatctcttcgccatcgctctattttgattatcaccatcatcgtgatatccaggaagatttccgtccacaccgcttcgccaacgagtttgcccgcagcaaggcggccagcgaggaggtgatcaacctgctggcgcaggctaacccgcatacccgttttaccattctgcggccgcagagcctgtttgggccgcacgacaaagtctttatcccccggctggcgcaaatgatgcagcattatggcagcgtcctgctcccgcgcggcggcagcgcgctggtcgacatgacctattatgaaaacgccgtacatgcgatgtggctggcgagccagccggcctgcgatcatcttccctccgcccgcgcgtggaatatcagcaacggcgaaccgcgcaccttgcggagcatcgtgcagaaattgatcgacgagctcggcatcaaatgccggatccgctcagttccctatccgatgctggatattatcgcccgcagcatggagcgctttggcgataaaaccgccaaagaacccgcgtttacccactacggcgtctccaagctaaactttgattttacgctcgatattacccgcgcgcaggacgagctgggctatcagccggtggtgacgcttgacgacggcatcgtgcgcaccgccgcctggcttcgcgaccacggtaaactacaccgc

SEQ ID NO: 23388 - DNA, 1209 bp, Klebsiella pneumoniae
atgctaaccaccatcatttatcgcagccatatctgcgacaatgtctcattcaaatcgatcgaggccatggtcgccagggcaaacgaaagaaatgggcaggcggacgtcaccggtattttactttttaacgggacgcatttttttcaactcattgaggggcctgaagaaaaggttcaggatatttatcagcatatctgccgggatcctcgccactataatctggtggagttgctttgcgattatgcgccgtcccgtcgttttggtaaggtcgggatggaactgtttgatttacgcgaacacgatcgcgaggaagttctgcaggcggtgatggaccgggggacgtcaaaatatcagctcacctatgatgaccgggcgctgcaatttttccgtacttttgtcgaagccacagaaaaagcgaactattttgagattccttccgcagatagttgggtttttattcctgataaggagacgttctatcctgataccccgattatcgataatacggaaggttgttcctttgccttccagccgattgtcgaccctttcgcctgcgaaattatttcgtgggaagcgctgttgcgtacaccggacgggcaatcccccggcgcctattttgccgggctgaccggggacgatatttatctcgctgacctgcacagtaaacgggtggcgttgtcgctggcgggaaaattaggtttacgtaataaggcgttaagcattaatttactgccgatgaccatggtcaaagcgccgaatgcggtggctttcctgctcgacgaaattagtcgcaatgaccttattccggagcagattattgtcgagttcactgagcgggaagtgatttcgcggatggacgattttaccgatgcggtgcgcaaactgaagggcgcgggaattaatcttgccatcgatcacttcggcgccgggtttgccgggctatcgctgctggcgcaataccaacccgacagaattaaaatcgaccatgagctgatccgcaatatccaccaggacggaccgcgccagtcgattgtacaggcgattatcaaatgctgtacttctctggagattgcggtctcagccgtcggcgttgagcgtgctgaagagtggatgtggctggaatcagccggtatttcacagttccagggtaatttgttcgccagcgcgcgcctggggggcctacccgccgtcgcatggccggagaaaaaa

SEQ ID NO: 23389 - DNA, 2436 bp, Klebsiella pneumoniae
atgaaaattaaagcccctgatgctttactggctgctgaggtaagccgccgtggtctgatgaaaaccacggcaataggcggcctggcgctggccagcaacgcactaacgttaccctttacccgactgtcgcatgctgccgatacgccggcgcccgccagtgagaaggtggtctggagcgcctgcaccgtcaactgcggtagccgttgcccgctgcgcatgcacgtggtggatggcgcgattaaatacgtcgaaaccgataataccggtgacgataactatgacggtttgcaccaggtccgcgcctgcctgcgtgggcgttcaatgcgccgccggatctataatccggaccgtctgaagtacccgatgaagcgcgttggtaaacgcggtgagggcaagttcgagcaaatcagctgggaagaggcgttggataccatcgccagcaatatgcagcggctgattaaagagtacggcaacgaatccatctatctgaactacggcaccggcacgctcggcgggacgctgacccgctcctggccgccggggaaaacgctgattgcccgtctgatgaactgctgcggtggctatctcaaccattatggcgactattcatcagcgcagattgctgccggtctgaattacacctacggcggctgggcggacggcaacagcccatcggatattgaaaacagtcagctggtggtgctgttcggcaataaccccggcgaaacgcggatgagcggcggcggggtgacgtactaccttgaacaggcgcggcagaaatccaatgcccggatgataatcatcgatccgcgctataccgacaccggcaccgggcgtgaagatgaatggatcccgattcgtcctgggaccgatgcggcactggtttcgggcctcgcgtgggtgatgatcaccgagaatctggtcgatcagccgttcctcgataaatactgcgtgggatacgacgagaaaacgctgcccgccggtgcgccagccaatggtcattacaaagcttacattcttggccagggcactgacggtatcgccaaaacgccggagtgggcctcgacaattaccggtattccgcgcgaacgcattgttaaactggcgcgcgaaattgccaccgctaaaccggcctatattagccagggctggggtccgcagcgtcacgccaacggtgagatcgccacccgcgccatctcaatgctcgccattctgacgggtaacgtcgggatcaacggcggcaatagcggggcgcgcgagggctcgtatagtctgccttttgagcgtatgccgacgctggagaatccggttgagaccagtatctcgatgtttatgtggaccgatgcgattgagcgcggcccggaaatgaccgctctgcgcgacggcgtacgcggtaaagataagctcgacgtgccgatcaagatgatctggaactatgcgggcaactgtctgattaaccagcattctgagatcaaccggacccacgaaatcctgcaggacgacaagaaatgcgagatgattgtggtcattgactgccatatgacctcctcggcgaaatacgccgatattctgctgccggactgtaccgcctccgagcagatggatttcgcgctggatgcctcctgcggcaacatgtcctacgttatctttgccgatcaggccatcaagccgcgtttcgaatgcaaaaccatctatgagatgaccagcgaactggcaaagcgtctgggcgtcgaagagcagtttaccgaaggccgtacccaggaaggctggatgcgctatctgtatgagcagtcgcgcaaagcgattcccgacctgccggatttcgacaccttccgtcagcagggcatctataagcagcgcgatccgcaaggtcatcatgtggcctacaaagccttccgtgaggatccgcaggctaatccgctgaccacgccttcgggcaagatcgaaatttactcgcaggatctggcgaaaatcgcggccacctgggagctgccggaaggggatgttatcgatccgctgccgatctacaccccgggtttcgaaaactacaacgatccgctgacagcgaaatacccgctacagctcaccggcttccactataaatctcgcgtccactcgacctacggcaacgtcgatgtgctgaaggccgcctgtcggcaggagatgtggattaacccgatcgatgcccgcaagcgcggcattgccaacggcgatcgtattcgcatcttcaacgatcggggtgaagtgcatatcgaagcaaaggtgacgccgcgcatgatgccgggcgtcgtcgcgctgggggaaggggcctggtacaacccggacgcctcgcgtgtggatcaggcgggcagcatcaacgtgctgaccacccagcgtccgtcgccgctggcgaagggaaacccgtcgcataccaacctcgttcaggttgagaagctg

SEQ ID NO: 23390 - DNA, 855 bp, Klebsiella pneumoniae
gtgaaagctgacaacccttttgatcttttgctccctgccgcgatggcgaaagtcgccgaagaagcaggtgtctataaagcaacgaagcatccgatgaagacgttttatctggcgatcaccgctggcgttttcatctccatcgctttcgtattctatatcaccgcgaccaccggcactgccgcgatgccttatgggattgccaaacttatcggtgggatctgtttttctctgggtctgattctgtgcgttatctgcggcgctgacctctttacctctacggtactgatcgtggtggccaaagccagcggtcgaattacctgggggcaactggcaaaaaactggctcaacgtctattttggtaacctggtgggcgcgctgctgtttgtgctgctgatgtggttatcaggcgaatatatgactgccaacggcggctgggggctaaacgttctgcagaccgccgaccacaaaatgcaccatacttttgtggaggccgtgagcctgggtatcctcgctaacctgatggtttgtctcgccgtatggatgagctattccggtcgtagcctgatggataaagcgatgatcatggtcctgccggtagcgatgttcgttgccagcggctttgagcacagcatcgccaacatgtttatgatcccgatgggtatcgtaatccgcaactttgcaagcccggaattctggaccgccatcggttcgactccggaaagtttctctcacttgaccgttatgaacttcatcactgataacctgattccggtaactatcgggaacattatcggcgggggtctgctggtcgggttgacatactgggtcatttacctgcgtggcaacgaccatcac

SEQ ID NO: 23391 - DNA, 960 bp, Klebsiella pneumoniae
gtgccggttggtcgcgacgaaaacgacaacgttgaagttagccgctggggtacgccgcgtcagttcgattttgaggtgcgcgatcatgtgacgctgggtgaaatgcacggggggctggattttgccgccgccgttaagctcaccggctcgcgcttcgtggtgatgaaagggcagctggcccgtctgcaccgcgccctggcgcagttcatgctggatctgcacaccgaacagcatggctacagcgaaaactatgtcccgtacctggtaaaccaggataccctgtatggcactggccagctgccgaaattcgctggcgacctgttccatacccgtccgctggaagaagaggctgacagcagcaactacgcgctgatcccgacggcggaagtgccgctgaccaacctggtgcgcgatgaaatcatcgacgaagacgatctgccgatcaaaatgaccgcccatacgccgtgcttccgctctgaagccggttcctatggccgcgacacccgcggtctgatccgtatgcaccagttcgataaagttgaaatggtgcagatcgtccgcccggaagactctatggccgcgctggaagagatgaccggtcacgccgagaaagtgctgcagctgctgggcctgccgtaccgtaaggtcgcgctgtgcaccggcgatatgggcttcagcgcctgcaaaacctatgacctcgaagtatgggttccggcgcaaaacacttatcgtgagatctcctcctgctccaacgtctgggatttccaggcgcgtcgtatgcaggctcgctgccgcagcaagtccgataagaagacccgtctcgttcataccctgaatggttctggcctggcagtaggtcgtacgctggtggcgctgatggaaaactatcagcaggctgatggccgtatcgagatcccggaagtgctgcgcccgtatatgcgcggcctcgaatatatcggc

SEQ ID NO: 23392 - DNA, 932 bp, Klebsiella pneumoniae
atgcccattgtacttgttgactggtctgatatccgtgagcaaaaacggcttatggtattgcgagcttcagtcgcactacacggtcgttctgttactctttatgagaaagcgttcccgctttcagagcaatgttcaaagaaagctcatgaccaatttctagccgaccttgcgagcattctaccgagtaacaccacaccgctcattgtcagtgatgctggctttaaagtgccatggtataaatccgttgagaagctgggttggtactggttaagtcgagtaagaggaaaagtacaatatgcagacctaggagcggaaaactggaaacctatcagcacttacatgatatgtcatctagtcactcaaagactttaggctataagaggctgactaaaagcaatccaatctcatgccaaattctattgtataaatctcgctctaaaggccgaaaaaatcagcgctcgacacggactcattgtcaccacccgtcacctaaaatctactcagcgtcggcaaaggagccatggattctagcaactaacttacctgttgaaattcgaacacccaaacaacttgttaatatctattcgaagcgaatgcagattgaagaaaccttccgagacttgaaaagtcctgcctacggactaggcctacgccatagccgaacgagcagctcagagcgttttgatatcatgctgctaatcgccctgatgcttcaactaacatgttggcttgcgggcgttcatgctcagaaacaaggttgggacaagcacttccaggctaacacagtcagaaatcgaaacgtactctcaacagttcgcttaggcatggaagttttgcggcattctggctacacaataacaagggaagactcactcgtggctgcaaccctgcttactcaaaatctattcacacatggttacgtttggggaaat

SEQ ID NO: 23393 - DNA, 828 bp, Klebsiella pneumoniae
atgtcgcaggctgcgctgaatacgcggaaccatgaagaagaggcttcttcttcgcgtcggagtaatggaacgcggctggcagggatcgttttcctgctggcggtgctgtttaccgtgctggtcagcgggtggatggttcttggctggatggaagatgcgcagcgcttaccgctgtcgaagatggtggtgaccggcgagcgccactacacgcgcaatgatgacatccgtcaggcgatcctggcgctgggttcgccgggtacctttatgactcaggatgtgaacatcatccagagccagattgaacgtctgccgtggattaagcaggcgagcgtccgaaagcagtggcccgatgaattgaagattcatctggttgaatatgtgccgattgcgcgctggaatgatcaacatatggtggatgcagaaggaaatgccttcagcgtgccggcggatcgcaccagcaaacagaatttaccgatgttatacggtcccgaaggcagcgagaacgaagtgctgcaggggtatcgtgacatggggcaggtgctggcaaaggataaattcacgttgaaagtggcggcgatgaccgcccgtcgctcctggcagttgacgcttaataatgacatcaagctcaaccttggccgtggcgataccatgaaacggcttcagcgctttatggaactctacccggttcttcagcagcaggcgcagaccgacggcaaacggattagctacgttgatttgcgttatgactcgggtgcggcagtgggctgggtacctgctcccgcagaggaaactaatcaacaacagaatcaggcacaggcagaacaacaa

SEQ ID NO: 23394 - DNA, 1485 bp, Klebsiella pneumoniae
gtggcagatcgtaatttgcgcgacctactcgctccatgggtgccaaacgcaccggagcgcattctgcgagagatgacgctggacagccgggtggctgcttccggcgatctctttatcgcggtacagggtcatcaggcggacgggcgtcgttatatcccgcaggcgatagcgcaaggtgtggctgccattattgctgaagcgcagggcgaagctaaagacggtgagatccgtgaaatgcacggcgtgccggttatctacctgagccagcttaacgaacgcttatcggcgctggccgggcgtttttatcatcagccgtcgcagcagctgcgtctggtgggcgtcaccggcaccaacgggaaaaccaccaccactcagctgctggcgcagtgggcaaagctgctcggtgaaaccagcgcggtgatggggaccgtcggtaacggtttgctggataaagtcgttccaactgaaaacaccaccggttccgcggtggacgttcaacatgtgctctccagtctggtcgggcagggggctaccttcggcgcgatggaagtctcctcccatggtctggtacagcaccgcgtagcggccctgcagtttgccgcctcggtgtttaccaatctcagccgcgatcatctcgactaccatggcgacatggagcactacgaagcggcgaaatggctgctgtactccacccatcattgcggtcaggccatcgtcaatgctgacgatgaagtcggtcgtcgctggctggcaaaactgccggacgcggtggcggtatcgatggaagatcatatcaacccgaattgccacggccgctggctaaaggccaccgcggtgaactatcacgacagcggggcgaccatccaatttgactccagctggggcaagggcgaaatcgaaagccgcctgatgggcgcatttaacgtcagcaacctgctgctggcgctggccacgctgctggcgctgggctatccgctggccgatctgctgaagaccgcagcgcgtttacagccggtgtgcggccgtatggaagtgttcagcgcgccgggtaaacctgccgtggtggtagattatgcccatacgcctgacgcgctggaaaaagcgctgcaggcggcacgcctgcactgcagcggcaagctgtggtgcgtcttcggctgcggcggcgaccgcgacaaaggtaaacgtccgttgatgggcgctatcgcggaagaatttgccgacatcgtggtcgttactgacgataacccgcgcaccgaagagccgcgggcgattatcaacgatattctggccggcatgctcgatgcaggtcaggcgaaggtgatggaaggccgcgcggaagcggtgaccaacgccgtgatgcaggcgaaagagaacgacgtggtgctggtggcgggtaaaggccatgaagattaccagatcgtcggcaaccgccgtctggattattccgaccgcgtgaccgtcgcgcgtctgctgggagcggtagca

SEQ ID NO: 23395 - DNA, 1473 bp, Klebsiella pneumoniae
atgaatacacaagatttggcaaaactgcgttccatagtgcccgagatgcgtcgcgttcggcacattcactttgtcggcatcggcggtgccggtatgggcggtattgccgaagtgttggctaacgaaggttaccagatcagcggctccgacctggcgccgaatccggtgacccagcagctgtcgcagcttggcgccaccatttatttcaaccatcgcccggaaaacgtgcgtgatgccagcgtggttgtcgtttccagcgcgatttcggcagataacccggaaatcgttgccgcgcatgaggcgcgtatcccggtgatccgtcgtgccgaaatgctggcggagctgatgcgctttcgccacgggatcgccattgccgggacccacggcaaaaccaccaccaccgcgatggtatccagcatttacgccgaggccgggctggacccgaccttcgtcaacggcggactggtaaaagcggcgggcgtacatgcccgtcttggccatagccgttacctgatcgcggaagcggatgagagcgacgcgtcgtttctgcatctgcagccgatggtggccattgtcaccaacatcgaagccgatcacatggatacctaccatggcgactttgagaatctgaagcagacctttatcaacttcctgcacaacctgccgttctacggacgcgcggtgatgtgcgtggacgatccggtgatccgggaactgctgccgcgcgttggccggcagatcaccacctacggttttagcgacgacgccgacgtacgcgtcgaggactatcgccaggttggggcgcaggggcatttccgcctggtgcgccaggataaagcgatcctgcaggtgacgctcaatgccccgggacgccataacgcgctgaacgcggcggcggccgtcgccgtggcgacggaagaggggattgacgatcgggctattctgcgcgcactggagagcttccagggaactggacgccgctttgattttcttggcgagtttccgctggccgaagtcaacggcaaaccgggcagcgcgatgctgatcgatgattacggtcaccacccgacggaagtggacgccaccattaaagcagcgcgcgccggctggccggataaaaacctggtgatggtattccagccgcaccgttatacccgtacccgcgatctgtatgatgattttgccaacgtgctgacccaggtggatgccctgctgatgctggacgtctatccggcgggcgaagcgccgatcccgggcgccgacagccgctcgctgtgccgcaccattcgcggtcgcgggaaagtggatccgatcctggtgcccgattcggcccaggccgcggagatgctggcgtcagtcctgaccggcaacgatttagtactggtgcagggcgccggtaacatcggtaaaatcgcccgccacctggctgaaatcaaactgatcccgcaaaaaacggaggaggagcgccatggc

SEQ ID NO: 23396 - DNA, 1764 bp, Klebsiella pneumoniae
atgaaagcagcgccaaaaacgcctaaagcaaaacgtcaggaagaacaggccaactttatcagttggcgttttgcgttgctgtgcggctgtattctgctggcgctggcttttctgctgggtcgcgtcgcctggctacaggtgatcagccccgatatgctggtgcgccagggcgatatgcgttctctgcgcgtacaggaagtgtccaccgcgcgcgggatgattaccgatcgctccggacgtccgctggcggtcagcgtgccggtgaaggctatctgggccgacccgaaagagctccatgacgccggcggggttaccctggatacgcgctggaaagcgctggcggatgccctcaatatgccgctggatcagctggcgacgcgcatcaataccaatccgcggatgcggtttatctatctggcgcgtcaggttaatcctgacatggccgattacatcaagaagctgaagctgccgggcattcatctgcgcgaagaatcccgtcgttactacccttccggggaagtaaccgctcacctcatcggctttaccaacgtcgatagccaggggattgaaggggttgagaaaagctttgataaatggcttaccggtcagccgggcgagcgtatcgtacgtaaagaccgctatggccgggtaattgaagacatctcttctacggatagccaggcagcgcacaacctggcgctaagtatcgacgaacgcctgcaggcgctggtctatcgcgagctgaacaacgccgtggcctttaacaaagccgagtcgggcagcgccgtgttagtagatgttaacaccggtgaagtgctggcgatggccaacagcccatcctataacccgaacaacttctccggtacggcaaaagacaccatgcgtaaccgtgcgattaccgacgtgtttgagccgggttcgacggtgaaaccgatggtggtcatgacggcgctgcagcgcggtatcgtcaacgaaaataccgtgctcaataccgtgccttatcgaattaacggccacgaaatcaaagacgtggcgcgctacagcgaattgaccctgaccggggtgctacagaagtcgagtaacgtcggtgtttctaagctggcgttagcgatgccgtcctcagcgttagtagatacttactcacgttttgggcttggaaaggcgaccaatttggggttggtcggagaacgcagtggcttatatcctcaaaaacaacggtggtctgacatagagagggccaccttttctttcggctatgggctaatggtaaccccgttacagttagcgcgagtctacgcaacgattggcagctatggcatctatcgcccgttgtcgattaccaaggttgatcctccggttccgggcgagcgcgtcttcccggaatcactcgttcgtaccgtcgttcatatgatggaaagcgtggcgctgcccggcggcggcggtgtgaaagcggcgatcaaaggctatcgcatcgcgattaaaaccggtacggcgaaaaaagtggggccggatggccgctatatcaacaaatatattgcttacaccgcaggcgttgcgcccgccagccatccgcgcttcgcgctggtggtggtgatcaacgacccgcaggcaggtaaatactacggtggcgccgtttccgcgccggtcttcggtgccatcatgggcggcgtattgcgcaccatgaacatcgagccggatgcgctggcaacgggcgaaaaaagtgaatttgtaattaatcaaggcgagggaacaggtggcagatcg

SEQ ID NO: 23397 - DNA, 1044 bp, Klebsiella pneumoniae
atggtgatggcgggcggtaccggcgggcatgtgttcccgggactggcggtcgcgcaccatttaatggaccagggctggcaggttcgctggctgggtaccgccgatcgtatggaagcggatttagtgccgaaaaacggcatcgaaattgattttatccgcatctccggcctgcgtggcaaaggtatcaaagcgcagctactggcgccggtgcgtatctttaacgcctggcgtcaggcgcgggcgatcatgaagcgtttccagccggacgtggtgctgggcatgggcggctatgtttccgggcctggcggtctggcggcgtggtcgctggggatcccggtggtcctccacgagcaaaacggcattgccggcctgactaacaagtggctggcgaagattgcgaagaaagtgatgcaggcgtttcccggcgcgttcccgcatgcggacgtcgttgggaacccggtgcgcaccgatgtactggcgctgccgctgccaggtcagcgtctggttggccgtcaggggccgattcgcgtgctggtggtcggtggctctcagggcgcgcgcgtcctgaaccagacgatgccgcaggtggcggcgaagctcggcgctacggtgaccatctggcatcaaagcggcaaaggcggccagcaaaccgtgcagcaggcctatgccgccgccggacagccgcagcataaagtgacggaatttattgatgacatggccgcggcgtatgcctgggcagatgttgtggtttgccgttccggcgcgctgacggttagcgaaatcgcggccgcaggtttaccagcgctgtttgtcccgttccagcacaaagatcgtcagcagtactggaatgcgctgccgctggagaaagccggcgcggcgaaaattcttgaacagcctgagttcacggtagaagcggttgcctctaccctggcgagctgggatcgcgaaaccttgctggatatggcggaacgagcgcgtggcgcttcgattccggacgctaccgagcgggtagcagaagaggtcagcgccgtagctttggcgcgc

SEQ ID NO: 23398 - DNA, 1272 bp, Klebsiella pneumoniae
atgcgtttctctctcccacgcctgagaatgccgcagctgagcctgcctcggctgagactgccgcgattgccggggatgtttattttcgcctggctattcgctgcgctgaaaggctgggtgatgggctcgcgcccgaaagataacgacagtctggtgatgtatgaccggatgctgctatggctgaccttcggcctggcggcgatcggctttattatggtgacctcggcgtcgatgccggtcggacagcgcctggcgaacgatcctttcctcttcgccaagcgtgacggcctgtacattgtgctggccttcgcgctggcgatgattacgctacgtctgccgatggatttctggcagcgccacagtaccgcgatgctgatcgcctcgatcgtcatgctgctgatcgtactggtagtaggcagctcggtaaacggcgcatcgcgctggatagcccttggtccgctgcgtattcagccggcggagttcaccaagctgtcgctgttctgctacatcgccaactatctggtgcgtaaagccgacgaagtgcgtaacaacctgcgcggcttcttaaaaccgatgggcgtgattttcgtactggccatcctgctgttggcgcagcctgacctcggtaccgtggtggtcctgttcgtcaccacgctggcgatgctgtttctcgccggcgcgaagctgtggcagttcatcgccattatcggcatgggtatttcggcggtggtcctgctgatcctcgccgaaccataccgtattcgccgcgtgacctccttctggaacccgtgggaagacccgttcggcagcggctaccagctgacccagtcgctgatggctttcggccgcggcgagatgtgggggcagggcctcggcaactcggtgcaaaaactggagtatttaccggaagcgcacactgactttatcttcgccattatcggcgaagaactcggttatatcggtgtggtactggcgcttttaatggtattcttcgtcgctttccgcgccatgtcgattggccgtaaagcgctggagatcgatcatcgcttttccggcttcctcgcctgtgcgattggtatctggtttagcttccaggcgttagttaacgtcggcgcggcggcggggatgctgccgacgaaaggtctgacgctgccgctgatcagttatggtggttccagtctgttgattatgtcgacggctattatgttgttgttgcgaattgattatgaaacgcgtctggaaaaagcccaggcgtttacacggggtgtgcga

SEQ ID NO: 23399 - DNA, 1060 bp, Klebsiella pneumoniae
atgaaacgacctggtatcaacgggtcaaggaagatatcgacgctgagcagtccgcgaccggtgaactgtcggagcgcctgcaggatttgtccttataaaaatgatggaaaattataaacatactacggtacttctggatgaagccgtcaacggcctcaatattcgtccagacggtatctatattgatggtacttttggccgcggtggtcactcgcgcctgatcctctcccggctgggtgcggaaggacgcttgctggccatcgatcgcgacccgcaggcgattgccgtcgcgcaaaccatcgatgacccccgcttttccatcgtacatggtcccttttcacaactcgctgagtacgtcggcgagcgcaatcttaccggtaagatcgacggcattctgctcgatctcggcgtctcttccccgcagcttgacgatgcggaacgcggcttttcctttatgcgtgacgggccgctggatatgcgcatggatccgacgcgcggtcagtccgcggccgaatggctgcagacggctgaagaggacgatatcgcctgggtgattaaaacctttggcgaagagcgtttcggcaaacgtatcgcccgcgcgatcgtcgaacgtaatcgcattcagccgatgacccgcaccaagagctggcggaagtcatcgccgcggcgatgccggtaaaagataagcacaacatcccgcgacccgtaccttccaggcggtgcgcatatgggtaaacagtgaactggaggagatagagcagcgcgctaaacacagctcgctcagcgctgctggccccggcgcggcgcggctgctcgatcattagttttcattcgctggaagatcgcattgtgaagcgctttatgcgtgagcaaagaccgcggtccgcaggttccggcgggaataccgatgaccgaagcgcagctcaaaaaactgggcggccgtgagttgcgagcactaggcaagttgatgccgggcgaagaagaggtggcagagaatccacgcgcccgtagttcagtgctgcgtatcgcagagaggacgaacgcatgatcggcagagtga

SEQ ID NO: 23400 - DNA, 1314 bp, Klebsiella pneumoniae
atggcagattatcagggtaaaaaagtcgtcataattgggctgggcatgaccggcctgtcatgcgtggactttttcatggcgcgcggcgtaaccccgcgcgtgatggacacccgcgtcgcgcctccggggctggataaattacccgaatcggtcgaatgccatgtcggcggactcaatgatacctggctgctggcggcggacctgattgtcgccagtccggggattgcgctggcccatccttcgctcagcgcagcggccgacgctggcgtagagatcgttggcgatatcgaactgttctgccgcgaagcgcaggcgccgattatcgccattaccggttctaacggcaaaagcactgttactaccctggtgggcgagatggcgaaagccgctggagttaacgtcggcgtgggcggcaatatcggcctgccggcgctgatgttgctggacaccgatcgagagctgtatgtgctggagctctccagcttccagctggaaaccacctccagcctgcaggcggtggcggcaaccatcctcaacgtgactgaggaccatatggaccgctacccgctggggctgcagcagtatcgcgcggcgaagctgcggatttacgagaatgcgaagacctgcgtggtgaacgcggacgatgcgctcaccatgccggtacgcggggcggacgaacgctgcattagctttggcgtcgatgtcggtgactaccaccttaaccgccagcagggcgaaacctggctgcgcgttaaaggtgagaaagtcctcaatgtgaaagagatgcctctcaccggtcagcataactacagcaacgccctggcggcgctggcgctggccgatgccgcgggtctgccgcgggccagcagcctgaaggcgctgaccacctttaccggtctggcgcaccgtttccagctggtgctggatcacaacggcgtacgctggattaacgactcgaaggcgaccaacgtcggcagcaccgaggcggcgctgaacggcctgcagctggacggcacgctctatctgctgctgggcggcgacggcaagtccgctgattttaccccgctgaagcgctacctcggcggcgatcgtattcgcctgtactgctttggtcgcgatggcgccgagctcgctgagctgcgtcctgaggtggcggtacaaactgagactatggaacaggcgatgcgtcagattgctcccctggtgaaagcgggggacatggtgctcctgtcgccggcctgcgccagcctggatcagtttaagaactttgaacaacggggcgagatgtttgcccgtctggcgaaggagttaggt

SEQ ID NO: 23401 - DNA, 360 bp, Klebsiella pneumoniae
atgttccgtggagcaacgttagtcaatctcgacagcaaaggccgcctggccgtgccaacgcgctatcgcgaagggctgatcgaggacgctgccggtcaattggtatgcaccattgacattcatcacccgtgcctgctgctttatccattgcctgaatgggaagtcatcgagcagaaattgtcgcgtttatcgagcatgaatcccgttgagcggcgcgtacagcgtttgcttttgggtcatgccagcgaatgtcagatggataatgccggccgcttgctgattgcgccggtgttacggcagcatgccgggctgacaaaagaagtgatgctggtcgggcagtttaataaatttgaactgtgg

SEQ ID NO: 23402 - DNA, 1080 bp, Klebsiella pneumoniae
atgttagtatggctggccgaacacttggtcaaatattattccggctttaacgtcttttcatatctgacgtttcgcgccatcgtcagcctgctgaccgcgctgttcatctcgttgtggatgggcccgcgcatgatcgcccgtctgcaaaaactcgcctttggccaggtcgtacgtaacgacggcccggagtctcatttcagtaaacgcggtactccgaccatgggcgggatcatgatccttaccgcgatcaccgtttccgttctgctgtgggcctatccatctaacccgtacgtctggtgcgtactgacggtattaatcggctacggcatcatcggtttcgttgatgattaccgtaaagtcgtgcgcaaagataccaaaggcctgatcgcccgctggaagtatttctggatgtcggtgatcgccttgggcgtggccttcgcgctgtatctggcggggaaagataccccggcaaccgagctggtggtgccgttctttaaagacgtaatgccgcagctggggctgttctatatcttgctggcctacttcgttatcgtcggtaccggcaacgccgtcaacctgaccgacggcctcgacggcctggcgattatgccgaccgttttcgtcgcggcaggctttgcgctggtggcatgggccaccggcaacatgaatttcgccaactacctacatatcccgtatctgcgccacgccggcgagctggtgatcgtctgtacggcgattgtcggggcggggctgggcttcctgtggttcaacacctacccggcgcaagtctttatgggcgacgtcggttcactggcgctcggcggcgcgttgggcattatcgccgtgctgctgcgtcaggagttcctgctggtgatcatgggcggggttttcgtggtggaaacgctgtcggttattctgcaggtcggctcctttaagctgcgcggtcagcgtatcttccgcatggcgccgatccaccaccactatgaactgaaaggctggccggagccgcgcgttatcgtgcgcttctggattatttcgctgatgctggtgctgattggcctggcgacgctgaaggtacgt

SEQ ID NO: 23403 - DNA, 1356 bp, Klebsiella pneumoniae
atgattcgctttacgttaagtcaacttgccgcgatcgcccatggcgaacggcagggtagggatgtcgctatcgacgaggtgaccaccgatacccgtaaagtgacggcgggctgcctgtttgtggcgctgaaaggggagcgtttcgacgcccatgattttgccgaacaggcgaaagcggcgggcgccggcgcgctgctggtgagtcgtccgctggcctgcgatctcccgcaggtgattgtgaacgatacccggcaggctttcggtgagttagccgcctgggtgcgtcagcaggtgccgactcgcgtcgtcgccctgaccggctcgtccggtaaaacctcggttaaagagatgaccgcggcgatcctcagccagtgcggcaacacgctgtataccgccggcaacctgaacaacgatatcggcgtcccgatgacgctgctgcggctgaccaaagagcatcagtacgcggtgatcgaactcggcgccaaccaccagggcgaaatcgcctggaccgtcagcctgacgcgtccggaagcggcgctggtcaacaaccttgctgcggcgcacctggaaggtttcggttcgctggcgggcgtggcgaaggcgaagggcgaaatctataccggtctgccggaaaatggcatcgccatcctcaatgccgacaataacgactggctgaactggcaggcggtgattggcgatcgcaaagtgtggcgcttctcgccgaacgcggcgaacagcgatttcacggcgaccaacgtgcagatcaccagccacggcaccgaatttacgctgcagaccccaaccggcaacgttgacgtactgctgccgctgccgggacgccacaacatcgctaatgcgctggccgccactgcgctggcgatggcggtaggcgccgatttggcggcggtgaaagccggactggcgcagctgcaggccgttccgggacgtctgttcccgatccggctgaccgagagccagctgctgctggatgattcctataacgctaacgttggttcgatgaccgcggcggtgcaggtgctgtcagagatgcccggctttcgcacgatggtggtcggcgatatggcagagcttggcgcggagagcgcggcctgccatcgcgaagtcggcgaagcggcgaaagcggcgggtctggattgcgtcctcagcgtcggcgccttgagcgcggatatcagccgcgccagcggcgtgggcgaacattttaacgataaagccgccgtggtggctcgcctgcgcgagctgctggcggagcacaaaataatgaccattttagtgaagggttcacgtagtgccgccatggaagaggtagtacgcgcattacaggagactgggacatgt

SEQ ID NO: 23404 - DNA, 1174 bp, Klebsiella pneumoniae
gctcgcatcctcgcgctgtcggcactgaccacgatgatgttttccgcctctgccctcgcaaaaattgaagaaggtaagctggttatctggattaacggcgacaaaggctacaacggcctcgctgaagtgggtaaaaagtttgaaaaagacaccggcattaaagtttccgtagaacacccggacaagctggaagagaaattcccgcaggttgcggcgaccggcgacggcccggacatcatcttctgggcgcatgaccgtttcggcggctacgcgcagtcgggcctgctggcggaaatcaccccggacaaagcgttccaggacaaactctatccgttcacctgggatgcggttcgctataacggcaaactgatcgcctacccgatcgcagtcgaagccctgtccctgatttacaacaaagacctggtgccgaacccgccgaagacctgggaagagatcccggcgctggataaagaactgaaagcgaaaggtaagagcgcgctgatgttcaacctgcaggaaccgtacttcacctggccgctgatcgctgccgacggcggatacgcgttcaagtttgaaaacggcaagtacgatgtgaaagacgtcggcgtggacagcgcaggcgcgaaagcgggcctgaccttcctggttgacctgatcaagaacaagcacatgaatgccgataccgattactccatcgcggaagcggccttcaacaaaggcgaaaccgcgatgaccatcaacggtccgtgggcgtggtctaacatcgataagagcaaggttaactacggcgtgaccctgctgccaacctttaaaggcaaaccatcgaaaccgttcgttggcgtgctgagcgcggggatcaacgccgccagcccgaacaaagagctggccaaagagttcctcgaaaactacctgatgaccgatcagggtctggaagccgttaacaacgacaaaccgctgggtgccgtggcgctgaaatccttccaggaaaaactggaaaaagatccgcgcatcgctgccaccagtggcgaacgcccagaaaggcgaaatcatgcctaacatcccgcagatgtctgccttctggtatgccgttcgtaccgcggttatcaacgccgccagcggtcgccagactgtcgatgctgcgctgaaagatgcgcagagccgtatcactaagtaa

SEQ ID NO: 23405 - DNA, 366 bp, Klebsiella pneumoniae
atggccaataataccaccgggttaacccggatcattaaggcggcaggttactcctggaaaggatttcgcgcggcgtggatcaacgaggctgcgtttcgtcaggaaggcgtcgccgctatcgtggccgtcgcggtagcctgctggctggacgtcgacgccatcacccgcgtattgctgattggctcggtcctgctagtgatgatagtcgaaattctcaacagcgcgattgaagcggttgtggaccgtatcggctcggattttcacgagctttcagggcgcgccaaagatatggggtcggcggcggttctgctggcgattatcatcgcgctgatcacctggggaacgctgctgtggagccattatcac

SEQ ID NO: 23406 - DNA, 1107 bp, Klebsiella pneumoniae
atggcgagcgtacagctgcgaaatgtaacgaaagcctggggtgacgtggtggtatcgaaagatatcaatctcgatatccacgaaggggaattcgtcgtgtttgtcgggccatcgggctgcggcaaatctaccctgctgcgtatgattgccgggttagaaactattaccagcggggacctgtttatcggtgacacccgcatgaacgagatcccaccggcagaacgcggcgttgggatggtattccagtcttatgcactctatccccacctttccgttgcggaaaatatgtcgtttggcctgaagctggccggcgcgaaaaaagatctgattaaccagcgggtgactcaggttgcggaagtgctgcagctggcccatctgctggagcgtaaaccgaaagccctctccggcggtcagcgccagcgcgtggcgattggtcgtacgctggtggcagagccaagcgttttcctgctggatgagccgctttccaacctcgatgccgccctgcgcgtccagatgcgtatcgaaatctcccgtctgcataagcgactgggccgcaccatgatctatgtcacccacgatcaggtggaagcgatgaccctcgccgacaagatcgtggtcctcgacgccggccgtgtggcgcaggttgggaaaccgctggagctctatcactatccggctgaccgcttcgttgccggcttcattggttcaccgaagatgaacttcctgccggtcaaagtcaccgcgacggctatcgatcaggtgcaggttgaactgccgaaccgtcagcaaatctggctaccggtggacagcgccaacgtgcaggcgggcgccaatatgtccttaggtattcgaccggagcatttactgcccagcgatatcgccgatgtaacccttgaaggcgaggtccaggtcgtcgaacagctcggtcacgaaacgcaaattcatatccagatccccgccatccgtcagaacctggtttaccgccagaacgacgtggtgttggtagaagagggagccacattcgctatcggtttgccgccagaacgttgccatttattccgtgaggatggcaccgcttgtcgtcggctgcataaagagccgggcgtg

SEQ ID NO: 23407 - DNA, 1320 bp, Klebsiella pneumoniae
gtgcaaagaaaagcaatgatctcaggagatagaatgatgattactctgcgcaaacttcctctggcggtcgccgtcgcagcaggcgtgatgtctgctcaggcgctggctgtcgatttccatggctacgcgcgttccggcattggctggaccggcagcggcggcgagcaacagtgcttcaaagcaaccggcgctcaaagtaaataccgtcttggtaacgaatgtgaaacctatgcggaactgaagctgggccaggagctgtggaaggaaggggataagagtttttatttcgatactaacgttgcctattccgtgaatcaggaagatgactgggaaagcacctctccggcgttccgtgaagccaacatccagggtaaaaacctgatcgactggctgccgggctccacgctgtgggcgggtaaacgcttctatcagcgtcatgacgttcacatgatcgacttctactactgggatatctccggcccgggtgcaggtctggaaaacgttgaccttggcttcggtaagctctctctggccgctacccgtaactcagaaagcggcggctcttatactttctccagcgatgacaccaaaaaatatgctgcgaaaactgccaacgacgtctttgatatccgtctggcgggtctggaaaccaacccgggcggcgtgctggagttaggggtcgattacggccgtgctaacccgcaggatgactatcgcctggaagacggcgcgtcgaaagacggctggatgtggaccggtgaacatactcagtctatctggggcggcttcaacaagtttgtggttcagtacgccactgacgcaatgacctcctggaacagcggccactctcaggggaccagcatcgataacaacggcagcatgatccgcgttctggatcacggcgcgatggacttcaacgatgactggggcctgatgtacgtggcaatgtaccaggacgtggatctggacagcaagaacggttctacctggtacaccgtgggtgtccgtccgatgtacaaatggacgccgatcatgagcacccagctggaaatcggttacgacaacgtgaaatcccagcgtaccagcgaaaacaacaaccagtacaaaattactctggctcaacagtggcaggcaggcaacagcgtctggtctcgtccggctatccgtatcttcgcaacctacgcgaagtgggatgaaaactggggctacagcaacacctccggtctgcagacgaaagacagcagcggaagcggcgctttcacctccagccgcggtgacgacagcgaagttaccttcggtgcccagatggaagtgtggtgg

SEQ ID NO: 23408 - DNA, 852 bp, Klebsiella pneumoniae
atggtactgatgatcgtcagcggccgctcgggctcggggaaatccgtcgctctgcgagcgctggaagatatgggcttttactgcgtggataacctgccggtcgtgctgctgcccgacctggcgcggtcgctggctgaccgtaatatctccgcggccgtcagcatcgacgtgcgtaacatgccggaatccccggagatcttcgagcaggcgatgcagaatctgccggaatgtttttctccgcagctgctgttccttgatgccgaccgcaataccctgatccgccggtacagcgacacccgtcgtctgcacccgctgtcgagcaagaatctgtcgctggaaagcgccatcgacgaagagagcgatctgctggagcccctacgctcccgcgccgatctgatcgtcgatacgtcggaaatgtcggtgcatgagctggccgagatgctgcgtacccgactgctgggtaaacgcgagcgtgaactgacgatggtcttcgaatccttcggcttcaagcacggtattccgatcgatgccgattacgtctttgacgtgcgctttctgcccaacccgcactgggatccgaaactgcgtccaatgaccggtctggataaaccagtggccgccttcctcgatcggcacactgaagtgcacaactttatttatcagacccgaagctatcttgagctatggttaccgatgctggagaccaacaatcgcagctatctgacggtggccattggctgtaccggcggtaaacatcgttcggtttatattgctgaacaactggctgactacttccgctcgcgcggcaagaacgtgcagtctcgtcatcggacgctggaaaaacgtaaatca

SEQ ID NO: 23409 - DNA, 723 bp, Klebsiella pneumoniae
atgaggctccgcgttgcgccccttgcgctgctaaaacgtctggcattgcgtctgctgctgatcgccgccgttttctggggcggggggatcgcgctgtttagcatgctgccggtgccgttttcggcggtgatgcttgagcggcaggtgagcgcctggctgtccggtgatttccattatctggcgcattccgactgggttgccatggataagatctccccatggatggggctggcggtgattgccgccgaagatcagaagttcccggaacactgggggttcgacgtgtcggcgattgagaaagcgctggcgcacaatgaacgtcacgagacccgcatccgcggcgcgtcaacgctgtcgcagcagacggcgaaaaacctgtttttatgggatggccgcagctggctgcgtaaggggctggaagccgggctgactgtcgggatcgaaaccgtgtggagtaaaaagcggatcctgaccgtctacctgaatattgccgagttcggcgatgggatatttggtgtggaagcggccgcccagcgctattttcataaacccgccagtcagctgacgccgggggaagcggctctgctggccgcggtgctgccgaacccgatccgctatcgcgccgatgcgccgtcaggctatgtgcgcagtcgtcaggcctggatcttacgccagatgcgacagctgggcggggaagggttcatgcgcgagcataagctctat

SEQ ID NO: 23410 - DNA, 738 bp, Klebsiella pneumoniae
atgactgggaccatttccgcgccgttgtacctgttaagagggctgcagctcataggctggcgcgatatgcagcacgctctggattatttgtttgccgacggcgcgctccgggaggggacgctggtagccattaatgctgagaaaatgctggccgtagaggataacccggaggtacgggcgctgattgaggcggcggagtttaaatatgccgatggcatcagcgtggtgcgttcgctgcgcaaaaaatacccgcaggcccaggtatcccgcgtcgccggggccgatctctgggaagcgttaatgcagcgcgccggcgctgaagggacaccggtgtttttggttggtggtaaacctgaggtcctggcgcagacagaatccaggctgcgtcagcgctggcaggtgaacatcgtcggcagccaggacggttatttcacccctgagcaacgccaggcattgttcgaacgcattcgcgacagcggggcgaaaatcgtcaccgtcgcgatggggtcgccgcgccaggagatcttcatgcgcgactgccggcgcctgtatccgcacgcgctgtatatgggcgtcggcggcacttacgatgtttttaccgggcacgtccatcgggcgccgaagttctggcaggatctggggctggagtggttctatcgcctgcttttgcagccgagccgtatcaaaagacagttccgcctgctgcgctatttacgttggcattattccggtaagctc

SEQ ID NO: 23411 - DNA, 1128 bp, Klebsiella pneumoniae
gtgaaagtactaactgtatttggcacgaggccggaagccatcaagatggcgcctctggtccatgcgctggcaaaggatcctcattttgaggcgaaagtatgcgtgaccgcgcagcatcgggagatgctcgatcaggtgttgaaacttttctctattgtcccggactacgatctcaacatcatgaagccggggcaggggctgaccgagatcacctgtcgcatccttgaagggctgaagccggtgctggagtcgtttaaacccgacgtggtgctggtgcatggcgataccaccaccaccatggcggcgagcctggcggcgttttaccagcggataccggtgggtcacgtagaggccggcctgcgcaccggcgatttaagttcgccgtggccggaagaaggcaaccgtacgttgaccggccatctggcgacataccatttcgcccccacggaaacctcgcggcagaacctgctacgggaaaatattgccgacagtcggatcacggtcaccgggaatacggtcattgacgccctgttctgggtgcgggatcgggtgctgggtgatgaagcgctacgggagaccctgctgcagcgctatcctttcatcagccacggtaaaaagatgattctggttaccggccaccggcgggaaagctttgggctcggttttgaacagatctgccaggcgctggccgagatagcccatacccaccctgaggtgcagattgtctatccggttcacctgaatcctaatgtcagcgagccggtgaatcgtattcttggtcatattgacaatgtgatgttgattgaaccgcaggattacctgccgttcgtctggctgatggatcgcgcctggctgatcctgaccgattccggcggcattcaggaagaggccccctcgctgggtaagccggtgctggtcatgcgcgatatgaccgaacgtccggaagcggtggccgccggcaccgtgtgtctggtgggcaccgacagccagcgcatcgtcgcggaagtgacgcgactgctggaggatgatgctgcataccaggcgatgagccgcgcgcataatccctatggcgatggcgaagcatgtcgtcgcattttgtctgcacttaaaaataatcaggtaacgcta

SEQ ID NO: 23412 - DNA, 1014 bp, Klebsiella pneumoniae
gtgaacgttgagaacgagctggatattcgcgggctgtttcgcgctttatgggcaggaaaaggctggatagtcggcggcgccgtactcttcgccgccatcgtgctggtgtacaccttctttgctcgccaggagtggagcgccacggcgatcaccgatcggcctactgtcaatatgttggggggatactattcccaacagcagttcttacgcaatctggacattaaagccgacctcgcctcggtcgaccagccttccgccatggatgaagcgtataaagagttcatcatgcagctggcctcctgggatacccggcgcgatttctggctgcaaacggactactacaagcagcgtcagtcgggtaatgcccgcgctgatgcggcgatgctggatgacctgattaacaatatccagtttatgccaggcgatgcggccaagagcattaacgacagcgtcaaactgaccgccgagaccgggcaggatgccaataatctgttgcgtcagtatgtggccttcgccagccagcgggcggcaggccatcttaacgacgaacttaaaggcgcctgggcggcgcggacggtgcagatgaaggcgcaggtgaagcgccaggaagaggtggccgaggccatcttcaaccgccggacgcacagcgtggagcaggcgctgaaggtggctcagcagcacaatatttcacgtagcgaaacggatgttcctgccgatcagttgccggattcagagctatttttattgggcaggccgatgctgcaggccaggctggaaaacctgcaggccgtcgggccggaatatgacctcgattacgaccagaaccgcgccatgctgagcacgttgaacgtcggtccaacgttagatccgcgttttcagacttaccggtatttgcggacgccggaagaacctgtaaaacgcgatagcccgcgccgtgtatttctgatggtgatgtgggggattgtgggtgcgctcatcggcgcaggcgtggcgttatcgcgtcgtcgtgtcctg

SEQ ID NO: 23413 - DNA, 1002 bp, Klebsiella pneumoniae
gtggataaacccaactatcgcaaacggcatcaggggttgattccgttggtcggtggtatctcagtttatgcaggtatctgtttcactttcgccatcgccgattattatattcctcacgcctcgctgtatctggcctgcgcgggggtattggtgctggttggcgcgcttgacgatcgcttcgacatcagcgtgaaaattcgcgcggtcattcaggccgcgatcgccgtgattatgatgatggcagggaatctgcatctgagtagtttgggctttatttttggctcgtgggaactggtgctggggcccttcggcttcttcctgacgctgtttgccgtctgggccgctatcaatgcgttcaacatggtcgatggtatcgacggcctgctcggcggactgtcatcggtctcttttgcggcgaccgggattatcctttggtttgatggtcagtacagcctggcgatgtggtgtttcgcgatgatcgccgccattctaccctatattcttctcaatcttggcgccctcggccgccgctataaagtctttatgggtgacgccggcagcacgatgattggcttcaccatcatctggatcctgctggaaaccacgcaaggtaaaacgcatcccattagcccggtgaccgcgctgtggattatcgctatcccgctgatggacatggtggcgattatgtatcgccgcctgcgcaaaggtatgagtcctttctcaccggaccgtcagcatattcatcatttgatcatgcgcgccgggtttacttcccgccaggcgtttgtcctgattaccctggccgccgccctgctggcgctggttggcgtcgtggcggaatacacccgcattgtgccggaatgggtgatgttaattctctttttggtagccttctttctttatggctactgtattaagcgcgcctggaaagtggcgcgcctggttaagcgcatcagacgcagaattcggcgacacagcggcaataatccgaaactaaccaag

SEQ ID NO: 23414 - DNA, 1202 bp, Klebsiella pneumoniae
atgaatcttaccgaattaaagaatacgccggtttctgagctgattactctcggcgaaaatatggggctggaaaacctggctcgtatgcgtaagcaggatattatttttgccatcctcaagcagcattcgaagagtggcgaagatatcttggcgacggcgtactggagatactgcaggatggatttggattcctccgctccgcagacagctcctacctcgccggccctgacgacatctacgtatcccccagccaaatccgccgtttcaacctccgcactggtgacaccatttccggtaagattcgtcctccgaaagagggtgaacgttactttgcgctgctgaaagttaacgaagttaactacgacaagccggaaaacgcgcgtaacaagatcctgttcgagaacttaacgccgctgcacgcgaactctcgcctgcgtatggagcgtggtaacggttctaccgaagacttaaccgctcgcgtactggatctggcctccccgattggccgcggccagcgtggcctcatcgtcgcgccgccgaaagccggtaaaaccatgctgctgcagaacatcgcgcagagcatcgcatacaaccacccggactgtgtcctgatggtactgctgatcgacgaacgtccggaagaagtgaccgagatgcagcgtctggtgaaaggtgaagtggttgcttccacctttgacgagccggcatcccgtcacgtgcaggttgccgagatggttattgagaaagcgaaacgtctggttgaacacaagaaagacgttatcatcctgctcgactctattacccgtctggcgcgtgcctacaacaccgtggttccggcttccggtaaagtgttgaccggtggtgtggacgccaacgccctgcaccgtccgaagcgtttctttggtgcggcacgtaacgtcgaggagggcggtagcctgaccatcatcgccacggcgctgatcgacaccggttccaaaatggacgaagttatctacgaagagtttaaaggcaccggtaacatggaactgcacctctctcgtaagattgctgaaaaacgcgtcttcccggctatcgactacaaccgttccggtacccgtaaagaagagctgcttaccactcaggaagagctgcagaaaatgtggatcctgcgcaaaattatccatccgatgggtgagattgatgcgatggaattcctcatcaat

SEQ ID NO: 23415 - DNA, 651 bp, Klebsiella pneumoniae
atgtctgaggcaatgatgtggctgctgttgcgcggcgtatgggaaacgctggcaatgacttttgtctctggcttcttcggttttgtcctcggcctgccggtgggcgtgctgctgtacgttacccgtccggggcaaatcgtcgccaatgccaaactgtaccgcacgctgtcggcgctggtgaatattttccgctccatcccgttcattatcctgctggtctggatgattccgtttacccgcgtgatcgtcggtacctctatcggcctgcaggcagcgattgtgccattaacagttggcgccgcgccgtttatcgcccgcatggtggagaacgccctgctggaaatccccaccggtcttattgaagcctcccgcgcaatgggcgccacgccgctgcagatcgtgcgcaaagtcctgctacctgaagcactgccgggtctggtcaacgccgccaccatcacgctcatcacgctggtgggttattccgcaatgggcggcgcggtgggcgccggtggcctgggtcagattggttatcagtatggctatattggatataacgccaccgtgatgaataccgtactggtattgctggttgttctggtttatttaattcaattctctggcgatcgcatcgtccgggctgtgactcacaaa

SEQ ID NO: 23416 - DNA, 813 bp, Klebsiella pneumoniae
atggcctttaatttcaaaacttttgcggcagttggcgcgttaatcggttctctggcgctggtgggttgcggtcaggatgaaaaagatccgaatcatattaaagtcggcgttatcgtcggggcggaacagcaggtcgctgaagttgcgcagaaagtagcaaaagagaagtatggccttgacgtagaactggtgaccttcaacgattacgttctgccgaacgaagcgctgagcaaaggcgatatcgacgtgaacgccttccagcataaaccgtatctcgatcagcagattaaagaccgcggctataagctggtggccgtcggtaacaccttcgtctacccgatcgcgggttattcgaagaaaatcaaatcgctggacgaactgcagccgggctcgcagatcgccgtccctaacgatccgactaaccttggtcgttccctgctgctgctgcagcaggtcggtctgattaaactgaaagacggcgtgggcctgctgccgacctcgctggacatcgtcgagaacccgaaaaacctgaagattgttgaactggaggcgccgcagctgccgcgttccctggacgatgcgcagattgcgctggccgttatcaacaccacttacgccagccagattggcctgaccccggcgaaagacggcatctttgttgaaggtaaagagtctccttacgtgaacctgattgtggcgcgtgaagacaataaagatgctgagaatgtgaaaaaattcgttcaggcttaccagagcgatgaagtttacgaagcagcgaacaagatctttaacggcggtgccgtgaaaggctgg

SEQ ID NO: 23417 - DNA, 705 bp, Klebsiella pneumoniae
atgagcgcatttcagttcgcgcagataggcgtcatccgttcgccgtataaagagaagtttgccgttcctcgccagccaggcctggtgaaacacggcggcggagaactccatctggtcgcgccctataaccaggccgacgccgtgcgtggcctggagagcttcagccatctgtggatcctgtttgtgtttcatcagacaatggaaggcggttggcgtccgacggtgcgacctccccgactgggcggcaatgcgcggatgggcgtcttcgccacccgttcaacgtttcgccctaatcccatcggcatgtcgctcgttgagctcaagggcattcgctgtcagaaagatcaggtaatactggaactcggcagcctcgatctcgtcgacgggacgccggtggttgatatcaaaccgtatcttcctttcgccgaagccctgccggacgccagcgccagctatgcacagcaggcgccgctggcgggtatgaacgtcagctttacgccggaaatagacgcacagttactcacgctggaaaaacgctacccacatatcaaagcgtttatccgcgaggtgctggcgcaggatccgcgtccggcctaccgaaaagaggaacaagcgggaaaaacgtatgccgtctggctgctggatttcaacgtccgctggcgggtgattgccacgggttttgaagtctttgccctcgaagcgcgc

SEQ ID NO: 23418 - DNA, 1649 bp, Klebsiella pneumoniae
atgcgtactagccaatatctgctctccactctgaaggagacacctgccgacgccgaggtaatcagccatcagctgatgctgcgcgccgggatgatccgcaagctggcctccgggttatacacctggctgccgaccggcgtgcgcgtcctgaaaaaagtcgaaaacatcgtgcgtgaagaaatgaacaacgccggtgcgatcgaggtgttaatgccggtcgttcagccatctgaactgtggcaggagagcgggcgctgggagcagtacggcccggaactgttgcgcattgccgatcgcggcgatcgtccgttcgtcctcggcccaacccacgaagaggtcattaccgatctgatccgcaacgagctgaactcctataaacagctgccgctgaacttctatcagatccagaccaaattccgcgacgaagtgcgcccgcgtttcggggtgatgcgctcccgtgaattcctgatgaaagatgcctactctttccatacttcgcaggaatcgctgcaggaaacctacgacgcgatgtatgccgcttacagcaaaatcttcagccgtatggggctggatttccgcgcggtacaggctgacaccggttctatcggcggcagcgcctctcatgaattccaggtgctggcgcagagcggcgaagacgatgtgatcttctccgacagctccgactacgcggcaaacatcgagtttgcggaagccgttgcgccgaaagagccgcgcgcagccgccacccaggagatgaccctggtcgatacgccgaacgccaaaacatcgccgagctggtggagcagttcaacctgccgattgaaaaaaccgtgaaaactctgctggtgaaagcggttgaagatagcgcttccccgctggttgccctgctggtgcgcggcgatcacgagctgaacgaagtgaaagcggaaaaactgccgcaggtcgccagcccgctgaccttcgccaccgaagaagagatccgcgccctggtgaacgccggtccgggctccctgggcccggtgaacatgccggttccggtgattatcgaccgtactgtagcggtgatgagcgatttcgccgctggcgccaacatcgatggcaaacactacttcggcatcaactgggaccgcgatgtcgcgacgccggaagtggccgacatccgtaacgtcgtcgccggcgacccgagcccggatggtaaaggtaccctgcttattaagcgcggtatcgaagtgggtcatatcttccagctggggacgaagtactccgaggcgatgaaagccgcggtccagggcgaagatggccgtaaccagatcctgaccatgggctgctatggtatcggggtgactcgcgtggtagcggcggcgattgagcagaactttgacgatcgcggtatcgtctggccggatgcgattgcgccgttccaggtggcgatcctgccgatgaacatgcacaagtcttaccgcgtgcaggagctggcggagaaactgtacgccgagctgagcgcccagggtattgaagtgctgatggacgatcgtaaagagcgtccgggcgtgatgttcgccgatatggagctgatcggtatcccgcacaccatcgtgctgggagatcgtaacctcgacaacgatgatatcgaatacaagtatcgtcgc

SEQ ID NO: 23419 - DNA, 453 bp, Klebsiella pneumoniae
ttgactactgacactcatactctgcacattgaagagattctggaacttctgcctcaccgttacccgttcctgctggtagaccgcgtgctggattttgaagaaggtcgttttctgcgcgcagtaaaaaatgtttctgtaaacgagccgtttttccaggggcacttccctggtaagccgattttgccgggcgtcctgattctggaagcaatggcgcaagccaccgggattctggcgttcaaaagcgtcggaaaactggaaccaggcgagctgtactacttcgcgggtatcgatgaagcacgcttcaaacgcccggtagtaccaggcgatcagatgattatggaagtcactttcgagaaaacccgccgcggcctgacccgtttcaaaggcgttgcgctggttgacggtaaagtggtttgcgaagcgacgatgatgtgtgcgcgtagccgggaggcc

SEQ ID NO: 23420 - DNA, 840 bp, Klebsiella pneumoniae
atgactgcacatctcctccgcagcggactgcttacttttgccctgctcctgcttaccgcctgtaccctggacgtcggccgcagctcgccttccacatctgctgccgatgaccattcatcatcctgggctgttacccttcagcgtcaaagctcgattgccggcagcggactgcgcgaaatcgccgaaagcgacctgcgatccggcgacctgctgttctcctccagcctgggcgtcacatcgcttgggatccgcgccttcagcgcctcttccgtaagccacgtcgcgctgtatgttggcgaaggtcaggttgcggaagccaccggtgccggcgtacaagtgattagccttcagcaggcgctggcgcacagcgataaactctttgctctcagggtgcctgacctgacgccggaccaggcgacggcgatgaaaagttttgcctggcaggtcaaagacagcgggtataactatcgcggcattattcagtttatcccttatatggtcaccaaaccgctctgctcgctcaaccccttctcacgagactttcgccagcagtgcgtcagtggcctggctaaagcgcagctgggcgatgcggcaagcggcgacaagaaagcgtggttttgctcggagtttgtcagcgaggcctttgtccgagccgggcatccgctgacgctcgcgcaggcggcgtggatcagtccttccgatctgctgcacatgcgggaaggagacgtcgccacgtttaaacccgaaacgcagctccagtatgtcgggcatttgaaactgggagtttatcttcaggccggtaagctggcggggctgaacataccgaaggacggtgcggag

SEQ ID NO: 23421 - DNA, 1311 bp, Klebsiella pneumoniae
atgttcgtggatatgacggctgatattgcgcatacgcttcatccccatcgccagctgctggtggccttcagcggcggtctggactcgacggttcttctgcatcagctggtgctgctgcgggaacaggatccctcgctgacgctgcgggcggtgcatgttcaccacggccttagcgcccacgcagacgactgggtggcgcattgtcggcagatttgccagcagtggcaggtgccgctggtggtgcatcacgtgacgttagcccggggagggctgggcgtcgaggcccacgctcgtgcggcgcgctatcaggcctttcaggatacgctcaatgccggcgaggtgttagtgaccgcccagcaccaggacgatcagtgcgaaaccctgctgctggcgttaaaacgcggcagcggtcctaccggcctgtcggcgatggcgccatcctctgcctttgccggcagtcgactgctgcgtcctctcctcaatgaaacccgcgaatcactacgccagtgggcgctcgcccatcagctgtcgtggatcgaagatgagagtaatcaggatgatacctatgaccgcaatttcctgcgcctgcgggtgatcccggtgctgcgcgagcgttggccgcactttagcgaggccgtcgcccgcagcgccagcctgtgcgccgagcaggaacaactgctggacgagatgtttgcggcggagctggcgtcgctggtggccgaagatggctcgctggctatcgcgccgctggcgtcgatgagtccgccgcgccgagcggcgctgctgcgtcgctggctcgccgggcagcaggcgccgatgcccgcccgcgaggtgcctgagcgcctctggcacgaggtggcgctggcgcgggaagatgccagcccctgtctgcggctgggggaatttaccgtccgccgttttcaacagcgtttgtactgggtgaagtatcttcccggtcagacggacagcgttcagcgctggcccgactggcgccagccgctgcggctggcggacggtctcggcgagctgacgctgcggcccggcggcaggctgcgcccgccgtcggcggatgagccggtcaccgtccgctttcgcgccagcggccacctgcatattgtcgggcgccatggcggacgcaagcttaagaagctctggcaggagctgggcgttgctccgtggcgacgagacaccacgccgctgctgttttacggcgaaacgccggttgccgcagcggacgatctgtttgtgaccacagaaggtgaagtgaaggacggggaaggggtcaggctgatgtggaggaaaacgggcgat

SEQ ID NO: 23422 - DNA, 957 bp, Klebsiella pneumoniae
atgagtctgaatttcctagattttgaacagccgattgcagagctggaagcgaaaatcgattccctgactgcggtaagccgtcaggatgagaaactggatattaacatcgacgaagaagtgcatcgtctgcgtgagaaaagcgtagagctgacgcgcaaaatcttcgccgatctcggtgcatggcaggttgcgcaactggcgcgccacccgcgccgtccttacaccctggattatgtccgcctggtgttcgacgaatttgacgaactggccggtgaccgcgccttcgctgacgataaagcgattgtcggcggtatcgcgcgtcttgacggtcgtccggtgatgatcatcggccaccagaaaggtcgtgaaaccaaagagaaaattcgccgcaactttgggatgccggcgccggaaggctaccgcaaagcgctacgcctgatggagatggctgagcggtttaaaatgccgatcatcacctttatcgacaccccgggcgcctacccgggcgtcggcgcggaagagcgtggccagtcggaagcgatcgcccgcaacctgcgtgagatgtcgcgtctgagcgtgccggttatctgcaccgtgatcggtgaaggcggctccggcggcgcgctggcgatcggcgtgggcgacaaagtcaacatgctccagtacagcacctattcggtcatttcgccggaaggctgcgcctccattctgtggaagagcgcggataaagcgccgctggctgcggaagcgatgggcattatcgccccgcgtctgaaagagctgaagctgatcgattctatcgttccggaaccgctgggcggcgctcaccgcaacccggaagcgatggcggcaagcctgaaggcgcagctgctggcagacctggcagacctcgatctgctcagcgaagaagagctgctgaaccgccgctatcagcgtctgatgagctacggttacgct

SEQ ID NO: 23423 - DNA, 3480 bp, Klebsiella pneumoniae
atggctgaaccacgtttcgtacacctgcgggtgcacagcgactattccatgatcgatgggctggcaaagaccgggccgctggtgaagaaggcggcctcgcttggcatgccagcgctggcgatcaccgatttcaccaacctctgcggactggtgaagttctacgggacgggacacggcgcggggattaagccgatcgtcggcgccgacttccatgttcagtgcgatctgcttggcgacgaatttaccgagctgaccgtgctggcggcgaacaacaccggctaccagaacctgaccctgttgatttcccgcgcctatcagcgcggctacggcgccctggggccgtggatcgatcgcgactggctggtggaacatcaggaagggctgattctgctctccggcggccggaaaggtgacgtcggcgtcagcctgatccgcggcaatatgccgctggttgaacagtgcgtcgccttctacgaagagcatttcccggaccgctattttctggagctgatccgtaccggtcgacaggatgaagaggcctatctccacgccgccgtggcgctggcggaagcgcgcggcctgccggtggtggcgaccaacgatgtccgctttctcgacaccagcgatttcgacgcccatgaaatccgcgtcgcgatccacgacggctttacgctcgacgacccgaaacggccgcgcaactactcgccgcagcaatatatgcgcagcgaggaagagatgtgcgagctgttcgccgatattccggaagcgctggcgaacagcgttgaaattgccaagcgctgcaacgtcaccgtgcgacttggcgaatatttcctgccgcagttcccgaccggcgatatgaccacggaagatttcctggtcatgaaatcgaaagagggtctggaagagcggctggaattcctcttcccggatcctgccgtccgtgctgaaaagcgcccggagtatgaccagcgtctggatattgaactccaggttatcaaccagatggggttcccgggctacttcctgattgtgatggagtttatccagtggtcgaaggataacggcgtgccggttggcccgggacgcggttccggcgccggttcgctggtggcctacgcgctgaagatcaccgatcttgacccgctggagttcgacctgctgttcgaacgtttccttaacccggaacgtgtctcgatgcccgacttcgacgtcgacttctgcatggagaaacgcgaccaggttattgagcacgtggcggatatgtacggccgcgatgcggtatcgcagatcatcaccttcggtaccatggcggcgaaagcggtcatccgcgatgtcggtcgcgtgctgggtcacccgtacggcttcgtcgatcgtatctccaagctggtgccgcccgatccgggcatgacgctggcgaaagccttcgaggccgagccgcagctgccggagatctacgaggcggacgaagaagtgaaagcgctgatcgacatggcgcgtaagctggaaggggtgacgcgaaacgccggtaaacatgccggtggggtagttatcgctccaaccaaaatcaccgatttcgcgccactgtattgcgatgagcaggggctgcatccggttacccagtttgataagaacgacgtggaatacgccgggctggtgaaattcgacttcctcggtctgcgtacgctcactatcattaactgggcgctggagatgatcaacaagcgccgtgagaagaacggcgaagggccgctggatatcgccgccatccccctggatgacaagaaaagcttcgacatgctgcagcgctcggaaaccaccgcggtcttccagcttgaatcgcgcggcatgaaagatctgattaaacgcctgcagccggactgcttcgaagatatgatcgcgctggtggctctgttccgcccgggcccgctgcagtcggggatggtagataactttatcgaccgtaagcatggccgcgaggagatctcttatccggacgtgcagtggcagcatgaaagcctgaaaccggtgctggagccaacctacggcatcatcctgtatcaggaacaggtcatgcagattgcccaggtgctgtccggatataccctcggcggcgcggacatgctgcgtcgtgcgatgggtaagaaaaagccggaggagatggccaagcagcgttctatctttgaggatggggcgaagaaaaacggcattgacggcgaactggcgatgaaaatcttcgacctggtggagaaattcgccggttatggatttaacaaatcgcactccgccgcctacgcgttggtctcctaccagacgctgtggcttaaggcgcactacccggccgagtttatggcggcggtgatgaccgccgatatggacaacaccgagaaagtggttggcttggtggatgagtgctggcgaatggggctaaaaatcctgcccccggatattaactccggcctgtaccatttccacgtcaacgacgatggcgagatcgtctacggcattggcgccatcaagggcgtcggtgaaggaccgatcgaagcgattattgaggcgcgcaacaatggcggctatttccgcgagctgttcgacctctgcgcgcgaaccgatattaaaaagctcaaccgtcgggtgctggaaaagctgattatgtccggggcgttcgatcgtctcggcccacatcgcgcggcgctgatgaattcgctgggcgatgcgttgaaagccgccgaccagcacgcgaaagccgaggccatcggccaggctgatatgttcggcgtgctggcggaagagcccgagcaaattgagcaatcctacgccagctgccagccatggcctgagcaggtggtgctggatggtgaaagggagaccctggggctatacctcaccggacacccgattaaccagtatctgaaggagattgagcgctacgtcggcggcgtgaggctcaaagacatgcatccgaccgaacgtgggaaagtcaccacggcggcggggctggtgattgcggcgcgggtaatggtcaccaagcgcggcaatcgtatcggcatctgtactctggatgaccgttccgggcggctggaagtgatgttattcaccgacgcgctggataaatatcagcagttgctggaaaaagaccgcatacttatcgtcagcggacaggtcagctttgatgactttagcggggggcttaaaatgaccgcccgtgaagtcatggacattgacgaagcccgggaaaaatatgctcgcgggcttgctatctcgctgacggacaggcaaattgatgaccagcttttaaaccgactccgtcagtctctggaaccccaccgttcgggaaccattccagtgcacctctactatcagagggcggatgcacgcgcgcggttgcgtttcggcgcaacatggcgcgtctctccgagcgatcgtttacttaacgatctgcggggccttatcggctcggagcaggtggaactggagtttgac

SEQ ID NO: 23424 - DNA, 597 bp, Klebsiella pneumoniae
atgatggagttcgtctatccgcatacccatctggttgccggcgtcgatgaggtcgggcgtggccccctggttggcgcggtggtgaccgcggcggtgatcctcgatccggcgaagccgattgtgggtctgaatgattccaaaaaactcagcgagaagcgtcgtctggcgctgttcgatgagataaaagagaaagcgctgtgctggagcctggggcgcgccgagccgcacgaaatcgacgagctgaatattctgcatgccactatgctggcgatgcagcgcgccgtcgccggcctgagcattgttcctgagtttgtcctgatcgatggcaaccgctgtccgtcgctaccgatgccctcccaggcggtggtgaaaggcgacagccgggtggcagaaatcagcgcagcgtctattctggcaaaagtcactcgtgacgccgaaatggccacgctggacctcgcatttccccactacggatttgcccagcataaaggctatcccaccgctgttcacctgcagaagctgcaggaacacggcgcaacagagcatcaccggcgcagttttggcccggtgaagcgtgccctgggcctggcgtccaac

SEQ ID NO: 23425 - DNA, 1149 bp, Klebsiella pneumoniae
atggctgaacagcgtcccctgacgattgccctggtcgccggagaaacctccggcgatattctaggcgctggtctcatccgcgcgcttaaagcacgcatcccgaatgcgcgctttgtcggcgtggcggggccgctaatgcaggcggaagggtgcgaagcctggtatgaaatggaagagctggcggtgatgggcattgttgaagtgctcggtcgcctgtgtcgcttactccatattcgcgccgatttgacccgccgcttcggcgagctgcgtcccgatgtcttcgtcggcatcgacgcccctgactttaatatcaccctcgaaggaaatctgaaaaagcagggcatcaaaaccattcactacgtcagcccgtcggtctgggcctggcgacaaaaacgcgttttcaaaatcggcagatccaccgatctggtgctggcctttctgcctttcgaaaaagcgttttatgacaaatttaacgtcccctgccgctttattggccataccatggcggatgcgatgctgctggatcctgacaaaggcgctgcgcgcgaccggttagggatcccgcacagcgtgcgctgcctcgctctgctacccggcagccgcggcgcggaagtcgaaatgcttagcgccgacttcctgaaaaccgcgcagcttctgcgcgccacctatcccgatctgcaggtggtggtgccgctggttaatgctaaacggcgggagcagtttgagcgtattaaagctgagacggcgccggatatgatcgtgcatatgctggacggtcaggcgcgcgatgcgatgatcgccagcgacgccgcgctgctggcctccgggacggcagcgctggagtgtatgctggcgaaatgcccgatggtggttggctaccggatgaagccgttcaccttctggctggcgaagcggttggtaaaaaccgactacgtctcgttaccgaacctgctggccggtcgcgaactggttaaagagctgctgcaggatgagtgcgagccccaggcgctggcagccgctctgcagccgctgctggccgatggcaaaaccagccatgagatgcatgagacgttccgcgccctgcatcagcagatccgctgcaacgccgatgagcaggcggcggacgccgtactggagttagcaaaacaa

SEQ ID NO: 23426 - DNA, 414 bp, Klebsiella pneumoniae
gtggaagaaaaaatacagaagccggggctaatgatggtcatgaaacgcccttccctgcgccagttctgctggctgctgggtggttctcttctgctcggcgccctgttctggctttggctggcggtgcagcagcaggaggccacgctggcgatccgcccggttggccagggtatcggaatgccggacggtttctccgtctggcatcatctcgatgccaacggcatccgctttaaaagcatcacgccgcagaaggatggtctgctgattaagttcgattccaccgcccagggcgcggcggcgaaagaagttctcggccgcgctctgccacatggttatattattgcccttctggaggacgataactcgcccaccgcctggctatcccgcctgcgcgacgcgccgcatcgcctcggg

SEQ ID NO: 23427 - DNA, 984 bp, Klebsiella pneumoniae
atgggacaattagtcgacggcgtctggcaggatacctggtatgacacaaaatccaccggtgggcgttttaaacgttccgtttccgccttccgtaactggctgaccgccgacggcgcggctggccccagcggtgaaggcggttttgcagcggaaaaggatcgctatcatttgtatgtttctctcgcctgcccgtgggcgcatcgcacgttaattatgcgtaaattaaaaggtctggagccttttctccccgtatccgtggtcaatccgctgatgctggaaaacggctggacctttgacgatagcttcccggaagccaccggcgataccctctaccagcatgactttctttatcagctgtatctgcacgccgacccgcactacaccggacgcgtgaccgtgccggtgctgtgggataaaaaacagcagaccatcgtcagcaatgagtcggcagaaatcatccgcatgtttaataccgccttcgatggccttggcgcccgggccggggattactacccgccagcgctgcgggaacaaatcgatgagctgaacggctggatctatgacaacgtcaacaacggcgtgtataaagccggctttgccaccagccagcaagcttacgacgaagcggtggatgcggtctttacctcgctggagcggctggagcagatcctcggccagcatcgctatctgacgggcaatcagctaacggaagccgacattcgcctgtggacaacgctggtacgcttcgacccggtatatgtgacccattttaaatgcgataaacggcgcatcagtgattacctcaatctgtacggtttcctgcgcgacatctaccagatgccgggtatcgccgagacggtgagttttccgcatatccgtcaccactattaccgcagccataaaaccattaaccctaccggtattatttccattgggccgcagcaggatctcaacgaaccgcacggtcgcgatcagcgcttccgt

SEQ ID NO: 23428 - DNA, 385 bp, Klebsiella pneumoniae
atggaaggtactatccatgaaacaccgcatcgctctgcttctggtcctgacttcacttagcgccagcgccctagccgcctctccctgccaggaaaaagagcaggatattcaacgagagatcagctacgccgaaaagcatcataatcaaagtcgcattgatgggctaaataccgcgctacgtcaggttcgggaaaactgtagcgacagtaaactcaaagccgatcatcagcaaaaaattgccaaacagcgggaagagatcgctgaacgtcagcgcgatctgcaggaagcccggaagaaaggcgatgcggacaaaattaacaaacgccagcataaactcaatgaagcgcaacaggagttaaaaacgctggagtctcgggattactaa

SEQ ID NO: 23429 - DNA, 303 bp, Klebsiella pneumoniae
atggctaaagagaatgtgactgacgaccttcgtgcagaactgaaaacgctggcggataccctggaggaagtactaaattcctcggcggacaagtcgaaagaagagatgggtaaactgcgcagtaaagccgagagcgcgctgaaagagagccgcgctcgtttgggtgaaaccagcgaagcgattcttcgtcaaactcgtgagaccgccgcgcgagcggatgattatgttcgcgaaaatccgtggactggggtaggaattggcgccgccgtcgggctggtgctgggcgtcctgctgtcgcgtcgc

SEQ ID NO: 23430 - DNA, 396 bp, Klebsiella pneumoniae
atggcgaatactcaacacacgcagggaccgggtcagcgcgttttctccattggtcagcgcatcgtcacgctgctggtcgaaatggtggaaacgcggctgcgtctggtcgtcgtggagctggaggaggagaaagccaacctcttccagctgctgatcatgaccggactgacgctgctgtttgccgcgtttggcctcatgagtctgctggtgctggttatctgggccgttgacgctcagtaccgcctgcacgtgatgatcgccaccaccgttgtgctgctccttgccgccgcgatcgtgggtatcctaaccctacgtaaggcgcgccgctccacgctgctgcgtctaacgcgtaaagagctggagaacgaccgtgcccttctggaggaggataaatcg

SEQ ID NO: 23431 - DNA, 912 bp, Klebsiella pneumoniae
gtgatccacaccctgacactgaataccgcgatcgatatgaatatcttttgcgatccgctccagccggcggcagtcaaccgcacccggcaaacggaatattgcccgaatggtaaaggggttaacgtctcgctggtattacatcattaccagcagccaacccatgtcatgggcatattcggcggttttaccggccgctatatcgttgaggaactacgcaaacagcatattaatgtcacaccggcatgggtcgctgaaccgacccgtataaatatatttattaacgacggcagtgatgaatacaaactggtaaatcccggcgcgcggattgacgatgaaggaaaagaacaaattcttcaccatttacagtgcgtcgcgcccggtgattatttagttatcagcggcagtctgccaccgggaatagagagccggttctatagcgagattctggtgctgtgccagcagaaagggtgtgaagtcatcttagatatcagccacccggtgctgcgccagctgttagagtggcgtccactattgattaaacccaatgacgacgagctgaaagagatctttggtctggatgtcagcagcccccggcgggtacgcgaagcaatgcaaacgctccaccagctcggggctcgcaatgttctgctgacccttggcgcgcaagggctctatttttcgaacggcgcgcaactgtggttctgctcggcaccgaaaatcgaactggtcagctcggcctgcgccggcgatgccgcgctgggtgcattcctcagccattggcttaacacagacgatattccccaggccctggcgctggccagcgccaccggcgctgatgtggccgcctccgccgggctgggtaaattaaaccgtacgcaagaattattacaacaacttcagatcgtccaatta

SEQ ID NO: 23432 - DNA, 1355 bp, Klebsiella pneumoniae
aaaattattgccgtgaccggctgccctacaggtattgctcatacatttatggctgaagaggccttaaaaaccgcagcgaaaaaattaaatgttgaaataaaagtcgaaaccaatggcgcttccggcgtagaaaacgccattacgccggaagacctgaaggatatttatggcgtgattatcgctgccgataaagatgttaatgccgaacgttttaatggtttaccggttattgaggtgccggttaaagaagccattcaccatccggcggaattaattaataaagtcgttaacggtcaggcgccgcgtcgtcagggattctccgcggcaacggatccagacgagaaatatgagcgagaatcgttcggccgacagatttacaaacatctgatgagcggcgtttccaacatgctaccgttcgttgtcgccggcgggatcttaatcgctgtttctttcttatggggtatctactccgccgacccgaattcaccgcagtataacgtgattgccgccacgctgatgaaagtcggtcagcaggcgttctcgatcatggtgccggtgtttaccgcctacattgcctggtcgatatctggccgccctggcatggttgccggttttgtcggcggtctgctggcgaacgccaccggcgccggattcctcggtgggatcatcgccggtttgccgccgggtattttatgctgctgatccgtcatctgctcgacggtctgccgcgccagtacgaagggctgaagtcgatctttattatgccgctgataggcgtcctggtgatcggcgtgatgatggtcctgctcggccagccggtggcagcgatcaacaatggcatgatgaactggctcagctctttacaggaagccaacccgatcctgctggggatcgtggtaggcgcaatgtgctccttcgacttcggcgggccggtcaacaaagcggcctatgtcaccggtacgttgctgctgggtcaaggtaactacttttttatggccggtgtatctgccgcctgcatcacgccgccgctggtcatcgctctggcgaccacgttctttccgaaaggctttagcgaggaggaacgcgccgccgggatggtcaactatatcctcggctgtacgcacattaccgaaggtgcgattccctttgccgccaaggatccgctgcgggtgatcccgatgatgatgatcgcctcctcaatttctgcggtactcagctacagcctgcatattcaggttccggcaccgcacggcggcttcttaatcctgccgctggtcagtaaaccgttgatgtgggtgctgtgcattctcgccggttccgcctgcggggcacttatgctgggatgctggcggctg

SEQ ID NO: 23433 - DNA, 768 bp, Klebsiella pneumoniae
atggataacgcaatttttccgaacaaatttaaggccgcgctggcggcgcatcaggtgcagattggctgctggtgcgctttggctaacccgattagcaccgaggtgctgggtctggcggggttcgactggctggtgctggacgcggaacacgcgccaaacgacgtcaccacgctcattccgcagctgatggccctgaaaggtagctccagcgcgcaggtagtccgtgtgccgaccaatgaacccatcatcatcaagcgcatgctggacatcggcttctataacttcctggtgccgtttgtcgagacggctgaacaggcggcgcaggcggtggcttcgacccgttatccgccggaagggatccgcggggtctccgtttcccaccgcggcaatatgtttggcaccgtgccggactacttcgcccagtccaacaagaacatttccattctggtgcagattgagagccagaccggagtggacaacgtcgaggcgattgccgcgaccgagggcgtggacggtgtgtttgtcggcccgagcgacctggccgccgccttaggccatttgggcaatgccgcccatcctgaggtgcagcgcgctatccagcatatcttcgccagcgcgaagaagcacggtaagccaagcggcattctggcgccagtggaagccgatgcgcgccgctatctggaatggggcgcgaccttcgtcgccgttggcagcgatctgggcgtcttccgttctgcaacccagaaacttgccgacgcgtttaaaaaa

SEQ ID NO: 23434 - DNA, 1329 bp, Klebsiella pneumoniae
atgattttggattctacattagatgaaaaaaaaggaataccgacccgctatttaattctgttgatgatatttgtggtgacggcagtgaactatggcgaccgcgcgaccttgtctatcgccggtactgacgtcgcgaaagagctggggctcagcgcggtgtcgatgggatacattttttccgccttcggctgggcttatctgctgatgcagatccctggcggctggctgctggataaatttggctcgaaaaaggtttattcatacagtctgtttttctggtcactgtttaccttcctgcaaggctttattgatgtgttcccgctcgcctgggccggggtctccatgttctttatgcgttttatgctgggcttttccgaagcgccctcgtttcccgccaacgcccgcattgtggcggcctggtttccggccaaagagcggggtacggcttcagctatctttaatgccgctcagtacttctcgctggctctgttctcgccgctgctcggctggctgaccttcgcgctgggctgggaacatgtctttaccgtgatggggataatagggtttgtgctcaccatcatctgggtgaagtttgtgcataaccccaccgatcatccgcgaatgtccgccgcggagctgaaatatatctcagaaggcggcgcagtggtcgatatggaccataaaaaagaggccaccccggcggccgggccgaagatggactatatccgccagttgctgactaaccgaatgatgttaggcgtatttttcggtcagtatttcctgaataccattacatggttcttcctgacgtggtttccgatctacctcgtgcaggacaagggaatgtcgattctgaaagtggggtttgtggcttcgattccggcgctgtttggctttgctggcggcgtactgggcgggctgttttcggattatctgattggccgcggctgcacgctgacttttgcgcgtaagctgcccattgtgctgggaatgctgctggcgtcgtccatcatcctgtgtaactacacggccagcacgccgctggtcattacgctgatggcgctggcgttctttggcaaaggctttggcgcgctgggctggccggttatctcggatgtcgcgccgaaggagattgttggcctgtgcggcggggtattcaacgtctttggcaatgtggcctcgatcgccacgccgctggttattggctatatcgtgagcgaactgcactcatttaatggcgcactgatttttgttggcggctccgcgctgatgatgatggtctgctacctgtttgtggttggcgatatcaaacgtatggaattgcagaag

SEQ ID NO: 23435 - DNA, 1317 bp, Klebsiella pneumoniae
gtgcaacagatagcccgcgctgtcactcaggcattcaacaatttgccacgacctcatcgcgtcatgctggggtcgcttagcgttcttaccttagcggtcgccgtctggcgaccctacatttaccacccggaatccgcccccatcgtcagaaccattgaactggaaaaaagcgagatccgttccctgctgccggaagcctccgagccgatcgaccaggccccgcaggaagaagaagccattcctcaggatgagctcgacgaaaaagccgatagcgatgccggcgggcacgaatatgtggtgtcgaccggcgatacgctcagcagcatcctgaaccagtacggtatcgatatgggcgatatcgcccagctttcctccgccgataaagagctgcgcaacctgaagattggccagcagctctcctggaccctgaccgccgacggcgatctgcagagcttgacctgggagatgtcccgccgcgagacccgcacctatacccgtgtggataacggttttaaaatgagcagcgagctgcagaaaggcgattgggtcaacagcgtgctgaagggcaccgtcggcgccagctttgtctccagcgcgcgtgatgccgggctgaccagcacggaaatcaacgcggtgatcaaggccatgcagtggcagatggatttccgtaagctgaagaaaggcgacgaattctcggtattgatgtcgcgcgaaatgctcgacggcaaacgtgagcaaagccagttactcggcgtgcgtcttcgctctgacggtaaggattactatgccatccgcgccgaagacggcaaattctacgaccgcaacgggacgggtctggcgaagggctttatgcgcttcccaacggcgcgtcagttccgcgtctcctctaactttaatccgcgtcgtctgaacccggtcaccggccgcgtcgcgccgcaccgtggcgtcgatttcgcgatgccgcagggaacgccagtgctggcggtgggcgatggtgaagtagtcgtggccaaacgcagcggcgctgccgggtattacgtcgcgatccgccacggtcgcacctataccactcgctacatgcacctgcgtaagctgttagtgaagccggggcagaaagtgaagcgcggggatcgcattgcgctgtcggggaataccggacgctctaccgggccacatctgcactacgaagtgtggatcaaccagcaggcggtcaacccgctgacggctaagctgccgcgtaccgaagggctgagcggttccgaccggaccgactatctggcacaggtcaaagaggtcgttccgcagctgcggtttgac

SEQ ID NO: 23436 - DNA, 1440 bp, Klebsiella pneumoniae
atgtccagaaggcttcgcagaaccaaaatcgttactaccttaggcccggcaactgaccgcgataacaacctggaaaaggttatcgccgcgggcgcaaacgtagtacgtatgaacttctctcacggcaccccggaagatcatcagctccgtgccgacaaagtgcgtgagattgcggcaaaactgggccgtcatgtggccatcctcggcgacctccagggaccaaaaattcgcgtatcgaccttcaaagaaggcaaaattttcctcaacgtcggcgataaattcctgctcgacgcaaaccttggcaaaggcgaaggcgacaaagagaaagtcgggatcgactataaaggcctgccggcggacgtcgtgccgggcgatatcttattgctcgacgatggtcgcgtgcagctgaaagtcctcgaagttcaggggatgaaagttttcactgaagtgaccgtcggcggcccgttgtccaacaacaaagggatcaacaagctgggcggcggcctgtctgccgaagcgctgaccgacaaagataaagctgatatcgtcaccgccgctaaaatcggcgtcgactacctggccgtctctttcccgcgctgcggcgaagacctgaactacgcccgtcgcctggcgcgcgatgccggctgcgatgcgaaaatcgtcgccaaagttgagcgtgccgaagcggtttgcgatcaggatgcgatggacgacgtgatcctcgcctccgatgtggtaatggttgcccgtggcgacctcggcgtcgagatcggcgatcctgagctggtgggcatccagaaagcgctgatccgtcgtgcccgtcagctgaaccgttccgtcatcaccgccacccagatgatggagtcgatgatcaccaacccgatgccgactcgcgcggaagtgatggacgtggccaacgccgtgctggatggtaccgatgcggtgatgctctccgcggagaccgctgccggtcagtatccttcggaaaccgtggccgcgatggcgcgcgtgtgtctgggcgcggaaaaaatccctagcctcaacgtctccaaacaccgtctggacgtccagttcgacaacgtggaagaagcaattgccatgtcggcgatgtatgccgccaaccacctgaaaggcattaccgccatcatcaccatgaccgaatcgggccgtaccgcgctgatgacttcgcgcattagctccggtctgccgattttcgccctctcccgccacgagcgcaccctgaacctgaccgccctctaccgcggggtgacgccggtgttcttcgacagccagaatgacggggtggccgccgcgcacgacgccgtcaatctgctgcgggacaaaggctatctggtctccggcgacctcgtggtcgttacccagggtgacgtgatgagcaccatcggcagcaccaacaccacccgtatcctcaccgtcgag

SEQ ID NO: 23437 - DNA, 1473 bp, Klebsiella pneumoniae
atggcggtaacgcaaacggcccaggcatgcgacctggtcattttcggcgcgaagggcgacctggcgcggcgtaaattgttgccttccctgtatcagcttgaaaaggcgggccagatccacgctgacaccagaatcattggcgtcggccgtgccgactgggataaagcggcttataccaaagtcgtgcgcgaagcgctggaaaccttcatgaaggaaaaaattgatgaaggtttgtgggataccctgagcggacgcctggagttctgtaatcttgacgtcaatgacaccagcggcttcacccgcctgggtgagatgctggatcaaaagaaccgtgtcaccatcaactatttcgctatgccgccgagcacctttggcgcgatctgtaaagggctgggcgaagcgaagcttaatgccaagcctgcgcgcgtggtcatggaaaaaccgctcggcacctcgctggaaacctcccgtgaaatcaacgaccaggtcggcgagttttttgaagagtgtcaggtctaccgtatcgaccactatctcggtaaagagacggtcctcaacctgctggcgctgcgcttcgccaactccctgttcgtcaataactgggactgccgcaccatcgatcacgtcgaaatcaccgtcgcggaagaggtgggtattgaagggcgctggggttacttcgaccaggccgggcagatgcgcgacatgatccagaaccacctgctgcagatcctgtgcatgattgccatgtcgccgccgtccgatctcagcgccgacagcatccgtgatgaaaaggtcaaggtgctgaaatccctgcgccgtattgaccgctccaacgtgcgcgagaaaaccgttcgcggccagtataccgccggctttgcccagggcaaaaaagtgcctggctatctcgaagaggagggggccaacaagaccagcaacaccgaaaccttcgtggcgatccgagtcgatatcgataactggcgctgggctggcgtaccgttctatctgcgcaccggcaaacgtctgccgaccaaatgctcagaggtagtggtttacttcaaaaccccggaactgaatctgtttaaagagacctggcaggagctgccgcagaacaagctgaccattcgcctgcagccggacgaaggggtagatatccaggtactgaacaaagtgccgggcctcgatcataaacataacctgcagatcactaaactggatctgagctactccgagacctttaaccagacgcacctggccgatgcctatgaacgtctgctgctggagaccatgcgtggcatccaggcgctgttcgttcgccgcgacgaagtagaagaggcgtggaaatgggttgactccattaccgaagcctgggcagccgaccgcgatgcgccgaaaccgtatcaggccgggacctggggaccggttgcgtcggtggccatgatcactcgcgacggtcgttcatggaacgagttcgag

SEQ ID NO: 23438 - DNA, 657 bp, Klebsiella pneumoniae
atgctgcgcgtcattgataccgaaacctgcggcctgcaggggggcatcgttgaaatcgcctcggtcgatatagtcgacgggcaaattaccaatcccatgagccatctggtgcgtcccgatcggcccatcagcccgcaggcgatggctatccaccggatcacggaagagatggtcgccgataagccgtggattgaggagattattccgcactatcatggcagcccgtggtacgtcgcgcataacgccagcttcgatcgccgggtgttgccggagatgcacggcgagtggatctgtacgatgaagctggcccgacgcctgtggccgggaatcaaatacagcaatatggggttatataagtcacgtaagctgaacgtgactacgccgccgggactgcatcaccaccgggcgctgtatgactgctatatcaccgccgcgctgctgctggatatcatcaatgtttccggctggacccctgacgaaatggccgatatcaccggtcggccggcgctgctgactacttttaccttcggcaaataccggggtaaggccgtcgccgagattgctgaaaacgatccaggctatctgcgctggttattcaacaatctcgaccgcatgagccccgaactgcgcctgacgctcaggcattacctcggggaa

SEQ ID NO: 23439 - DNA, 426 bp, Klebsiella pneumoniae
atgaaaacttttacagctaaaccagaaaccgtaaaacgcgactggtatgttgttgacgcgaccggtaaaactctgggccgtctggctactgaactggctcgtcgcctgcgcggtaagcacaaagcggaatacactccgcacgttgataccggtgattacatcatcgttctgaacgcagaaaaagttgctgttaccggcaacaagcgcgaagacaaaatgtactaccaccacaccggccacatcggtggtatcaaagaagcgacctttgaagagatgattgcccgccgtcctgagcgtgtgattgaaatcgcggttaaaggcatgctgccaaaaggcccgctgggtcgtgctatgtaccgtaaactgaaagtttacgcgggtaacgagcacaaccacgcggcacagcaaccgcaagttcttgacatc

SEQ ID NO: 23440 - DNA, 4458 bp, Klebsiella pneumoniae
atgttgtacgacaaatcccttgagagggataactgtggtttcggcctgatcgcccacatagaaggcgaacctagccacaaggtagtgcgaaccgcaatacacgcactggcccgcatgcagcaccgtggcgcaatccttgccgatggtaaaaccggcgacggttgcggtctgctgctgcaaaaacccgatcgtttcttccgcatcgttgccgaagagcgcggctggcgtttagccaaaaactacgccgttgggatgctgttcctgaataaagatcctgagctggctaaagcggcgcgccgcatcgttgaagaagaacttcagcttgagaccctgtcgattgtcggctggcgcgatgtgccgaccaacgaaggcgtgctcggtgaaatcgccctctcctcgctgccccgtattgagcaaatctttgtcaacgccccggctggctggcgcccgcgcgatatggagcgccgtctgtttattgcgcgtcgtcgcattgaaaaacgcctgcaggaagacaaggatttctacgtttgtagcttgtccaatctggtcaacatctataaaggtctgtgtatgccggcggatttgccgcgcttctacctggacctcgcggacctgcgcctggagtcggctatctgcctgttccaccagcgcttctccaccaacaccgtaccacgctggccgttggcgcagccgttccgctacctggcgcacaacggtgaaattaacaccattaccggcaaccgccagtgggcccgcgcccgtacctataagttccagaccccgctgatcccggacctgcacgacgccgcgccgttcgttaacgaaaccggctccgactccagttcaatggacaacatgctggagctgctgctggccggcgggatggacatcgtgcgcgccatgcgtctgctggtgccgccagcctggcagaacaacccggatatggatccggagctgcgttcgttcttcgactttaactccatgcatatggagccatgggacggcccggcgggcatcgtcatgtccgacggtcgctacgcggcctgtaacctcgaccgtaatggcctgcgcccggcgcgctacgtcattaccaaagataagctcatcacctgcgcctctgaagtcggcatctgggactaccagccggacgaagtggttgaaaaaggccgcgtgggcccgggcgagctgatggttatcgatacccgtgccggacgcattctgcactcagcggaaaccgatgacgatctgaagagccgccatccgtataaagagtggatggagaaaaacgttcgtcgcctggtgccgtttgaagatctgccggacgaagaggttggcagccgccagctggacgacgatctgctggccagctaccagaaacagtttaactacagcgcggaagagctggactccgtcctgcgcgtgctcggcgaaaatggccaggaagcagtcggttcgatgggcgatgacacgcctttcgccgtgctctccagccagccgcgcattatctacgattacttccgtcagcagttcgcccaggtgactaacccgccgatcgatccgctgcgtgaagcgcacgtcatgtcgctggccaccagcatcggtcgcgaaatgaacgtcttctgcgaagcggaaggccaggcgcatcgtctgagcttcaaatcgccgatcctgctgtactccgatttcaaacagctgacgacgatggaagaagagcactatcgtgccgacgtcctcgacatcaccttcaacccggcagaggcttccctcagcgagacggtgaaggcactgtgcgacaaagcggagcagatggtacgcgatggtaccgtgctgctggtcctctccgaccgcaacatcgccaaagaccgcctgccggtgccggcgccgatggccgttggcgcgatccagacccgtctggtcgataaaagtctgcgctgcgatgccaacatcatcgttgaaaccgccagcgcccgcgatccgcaccacttcgccgtgctgctgggcttcggcgcgacagctatctatccgtacctcgcctatgaaacgctggcgaagctggtcgacagcaaagccatcgataaaccgtaccgtgcggtgatgctgaactatcgcaacggtatcaacaaaggtctgtataagatcatgtccaagatggggatctcgaccatcgcctcctaccgctgctcgaagctgttcgaagcggtcggtctgcatcgcgatgtctccgatctctgcttccagggcgtggtcagccgcatcggcggcgctggcttcgacgatttccagcaggatctgctgaatctgtcgaaacgcgcctggctggcgcgcaagccgctggctcagggcggtctgctgaagtacgttcacggcggcgaatatcacgcctacaacccggacgtggtgcgcaccctgcagcaggctgtgcagagcggcgagtacagcgattatcaacaatacgcgaagctggttaacgaacgcccggcggccacgctgcgcgatctgctggcgctcaacccgggcgaagatgccatcagcatcgacgacgtggagccggcgaaggagctgttcaaacgcttcgataccgcagcgatgtcgatcggcgccctgagtccggaagcgcacgaatcgctggcggaagcgatgaacagcatcggcggcttctccaactccggtgaaggcggtgaagacccggcgcgctacggcaccaacaaagtgtcgcgcatcaagcaggtcgcatccggccgcttcggcgtcaccccagcctatctggtcaatgccgacgtcatccagatcaaagtcgcccagggcgcgaagccgggtgaaggcggtcagctgccgggtgataaagtcaccccgtacatcgctaaactacgctattcggtaccgggcgtgacgctgatctccccgccgccgcaccacgatatctactctatcgaggatctggcgcagctgattttcgacctcaagcaggttaacccgaaagcgatgatctcggtcaagctggtttcggaaccgggcgtgggcaccatcgccaccggcgtagccaaggcttatgccgatctgatcaccatcgccggctacgacggcggcaccggggcaagcccgctcacttcagtgaaatatgccggctgtccgtgggaacttggtctggtggaaacccagcaggcgctggtcgctaacggtctgcgtcacaagatccgtctgcaggtggatggcggcctgaaaaccggcctcgatatcatcaaagcggcgatccttggcgcggaaagcttcggcttcggcaccggcccgatggtggcgctgggctgtaaatacctgcgtatttgtcacctgaacaactgcgcgaccggcgtggcgacccaggatgacaaactgcgtaagaaccactatcacggtctgccgttcaaagtgaccaactactttgaatttatcgcccgtgaaacccgcgagctgatggcccagctgggcgtcaagcgactggtggatctgattggccgcaccgatctgctcaaagagctggatgggttcaccgccaagcagcagaaactggatctgggtaaactgctggagaccgcagagccgcatcctggcaaagcgctgtactgcaccgaaaataacccgccgttcgataacggcgtgctcaacgcccagctgctgcagcaggcgaaaccgtacgtggatgaaaagcagagcaaaacgttctggttcgatatccgcaataccgaccgctccgtgggggcctcgctgtccgggtatatcgcccagacccatggcgaccagggactggcgggcgacccgatcgtcgctcactttagcggcaccgcgggccagagcttcggcgtgtggaacgccggcggcgtggaactgcatctgacgggcgacgccaacgactatgtcggcaaaggcatggcgggcggtctgctggccattcgtcctccggtgggctccgctttccgcagtcacgaagccagcattatcggcaacacctgcctgtacggcgcgaccggtggtcgtctgtacgccgcaggccgcgcgggcgagcgtttcgcggtgcgtaactccggcgccattaccgtggtggaaggcatcggcgacaacggctgcgaatatatgaccggcggcatcgtctgcgtgctcggtaaaaccggcgtcaactttggcgcagggatgaccggcggctttgcctatgtcctggatgaagatggcgacttccgcaagcgcgtgaatccggagctggtggaagtgctggacgttgactctctggccatccatgaagagcacctgcgcggtttaatcaccgagcacgtacagcttaccggttcgcaacgcggcgaagagatcctcgccaactggccggccttctccgcgaagtttgcgctggttaaaccgaagtccagcgatgttaaagcactgttgggtcaccgtagtcgttccgcagctgagctgcgggtgcaggcgcag

SEQ ID NO: 23441 - DNA, 402 bp, Klebsiella pneumoniae
atgttcatgacctgggaatacgcgctaattgggttagtcgtcggtatcatcattggtgccgtcgccatgcgtttcggcaaccgcaaactgcgccaacagcaggcgctgcagtacgaactggaaaagaataaagccgagcttgaagagtaccgtgaagagctggtgagccactttgcgcgtagcgccgaactgctggataacatggcgcacgactatcgtcagctatatcagcatatggcgaaaagctctaacaacctgctgccggactcgatggcagacgccaacccgttccgcaaccgtctggaagagtctgaagccagtaacgatcaggcgccggtccagatgccgcgcgactactccgagggcgcatccggtttactgcgcggaggcgcaaaacgcgat

SEQ ID NO: 23442 - DNA, 1365 bp, Klebsiella pneumoniae
atgaagaaacagactttgctgttgagtgcgttagcgttaagcattgggttatcgttgtcggtcctgcctccggcagcggcatccttaccgactcaggtgcccggccagggcgcgttaccaagcctggcgccgatgctggaaaaggttctgccggcggtggttagcgtacaggtggaaggcaccgcctcgccgacgctcaatatgccggaagagctgaaaaaatattttggcgataacgccccgcaggagcaggcgcagccgtttgaagggctcggctccggcgttatcatcgacgcggcgaaaggctatgtgctgaccaataaccacgtcatcaatcaggcgcagaagatcagcgtccagctgaacgatggccgtgagttcgatgccaaactggtcgggagcgatgaacagagcgatatcgctctgctgcagctgattaagccagaccacctgacgcaaatcgccattgctgactctgataaacttcgcgtcggcgacttcgccgtcgccgtcggcaacccgttcggccttggccagaccgccacatccggcattatctctgcccttggccgcagcggcttgaaccttgaagggctggagaatttcattcagaccgacgcctcgattaaccgcggcaattccggcggcgcgctgctgaacctcaacggcgagcttatcgggatcaacaccgcgatcctcgcgccgggcggcggcagcatcggcatcggctttgccattccaagcaatatggcgaaaaccctcgccgaccagcttattcagtttggcgaaatcaagcgcggcctgttgggcattaaaggcatggaaatgagcgccgacatcgccaaagcgatgaatctcaacgttcagcgcggtgccttcgtcagtgaagtcctgccaaactccggctccgccaaagcggggattaaatccggggacgtcatcgtgagtctgaacggcaaaccgctgaacagtttcgccgaactgcgttcgcggatcgccaccaccgaaccgggtaccaaggtcaaactgggcctgctgcgcgacggaaagccggtcgatgtcgaagtgaccctggataagagcacctcctcaaccgccagcgcggaactgattatcccggcgctgcagggggcctcgttcagcgacggccagatgaaagatggcaccaaaggagtggtgatcgataatgtggataaaggcagcgccgccgcccaggtcggtctgcataaggatgacattatcattggccttaaccggcagcgtattcactcgattgccgaactgcgcaaagcgctcgaaggcaaaccgccggtcatcgccctgaacgtgatccgcggcaacgaaagcatctatctgctgctgcgc

SEQ ID NO: 23443 - DNA, 636 bp, Klebsiella pneumoniae
atggctgtcgctgccaacaaacgttcggtaatgacgctgttttctggtcctactgacatctatagccatcaggtccgcattgtgctggccgagaagggtgtcagttttgagatagagcacgtggagaaggataacccgcctcaggatctgattgacctcaacccgaatcaaagcgtaccgacgctggtggatcgtgagctcactctgtgggaatcccgcatcattatggagtatctggatgagcgtttcccgcacccgccgttaatgccggtttatccggtggcgcgtggtgaaagccgcctgtatatgcaacgtatcgagaaggactggtattcgctgatgaacaccatccagagcggtaccgcagcgcaagctgatgctgcgcgtaagcagctgcgtgaagaattgctggccatcgcgccggtcttcacccagaaaccttacttcctgagcgatgagttcagcctggtggactgctacctggcgccgctgctgtggcgtctgccggttcttggtgtggagctggttggcgctggcgcgaaagagctcaaaggctatatgactcgcgtatttgagcgtgattccttcctcgcttctttaactgaagccgagcgtgaaatgcgcctcggtcggggc

SEQ ID NO: 23444 - DNA, 390 bp, Klebsiella pneumoniae
atggctgaaaatcaatactacggcactggtcgccgcaaaagttccgcagctcgcgttttcatcaaaccgggcaacggtaaaatcgttatcaaccagcgttctctggaacagtacttcggtcgtgaaactgcccgcatggtagttcgtcagccgctggaactggtcgacatggttgagaaactggatctgtacatcactgttaaaggtggtggtatctctggtcaggctggtgcgatccgtcacggtatcacccgcgctctgatggagtacgacgagtccctgcgttccgaactgcgtaaagctggcttcgttactcgtgacgctcgtcaggttgaacgtaagaaagtcggtctgcgtaaagcacgtcgtcgtccgcagttctccaaacgt

SEQ ID NO: 23445 - DNA, 1371 bp, Klebsiella pneumoniae
gtgaccgctttttctaccctgactgttttacctgccgcccaattagccaaccttaacgagctgggttatctgtcgatgaccccggttcaggccgccgccctgccggcgatcctcgcggggaaagatgtgcgcgtgcaggcaaaaaccggcagcggaaaaacggccgcatttgggctgggtctgctgcagcatatcgatccggcgcgcttcgagacccagtcgctggtgttatgcccgacccgcgagctggccgatcaggtcgccggcgagctgcgccgcctggcgcgctgcctgccgaacatcaagattctgatgctctgcggcgggcagccctttggcgcccagcgagattccctgcagcatgccccgcatattatcgtcgccaccccgggccgtctgctcgatcatctgcagaagggaacgatctcccttgacgcgctgcagaccctggtgatggacgaagcggaccgcatgctcgatatgggctttagcgatgccattgatgaggtgatccgcttcgcaccggctgaccggcagacgctgctgttttctgctacctggccggcggcaatcgcggcgatcagcggccgggtgcagcgcaatccgcagaccattgagatcgacactgtcgacgcgctcccggcgattgaacagcagttctttgaagtttcccgccacggtaagattgccctgctgcagcgcctgctcagccagcatcagcccgcatcctgcgtggtgttctgcaataccaaacgcgattgccaggcggtctgcgatgcgctcaacgccgccgggcagagcgccttgtcgctgcatggtgaccttgagcagcgcgatcgcgatcagacgctggtgcgcttcgctaacggcagcgtccgggttctggtggcgaccgacgtcgctgcccgcggtctggacatcaaatccctggcgctggtggtgaatttcgagctggcctgggatccggaggtgcatgttcaccgcatcggccgtaccgcccgcgccggtgaacaagggctggccatcagcttctgtgcgccggaagaggcgcagcgcgccactattctggccgacatgctgcagctttccctgaactggctgccggcgccgacgggcaacaccatcgcgccgctgacggcggagatggcgacgctgtgtatcgacggcgggaaaaaggcgaaaatgcgcccgggagatgtgctgggagccctgaccggggatatgggctttgatggtgccgatatcggcaaaattaccgtccacccggcccacgtctatgtggcgatccgccagaatatggcgcagaaggcgtataagcagttacaaaatggcaagatcaaaggtaaatcctgccgcgtacgactgctgaag

SEQ ID NO: 23446 - DNA, 432 bp, Klebsiella pneumoniae
atgagcagaatgattcttgtccctatcgatatctctgataaagaatttactgaacgcattatcagtcacgttgaatcggaagcgcggattgacgacgccgaggtgcatttcctcaccgtgatcccttctctgccctattatgcctcactgggaatggcctataccgctgagcttcccggcatggacgagctgcgtgagggttctgaaacgcaattgaaagagatcgcaaagcagttctccatcccggaagaccggatgcattttcacgtcgcggaaggatcgccaaaagataaaatccttgcgctggccaagtcgctgccagccgacctggtgatcatcgcttcgcaccgaccggatatcacaacttatctgctgggctccaacgccgccgcggtggttcgtcacgccgagtgctcggtactggtggtccgc

SEQ ID NO: 23447 - DNA, 1156 bp, Klebsiella pneumoniae
atgaaaagaaaagtactggccctcgttattccggctttattagccgccggtgccgcgcatgcggcggaaatttataataaagacgggaataaattagatctctatggcaaggtagatggtctgcattatttctccagcgactcgaaaaaagacggcgatcaaacttatttacgttttggctttaaaggcgaaacccagatcaacgatatgcttaccggctatggccagtgggaatataacgttcaggccaacaacaccgagacctccagcgatcaggcgtggacccgtctggcattcgccggtatcaaagtgggcgattacggctccttcgactacggtcgtaactacggcgtgctgtacgacgttgaaggctggaccgatatgctgccggagttcggcggcgactcctacacctatgcggataactttatggcaggccgcgccaacggcgtcgcaacctaccgcaatagcgatttcttcggtctggtggagggtctgaacttcgccctgcagtatcagggtaaaaacgaaggccagaacgcgcaggatatcaacgtcggcaccaataaccgcagcagcgacagcgatgttcgcttcgacaatggcgatggtttcggcctctccattcctacgacttcggcatgggcatcagcgcggcggcagcttacacctcgtctgaccgtacaggcgaccagcacactatactcacaccgaacgatacgccaaaggcgacaaagcggacgcctggaccgccggcctgaagtacgacgccaacgatatttacctggcgaccatgtactctgaaacccgcaatatgacgccatacggctctaccagcagtaccaacggtggcggtatcgccaataaaacgcaaaacttcgaagtcaccgcgcagtatcagttcgacttcggcctgcgtccggccatctcctacctgcagtccaaaggcaaagatctgtacaataacggccgctatgccgataaagatctggtcaaatatatggacgttggcgcgacctattacttcaaccgtaatatgtccacctatgttgattacaaaatcaacctgctggatggtaacgacaaattctacgaagacaacggtatctctaccgataacatcgtcgccctgggcctggtttaccagttctgatgc

SEQ ID NO: 23448 - DNA, 915 bp, Klebsiella pneumoniae
atggaattgaaggattattatgccattctcggggtgcaaccaaccgacgatctgaaaaccatcaagaccgcctaccgccgcctggcgcgcaaatatcaccccgacgtcagtaaagaaaacgatgccgaagccaaatttaaggatctcgccgaagcctgggaagtcctgaaagatgagcaacggcgcgccgaatacgatcagctctggcagcatcgcaacgatcccggcttcggtcgccagcgacagacccacgagcagagctacagtcagcaagatttcgacgacatcttctcctccatgtttggccagcaggcgcatcagcgtcgtcgtcaacacgcggcgcgcggccacgatctggagatcgaagtggcggtgttccttgaagagacgctggccgagcagacgcgcaccatcagctataacctgccggtgtacaacgtgtttggcatgatcgaaagcgaaacgccgaaaacgctgaatgtgaagatccccgccggggtagtcgatggtcagcgtatccgcctgaaaggccaggggacgccgggggagaatggcggcccgaacggcgatctgtggctggttatccacatcgccccgcatccgctattcgatattgtcggtcataacctggagatcgtcctgccgctggcgccatgggaggccgcgctgggcgcgaaagtgacggtgcccaccctgaaagagagcattctgttgacggtgccgccgggcagtcaggcagggcagcgactgcgtatcaaagggaaaggactcgtgagcaaaacccacaccggcgatttgttcgccgttattaaaatagtgatgccgccaaaaccagatgaaaaagcgcgtgagctctggcaacaattggccgccgccgaagccagcttcgatccgcgtaagacatgggggaaagcc

SEQ ID NO: 23449 - DNA, 1326 bp, Klebsiella pneumoniae
atgactgatcgcattatcgcattgtgcattttatgcctcgtattcgggctgccgttaggtgtcgcagcggtatttaccggcgagcttatcctcgactttgtctttttctggccgctgtttatgtcagtgttgtggatcaccgggggtctctacttctggtttcagctggaacgtcactggccgtggggggaggataccccgccgccgacgctgccgggcaatccactgatctcgatcctgatcccctgctttaacgaggagaaaaacgcccgggaaaccatcagcgcagcgctggcccagcgttacgccaatcttgaagtgatcgcgattaacgacggctcttcggacaacaccgcccaggtgctccagcagctggcgcaggaggagccgaggctgcgggtgatccatctggccgccaatcagggaaaagcggtggcgctcaaagcgggcgccgccgccgcccgcggcgatctgctggtctgcatcgatggcgacgccctgctggaccgggataccgcggcctggctggtcgcgccgttgatccattatccgcacgtcggggcggtcaccggcaatccgcggatccgcacccgatccacgctgatcggccgcattcaggttggggagttctcgtcgatcattgggcttatcaaacggacgcagcggatctatggccgggtctttaccgtctccggcgtaatcgccgccttccggcgccaggcgctggcggacgtcggctactggagcccggatatgatcactgaagatattgatatcagctggaagcttcagctccgccactgggacatctttttcgagccgcgagcgctgtgctggatcctgatgccggagaccctcaaagggttatggaagcagcgtctgcgctgggcccagggcggcgccgaagtctttctggtcaatctgcgccgcctgtttcactggcagcatcaccggatgtggccgctgtttctggagtatgcctgctccacgctgtgggcctttgcctacgcgatcaccattctgctgtttatcctcagccgcctgatgccgctgcctgacaatctggcggtgcatagcctgtttccaccggaattcaccggcatgctgctcggcctgatgtgcctgctgcagttcgtcgccagcctgtatatcgagcggcgctatgagaaaaaggtcgccaaatcgctgttctgggtgatctggttcccgatggtctactggatgatcggcctgctgaccacgctggtcgcttttccgaaagtgatggtgaaacgtcaacgttcccgcgcgcgctgggtgagtccggaccggggaaaaggaagcctg

SEQ ID NO: 23450 - DNA, 2013 bp, Klebsiella pneumoniae
atgctgaacacgaccctgcgcaacggcctgatgcttctcatctggctgtgccttatcttcagcgtgcgtgctgaggaagtccccttcctcgccccgcagcagcgcccccaactggaggccaatcaaccctggccggcggatcgctttctggtgctggcctaccatgacgtcgaagacgatgccgccgaccagcgttatctttcggtgcgcaccagcgcactcaatgagcagatcgcctggctgctgcataacggctaccatgcgatcaacgttcaggatattctcgatgcgcattatggcttaaagtcgctgccgcccaaggcttttctcctcagttttgacgatggttacagcagcttttacacccgcgtctggccgctgcttaaagcctggaacgtcccggcgctgtgggcgccggtgggcagctgggtggacactcccgctggtcagcccgttaattttggcggcctgatgacgccgcgcgagcgcttcgctacctgggagatggtgcgcgagctcagccgctcgccgctggtggagatcggcgctcacacctgggcctcgcactacggtctgccggccaatccgcagggcagccgcgagcctgccgccgccaaccgcggctgggataaaaccaccggccgctatgaaagcgacgcgcagtttacccggcgaatgaccgatgacgtgcagaaagtaacggcgaaaatccatgaggttgccgggaaaacgccgcgcgcctgggtgtggccctacggcgccgccagcggcagcaccctgaccatcgccaaacagcaagggtatcagctggcgtttacgctgaacgacggcttgggcaacgtgaaggatctggacaatattccacgcctgctgatcgccggtaacccgtcgctcaaggcctttgccagcgccgtgacccaaattcaggaagccgatcctgttcgggtgatgcatgtggatctggactatgtctatgaccccaatcccgtccagcaggcaaagaatatcgataagctggtgcagcgcgtctatgacatgaaaatcagccacgtctttctgcaggccttctccgacccgcagggcgacggcacggtcaagtcgctctatttccccaaccgctggctgccgatgcgcgctgacctgtttaacttcgtctcctggcagttgcagacccgcggcaatgtgaaggtttatgcctggatgccggtgctggccttcgatcttgcctcagatctgccgcgcgttcagcgctgggatccgcaaaccgggaaggcgttacttgcccgccagccgtacgtccgtctgtcgccctgggatccccgggttcgccagcagatcaccgacatctacgaagatctggcccgacacgccagcttcagcgggatcctgtttcacgacgacgccgtgctgaccgattttgaagacgtgagcccggaggcggtcgccgcctggcggcagacgggtatggcgcacgatgccgccccagtgccccaacgtccgcaagagcgccaggcatggatgcgtttcaaaagccaaaccctgacccgcttcactctggatctacgccaggcagtgcaggccatccgcggcccgcaggtgaaaacggcgcgtaatctcttcgccctgccgatcctggagccgcaaagcgaagcctggtttgcgcagaatctggatgacttccttgccgcctatgactggacggtccccatggcgatgccgctgatggagtccgtgccgatcgacgccagccaggcctggctgacgcggctggttcaggccgtcgcccgccacccgggcgcgctgaagaaaaccatctttgaactgcaggccagagactggaatcgacgccagcaaaacgccattcccgaccagcagctggcggactggatgcgtttgctgcggctgaacggcgtcaaaaactacggctactaccctgacgattttattaacaaccagcctgatatctctcgtatcaggccgcaattttcttcctggtggtaccctgaccatgac

SEQ ID NO: 23451 - DNA, 1644 bp, Klebsiella pneumoniae
atgaatggcgcgcagtgggtggtacatgctttgcggacacagggagtcgacacagtttttggctatccgggtggcgcaattatgccggtttacgatgcactgtatgacggcggcgtggagcacctgctgtgccggcatgagcaaggggcagccatggcggccattggttatgcgcgagcaaccggtaaaaccggggtgtgtatcgcgacgtccggcccgggcgcgaccaatctgatcaccggcctggcggacgccctgcttgactctattcccatcgtagctatcaccggccaggtggccgcacccttcatcggcacggatgcgttccaggaagtagacgttctcggtttgtcactggcctgtactaagcacagtttccttgtgcagtctctggacgaactgccgcgggttattgctgaggctttccaggtggcaaactcaggccgtccaggtccggtgctggttgatatccctaaggatattcagatggcgcagggcgacctcgatccccatttctctaccgtcgccgatgagatggcatttccgcaggcggaagtggcgcaggctctgcagatgctggcccaatcgcagcaaccgatgctgtatgttggcggcggggtcggcatggcgcaggcggtaccggctttgcgcgaattcctggcggtgaccaggatgccggcaacctgcaccctgaaagggctgggcgtggtggatgctgattatccctattatctcggcatgctgggaatgcacggcactaaggcggccaacctggcagtacaggagtgcgatctgctgatcgccgtcggcgcgcgctttgacgatcgcgtgaccggtaagctcaataccttcgcaccgcatgccaaagtgatccacatggacatcgatccggcggagctgaacaagctgcgtcaggcgcatatcggtctgacaggcgatctgaactgcctgctgccggcgctgcagcagccgttagctatcgatggctggcgcgagcggagtgccgcactgcgtgccgagcatgcctggcgttacgatcatcccggtgaggcaatctacgcgccgctgctgctgaagcagctttccgaccgcaagccggcggacagcgtggtgaccaccgacgttggccaacaccaaatgtggtcggctcagcatatgacctatacccgcccggaaaactttatcacctccagcggcttaggcaccatgggctttggcctgccggccgccgttggcgcccaggtggcgcgccctaacgatacggtgatctgtatctccggtgacggctccttcatgatgaatgtacaggagctgggcaccgttaaacgcaagcagttaccgctgaagatcgtgttactcgacaaccagcggttagggatggttcgacaatggcagcagctgtttttccaggaacgttatagcgaaaccactctgactgataaccctgatttcctcacgctggccagcgccttcggtattcctggccaacacatcacccgtaaagaccaggttgaagcggcactcgacaccatgctttcgagccaggggccatacctgcttcatgtctcaatcgacgaacttgagaatgtctggccgttggtgccgcccggcgccagtaactctgaaatgctggagaaattatca

SEQ ID NO: 23452 - DNA, 1473 bp, Klebsiella pneumoniae
atggctaactactttaatacactgaacctgcgccagcagctggcacagctgggcaaatgccgctttatggcgcgcgacgaattcgccgatggcgcaagctaccttcagggtaaaaaagtggtcatcgtcggctgcggcgcgcagggtctgaaccagggtctgaacatgcgtgactccggcctggatatctcctatgcgctgcgtaaagaagcgatcgctgagaagcgcgcctcctggcgtaaagcgactgaaaacggcttcaaagtcggcacttatgaagagctgatcccgcaggcggacctggtggttaacctgacgccggacaaacagcactcagacgttgtgcgctccgtacagccgctgatgaaagacggcgcagcgctgggttactcccacggcttcaacatcgtggaagtgggcgagcagatccgtaaagacatcaccgtggtgatggtggcgccgaagtgcccgggcaccgaagtgcgtgaagagtacaaacgcggtttcggcgtaccgacgcttatcgcggtacacccggaaaacgacccgaaaggcgaaggcatggcgattgccaaagcatgggctgcggcgacaggcggccaccgcgcgggcgtgctggaatcttccttcgtggcggaagtgaaatctgacctgatgggcgagcaaaccatcctttgcggcatgctgcaggcgggttctctgctgtgcttcgacaagctggtggcggaaggtaccgatccggcgtatgcagaaaaactgattcagttcggctgggaaaccatcaccgaagcgctgaagcagggcggcatcaccctgatgatggatcgcctctccaacccggcgaaactgcgcgcttatgcgctgtccgagcagctgaaagagatcatggcgccgctgttccagaaacacatggacgacatcatctccggcgaattctcctccggtatgatggcggactgggcgaatgatgataagaaactgctgacctggcgtgaagagaccggcaaaaccgccttcgaaaccgcgccgcaatatgaaggcaaaatcggcgagcaggagtacttcgataaaggcgttctgatgatcgcgatggtgaaagcgggcgttgagctggccttcgaaaccatggtggcctccggcatcatcgaagagtctgcttactacgaatcactgcatgagctgccgcttatcgccaacaccatcgcccgtaagcgtctgtatgagatgaacgtggttatttccgataccgctgaatatggtaactacctgttctcttacgcttgcgtaccgctgctgaaagagttcatgaccaccctgcagaccggcgacctgggcacagcgattgccgaaggcgcggtagataacgcgcagctgcgcgatgtgaacgaagcgattcgcagccacgctatcgagcaggttggtaagaaactgcgcggttatatgaccgatatgaagcgtatcgcggtagccggc

SEQ ID NO: 23453 - DNA, 927 bp, Klebsiella pneumoniae
atgacgacgaaaaaagctgattacatttggttcaatggcgagatggttccgtggggcgaagcgaaagttcatgtgatgtcccatgcgctgcactacggtacctcggtattcgaggggatccgttgctacgactcgcacaaaggcccggtggtgttccgtcatcgcgaacatatgcagcgtctgcatgattcagccaaaatttatcgtttcccggtctcccagagcgtcgacgaactgatggaagcctgccgcgaagtcattcgaaccaataatctgaccagcgcttatatccgtccgctggtgtttgttggcgatgtcggcatgggggtaaacccgcctccgggttacaacactgacgtgatcatcgcggcgttcccatggggagcctacctcggcgcagaagcgcttgagcaggggatcgatgcaatggtctcttcctggaaccgcgcggcgccgaacactatcccgacggcagcgaaagccggtggtaattatctttcctcgctgctggttggcagtgaagcgcgtcgccatggctatcaggaaggtatcgccctcgatgttaacggctatatctccgaaggcgcaggggaaaacctgtttgaagtgaaggacggtgtactgttcaccccgccgtttacctcttccgcgctgccgggcattacccgcgacgccattatcaagctggcgaaagatcttggtatcgaagtccgcgagcaggtgttgtcccgtgaatccctgtatctggcggatgaagtcttcatgtccggcactgcggcggaaatcaccccggtacgcagcgtggacggcatccaggtcggcgcaggccgtcgcggtccggtaaccaaacgcattcaggaagccttctttggcctcttcaccggtgaaacagaagataaatggggctggttggatccggtaagtaag

SEQ ID NO: 23454 - DNA, 1848 bp, Klebsiella pneumoniae
atgcctaagtaccgttccgccaccaccacacatggccgcaatatggcgggcgcccgcgcgttgtggcgcgcaaccggaatgaccgatgccgatttcggcaaaccgattatcgccgttgttaactcctttacccagtttgtccccgggcacgtgcacctgcgcgatctcggcaaactggttgccgagcagattgaagccgccggtggcgtggccaaagaattcaacaccatcgcagtggatgatgggatcgctatgggccacgggggtatgctctattcactgccatcccgcgagctgatcgccgactcggtggagtatatggttaacgcccactgcgctgatgccatggtttgtatctccaactgcgacaaaattaccccggggatgctgatggcttccctgcgcctgaacattccggtgatctttgtgtccggcggcccgatggaagccgggaagaccaagctgtcagataaaatcatcaagcttgacctggtggatgcgatgattcagggggcggatccgaaagtgtccgacgagcagagtaatcaggtggaacgctccgcctgcccgacctgcggctcctgttccgggatgttcacggcgaactccatgaactgcctgaccgaagcgctgggcctgtcacagccgggcaacggctctctgctggcgacccacgccgatcgtaaggagctgttcctaaacgccgggaaacgtatcgtggagctgaccaaacgctattacgagcaggatgacgcttccgcgctgccgcgcaatatcgccagcaaggcggcctttgagaacgctatgacgctggatatcgccatgggcggctccaccaataccgttctgcacctgctggcggcggcgcaggaagctgaaatcgacttcaccatgagcgatatcgataagctctcccgcaaagtgccgcagctgtgtaaggtggcgccgagcacgcagaaataccatatggaagatgtgcatcgcgccggcggcgtgctgggcattctgggcgagctggaccgcgccgggctgctgaatcgcgaggtcaaaaacgtccttggcctgacgctgccgcagaccctggaacagtacgatgtgatggtgacccaggacgacgcggtgaaaaaaatgttccgcgccggcccggcgggcatccgtaccacccaggcgttctcgcaagactgccgctgggataccctggatgacgatcgcgccgaaggctgtatccgttctctggaacacgcttacagcaaggacggcggcctggcggtgctgtacggcaatttcgcagaaaacggttgtatcgtgaaaaccgccggcgtggacgacagcatcctgaaatttaccggtccggcgaaagtatatgagagccaggacgatgcggttgaggccatcctcggcggtaaagtcgtggaaggcgacgtcgtggtgatccgctacgaagggccgaaaggcgggccggggatgcaggagatgctttaccccaccagcttcctgaagtcgatggggctgggcaaagcgtgcgcgctgatcaccgatggccgtttctccggcggcacctcagggctctctatcggtcacgtctctccagaagcggcgagcggcggcaacattgcgctcattgaagatggcgacatgatcgcgattgatattccgaaccgcagcatccagctgcagctgagcgatgcggaaattgcggcgcgtcgtgaagcccaggaagcgcgtggcgaccaggcgtggacgccgaagaatcgccagcgtcaggtctcctttgcccttcgcgcctacgccagcctggcgaccagcgccgacaaaggcgcggtacgcgataaatccaagctgggtggc

SEQ ID NO: 23455 - DNA, 1928 bp, Klebsiella pneumoniae
atgcgtttaaaccctggccaacaacaagccgtcgaattcgtcaccgggccgtgcctggtgctggcgggcgccggttccggtaagacccgcgttattacgaataaaatcgcccacctgatccgcggctgcggctatcaggcgcgccatatcgcggccgtgacctttaccaacaaagccgcgcgcgagatgaaagagcgcgtgggcaaacgctggggcgcaaagaggcgcgtggcctgatgatttccaccttccacactttggggctggatatcattaagcgcgaatacgctgcgctgggtatgaagtctaacttttccttattcgacgataccgaccaggtggcgctgcttaaggaactgaccgaagggttgatcgaagatgacaaagtggtgcttcagcagctgatctcgacgatctccaactggaaaaacgatctaaaaaccccggcgcaggccgccgctggcgcgaaaggcgaacgggatcgtattttcgcccactgctatgggctatacgacgcgcacatgaaggcctgcaatgtcctcgattttgacgatctgatcctgctgccaacgctgctgctgcagcgcaacgaggaggtgcgcgagcgctggcaaaataagatccgctacctgctggtggatgagtatcaggataccaataccagccagtatgagctggtgaaactgctggtgggtcagcgggcgcgctttaccgtggtgggcgatgacgaccagtcgatctactcctggcgcggcgcgcggccgcagaacctggtgctgctcagccaggacttcccggcgctgcgggtgatcaagcttgagcagaactaccgctcatccgggcgtattctgaaagccgccaacattttgatcgctaataaccctcacgtctttgaaaagcggctgttctccgaactgggatatggcgcagagctgaaagtgctctccgccaacaatgaagatcatgaagcggagcgcgtggccggggagctgatcgcccaccacttcattaataaaaccaattacaaagactacgcgatcctttatcgcggcaatcaccagtcgcgggtctttgaaaagatgctgatgcagaaccgcatcccgtacaaaatctccggcggcacgtcgttcttttcgcgtccggaaattaaagatctgctggcctatctgcgcgtgctgaccaacccggacgacgacagcgccttcctgcgtatcgtcaacacgccgaagcgcgagatcggcccggcgacgctgcaaaagctcggtgagtgggcgatgggccgcaacaaaggattgttcaccgccagctttgatatgggtctcagccagacgctgaccgggcgcggctatgaatccctcacccgcttcacccactggctacgcgagatccagcagctggccgaacgcgagccggtcaacgccgtgcgcgatttgattcgcgggatcgactacgaatcctggctgtatgaaacctcgcccagcccgaaagccgcggaaatgcgcatgaaaaacgtcaaccagctgtttacctggatgaccgagatgctggaaggcagcgaaatcgatgagccgatgaccctgacccaggtggtcacccgctttaccctgcgcgacatgatggagcgcggcgaatcggatgaagagctggatcaggtgcagctgatgactctccatgcgtcaaaggggctggagttcccctacgtctatctggtgggaatggaagagggattgctgccgcaccaaagcagcattgatgaagataacgtcgatgaagagcgacggttagcctacgttggcatcacccgtgcgcagaaagagctgacctttacgctctgtaaggagcgccggcaatatggcgagctggtgcgtcctgaaccgagtcgttttctgctggagctacctcaggacgatcttatctgggagcaggca

SEQ ID NO: 23456 - DNA, 996 bp, Klebsiella pneumoniae
atgcgcggaaaaattgctttagaagaacacgtatccactcctgaaaataaccgtctgtgggattcatctggtgaagcaggtcgtaacggcacagaatatatgaaagatgttgaacgccgcctgctggatcgcagcattcagctggaagaaatggcgcagcgtcatattgatcatgtaattctttctctgacttcacctggcgcccagtctattttagataaagccaaagccgtctcttttgcccgcgataccaacgattttatcgttgagaattatgttaagccaaatccggacaaattcagcgccttcgccaccctggcattgcagaacccggaagccgcggcggaagagctggagcgcgccgtgaaaaagttaggcatgaaaggtgcgctgatcaacggctacaccaacgttaaagatagcgagcatggcctgtatcttgatgacgaatccatgctggtattctgggataaggtcaacgagctgaacgtgcctgtctatctgcatcctcgtgaaccgctggaaggcccggcgcgtggcatctataccggttacgaaagcctgatcggctctgcctggggcttcgctcaggaaacggcagtgcatgctattcgtctgatgatgagcggtttgttcgatcgttatcctaacctcaatctggtgctgggtcacctcggcgaagggctggtacatatgctgccgcgcactcaacatcgtctctatcgtcagcgtttcggctgcggtttgggtaaagcggaaaaaccgttaatgcactacctgcagaataacttcatcgttaccaccagcggccatttcaatacccattcactgaataatgctattgaagtcatgggcgccgatcgcgtgatgttctctgtcgattatccgtatgaagatattcatcaggcctgcgactggtttgatcctttagaacttgaagcaggcctgaaagagaaaatcgcctggggtaatgccagccgcgtatttaacattaaa

SEQ ID NO: 23457 - DNA, 1235 bp, Klebsiella pneumoniae
atgtttagcgaaatcatgcgttatatcctcgatctcggtccgacggtgatgctgccgatcgtgatcattatcttctccaaattactggggatgaagctcggggattgttttaaatccggtctacatatcgggatcgggtttgtcggcatcgggctggtcattggcctgatgctcgactccatcggcccggcggcaaaggcgatggcggagcatttccagattaatcttcacgtgatcgacatcggttggccgggttcatcaccgatgacctgggcgtcgcaaatcgccctggtggcgatcccggtggccatcgcggtcaatatcgtgatgctggttacccgtatgacccgcgtggtgaatgttgatatctggaacatctggcatatgacctttaccggcgcaatgctgcatatcgcgaccgggtcgtactggataggtattctcggcgtggtggtgcatgctgcttttgtgtataagttgggcgattggtttgccaaagatacccgcgatttcttcggcctcgagggtattgcgatcccgcacggcagttcggcgtatttagggccggttgccgtcctcgtggataccatcatcgacaagatccctggtcttaaccgtattcactttagcgccgatgacattcagaaacgcttcggccccttcggtgaaccggttaccgttggcttcgtcatggggctggtgattggcgcgctggcgggttacgacctgaagggcattcttcagctggcggtgaaaaccgcagcggtgatgctgctgatgccccgggtgatcaaaccgattatggatggcctcaccccgatagccaaacaggcgcgtaaacgtctgcaggctaaattcggcggccaggaattcctgattggtctcgatccggcgctgctgctcggtcatacctcggtagtctcggccagcctgattttcatcccgctgaccattcttatcgccgtcgtggtccctggcaaccaggttctgccatttggtgacctggccaccatcggcttcttcgtagcgatggcagtggctgtacatcagggcaatctgttccgcacgttgatttccggggtcatcattatgggaatcaccctgtggatcgccacccagaccattggcctgcacacccagctggcggcaaacgccggggccctgaaagccggcggcatggtggcctcaatggaccagggtggttcgccgattacctggctgctgatccagctctt

SEQ ID NO: 23458 - DNA, 1041 bp, Klebsiella pneumoniae
atgaaatcagtggtaatccatgctgaggggaacgtctgcgttgaagaacgccctatccccacgctgcaaacggaaaacgatgtcctggtcaaagtggtcagttccgggttatgcggctccgatatcccgcgcattttcgccaaaggggcgcattactaccctattacgctggggcacgaattcagcggttatgtggaatcctacggcgcggcggtaaccgacctgcagcccggcgatgccgtcgcctgcgtgccgctgctgccttgcttccagtgcccgcaatgccagcgcgagtatttctctttatgtaaacagtatcagttcgtcggctcacgcagcgaaggcggcaacgccgaatatgtggtggtaaagcgcgccaacctgttccgcctgccggaccagatgccaattgatgatggcgcgtttatcgaaccgataaccgttggcctgcacgcttttcatctggcgcagggctgtgaaggtaaaaacgtgattattatcggcgccggcaccatcggcctgctggcgctacagtgcgcccgcgaactgggcgccaacagcgtcacggcgatcgatatcaatccgcagaagctggagctggccaaaaccctcggcgcaacccatgtgttcaacagtcgcgagatgagcggccaggcgattcagcaggcgctggaatccattcagttcgaccaggtagtcctcgagaccgccggtacgccgcagaccgtcgcgctggcgattgaggccgccggtccgcgggcgcagctggcgttggttggcacgcttcatcacgatttaaccctcccggcagccaccttcgggcagattctgcgtaaggagttgaatattgtgggtagctggatgaactactctggcccgtggccgggagaagagtggcaaacggccacccgtctgctgactgaaaaacgcctgcagctggcgccgctgatcgcccatcgtggcgacgcagaaagcttcgctcgtgcagtgcaggcgctcaacggcgcgccaatgcaaggcaaaatcctgctcaaactctct

SEQ ID NO: 23459 - DNA, 861 bp, Klebsiella pneumoniae
atgaaacaacacgaatcagcggataattctcaggggcagctctatattgtgcccactccgataggaaatctgtctgatatcacgcagcgtgcactggaagtgctgcaagccgttgatttaattgcagcggaagatacccgtcataccggtttgctgctgcaacattttgcgataaacgcccgtttgtttgcgcttcacgaccataatgagcagcaaaaggcggaaaccctgcttgccaaactgaaagaagggcaaaacatcgcgctggtttccgatgccggcacgccgctgattaacgatcctggttaccatctggtgcgcacctgccgcgaagcgaatattcgcgtggtaccgctgccgggcccctgtgcggctatcgccgccctgagcgccgccggcctgccttccgaccgtttctgttatgaaggcttcctgccggcgaaatcgaaaggccgccgcgataccctgaaagcgctggaagaagagccgcgcacccttattttctatgagtcgacccaccgtctggtggagagtctggaggatatctgcgcggtactgggagaatcccgctatgtggtgctggctcgtgagctgaccaaaacctgggagtcgatccatggcgcgccgattggtgagctggtggcgtgggtgaaggaagatgaaaaccgtcgtaaaggcgagatggtgctgatcgtcgaaggtttcaaggctcaggaagaagcgctgccggcggccgcgctgcgtactctggcgctgctgcaggcggagctgccgctgaagaaagccgccgcgctggccgcggaaatccacggcgtgaagaaaaacgcgttgtataagtacgccctggagcagcagggggag

SEQ ID NO: 23460 - DNA, 414 bp, Klebsiella pneumoniae
tcgctattccggctttccgtagggcttatcctcgagcgtgtcatttatcacctcggcggccgctaacgaccataaaattctcggcgtgatagctatgccgcgcaatgaaaccaacgacctgacgctgacgctccccgtctgccgggtagtcaaacgcattcagctcagctcccgaccgcggcgatgtacagctctccgagggcgacggtctactttaaggccagccgctggcgccagccacacgctgaacgtccccgccgggatcaaagagggcagaccaccggctggatcaacatcaatagcgataacgacagcaaacgttgcgtgaagaaaatcgccttctccggccacacggtgcactcctcagatatggcatcactgaaaattatcggcgatgactaacgtcgcccctgc

SEQ ID NO: 23461 - DNA, 927 bp, Klebsiella pneumoniae
atggtcaaagtatatgccccggcttccagtgccaatatgagcgtcgggtttgatgtgttgggcgcggcggtcacgccggtcgatggcacgctgcttggcgacaacgtcactgtcgaagcggcggagcaatttagcctgcagaatcttggacgcttcgccagcaaactgccgacggcgccgcaggagaacattgtttaccagtgctgggaaagcttttgccgggagatcggcaagacggtgccggtggcgatgacgctggaaaaaaacatgccgattggctccgggctgggttccagcgcctgctcggtggtcgctgcgctggtggccatgaacgagttctgcggcaagccgctgaacgagacgcgcatgctggcgctgatgggagagatggaagggcgtatctccggcagcattcactacgacaacgtggcgccgtgctatcttggcggcatgcagttgatgatcgaagagaatgggattatcagtcagcaggtgcccgggtttgatgagtggctgtgggtgctggcctatccggggattaaagtctctactgctgaagcgcgggcgattctgccggcgcagtatcgccgccaggattgtatcgcccatggtcgccacctcgcgggctttattcacgcctgctacacccgccagccgcagctggcggcaaaattgatgaaagatgtgattgccgaaccgtaccgaaccaaactgctgccgggctttagcgaagcgcgtcaggcggccatggagatgggcgcccaggcttgtggcatctccggctctggcccaacgctgttcgcgttgtgtgataaaccggataccgcacagcgcgtcgccgactggcttggcgcgcactatctgcagaatcaggaaggctttgttcatatttgccggctggacacggcgggcgcacgcgtagtggga

SEQ ID NO: 23462 - DNA, 585 bp, Klebsiella pneumoniae
atgaataccttacgaatcggcttagtttccatttccgatcgcgcctccagcggcgtctatcaggacaaaggcatcccggcactggaagagtggctggcacgtgccctgaccacccctttcgagctgcaaacccgtctgattccggatgagcaggccatcattgagcaaacgctgtgcgaactggttgacgaaatggggtgccatctggtgctgaccaccggcggaaccggccctgcgcgtcgcgatgtgacgcccgacgcaacgctggcgatcgccgatcgcgagatgccgggcttcggcgagcaaatgcgccaggttagcctacactttgtgccgacggctatcctttcccggcaggtcggtgtgatccgcaagcaggcgctgatcctcaaccttcccgggcaaccgaaagcaattcaggagactctggaaggggtgaaagatgctgacggcaacgtgctggtgcacggtattttcgcaagtgtaccttattgtgtacagttgcttgaagggccttatgtggaaaccgatggccgtgtagtagaagcttttcgtcccaagagcgccagacgcgaaactttatcc

SEQ ID NO: 23463 - DNA, 2460 bp, Klebsiella pneumoniae
atgcgagtgttgaagttcggcggtacatcagtggcaaatgcggaacggtttctgcgggttgccgatattctggagagtaatgccaggcaggggcaggtagcgacggtcctgtctgccccggcgaagatcactaaccacctggtagcgatgattgaaaagaccattggcggccaggatgccctccccaatattgccgacgccgaacgcatttttgccgaacttcttcagggccttgccgacgcccagcccgctttcccgcttgcccagttaaaagccttcgtggagcaggaatttgctcagattaagcatgttctgcacggcatcagcctgctgggtcagtgcccggacagcgtcaatgccgcgctgatctgccgcggcgaaaagctctccatcgccatcatggcgggtctgctggaagcccgtggacataaagtcagtgtcattaacccggtcgaaaaactgctcgccgtgggtcactatctggaatccaccgtcgatatcgccgaatccacccgccgcattgccgccagccagatcccggcagaccatatgatcctgatggccgggtttaccgccggcaatgagaaaggcgagctggtggtgctggggcgtaacggctccgactactcggctgcggtactggccgcctgcctgcgcgctgactgctgcgaaatctggaccgatgtcgacggagtgtacacctgcgatccgcgtcaggtgccggatgcgcgcctgctgaaatcgatgtcttatcaggaggcgatggagctctcctactttggcgcgaaagtgctgcacccgcgcactatcgcccctatcgcccagttccaaatcccatgcctgattaaaaataccggcaacccacaggcgccgggaacgcttatcggcgccagccgcgacgaagacgatttgccggtgaaaggcatctctaacctcaacaacatggcgatgttcaacgtctccgggccggggatgaaagggatggtcggcatggcggcccgcgtcttcgccaccatgtcccgcgccggcatctcggtggtgttgatcactcaatcttcttccgagtacagcatcagtttctgcgtgccgcagagcgactgcgcacgtgccaaacgggcgatggaagatgagttttatctggagctgaaagaggggctgctggagccgctggcgattatggagcgtctggcgatcatctccgtggtgggcgacggaatgcgtaccctgcgcggtatctcggcgaaattctttgcggcgctggcccgcgccaatatcaatatcgtggcgattgcccagggctcttccgagcgctcaatttcggtagtggtcagcaatgacgacgccaccaccggcgtgcgcgtgacccatcagatgctgttcaacaccgaccaggtgattgaagtgtttgtcatcggcgtcggcggcgtcggcggcgcgctgctagagcagatcaagcgccagcaggggtggctgaagaacaaacatatcgatctgcgcgtctgcggtgtagccaattctcaggcgctgctgaccagcgtgcatggtctgaatctggaaaactggagtgcggaactggcggaggcgaaagagccgtttaatcttggccgcctgatccgcctggtgaaagagtaccacctgctcaatccggtgatcgtcgactgtacctccagccaggcggtcgccgatcagtatgccgacttcctgcgcgaaggtttccatgtggtgacgccgaacaaaaaggccaatacctcttcgctggattactatcaccagctgcgccatgcggccagcagctcgcggcgtaagttcctctatgacactaacgttggcgcgggcctgccggtgattgagaacctgcagaacctgctcaacgccggcgatgagctgcgccacttctccgggatcctgtccggctccctgtcgtttatcttcggcaagctggacgagggggtgagtttctccgcggcgacggcgctggcccgtgagatggggtataccgagccggatccgcgcgacgatttatccggggtggatgtggcgcgtaaactgctgattctggcccgtgagaccgggcgtgaactggagctggcggacattatcgtcgagtcggcgctgccgccggacttcgacgccagcggcgatgtcgagacctttatggcccgcctgccgtcgctggacgatggttttgcctcgcgggttgctaaggcgcgcgatgaaggtaaagtcttgcgctacgtcggtaacatcgaagaggatggtacctgccgggtaaaaatagccgcggttgacggcaacgatccgctgttcaaagttaagaatggtgagaacgcgctggctttttatagccattattatcagccattgccgctggtgctgcgcggctatggcgccgggaacgacgtcacggcggccggcgtattcgccgacctgctgcgcaccctgtcctggaagttaggagtt

SEQ ID NO: 23464 - DNA, 645 bp, Klebsiella pneumoniae
atgttacaagtataccttgttcgccacggtgaaacgcagtggaacgccgagcgacgtattcagggtcagtccgatagcccgctgaccgcccatggtgagcgccaggcctggcaggtgggcgagcgcgccagaacgctggggatcacccatatcattaccagcgatctggggcgaacccgccgcacagcagaaattatcgccgaagcctgcggctgcagcgtgatcgccgatgcgcgcctgcgcgaactggatatgggggtgctggagaagcgccatatcgactcgctcagcgaagaagaagaaggctggcgtcgccagctggtcaacggcacaccggacggtcgtattccgcagggcgaatcgatgcaggagctcagcgagcgtatgcatgcggcgctggcatcctgtctggaattacccgccggtagccggccgctgctggtgagtcatgggatcgcgctgggctgcctggtgagcacgatattagggctgccggcgtacgctgagcgtcgtctgcggctgcgcaactgctctatttcgcgcgtcgactatcagcaaagcccgtggctggcttccggctgggtggtggaaacggcgggcgacgtctcgcatcttgacgcccccgcaatggacgagctgcagcgt

SEQ ID NO: 23465 - DNA, 961 bp, Klebsiella pneumoniae
atgacggataaattaacttctctgcgtcagtacaccactgtcgtcgctgacaccggagatattgcggcaatgaagctgtatcagcctcaggatgccaccactaacccttccctgattctcggcgcggctcagatccctgagtaccgtaagctgattgacgacgctgtcgcctgggctcgtagccagagcagcgatcgcgcgcagcagatcctcgatgcttccgataagctggcggtgaacatcggtctcgaaattctgaaactgatcccgggccgtatctccaccgaagtggacgcacgtctctcctatgacaccgaagcgtctatcgcgaaagccagcgcatcatcaagctgtacaacgacgcgggcatcagcaacgatcgcattctgaccaactggcctccacctggcgggcattcgcgccgctgaacagctgagaacccgacggcattaactgtaacctgacgctgctgttctccttcgctcaggctcgcgcttgcgccgaagcgggcgtcttcctgatttcgccgttcgttggccgtatcctcgactggtacaaagccaacaccgacaagaaagagtacgcaccggcagaagatccgggcgtggtttccgtcagcgaaatctacgagtattacaagcagcacggctatgaaaccgtcgtgatgggcgcaagcttccgtaacgttggcgaaattctggaactggctggctgtgaccgcctgaccatcgccccggcgctgctgaaagagctgtccgaaagcgaaggcgccgttgagcgtaagctggtatataccggtgaagtgaaagcgcgtccggagcgtattaccgaatctgagttcctgtggcagcataaccaggatccgatggcggtagacaaactggcggaaggtatccgtaagtttgcgatcgaccaggaaaaactggaaaaaatgatcgacgaactgctgtaatcgcgcagg

SEQ ID NO: 23466 - DNA, 1278 bp, Klebsiella pneumoniae
atgaaactgtataacttaaaagatcataacgagcaggtcagctttgcgcaggccgtcacccagggacttggcaagcatcagggcctgttctttccgcacgatctgccggaattcagcctgactgaaatcgacgacatgctggcgcaggactttgtcacccgtagcgccaaaattctatccgcctttatcggcgatgagatcccgcaggatgtcctgcagcagcgggtgcgcgcggcgtttgcgtttccggcgccggtaagcaaggttcaggcagatgtcggctgtctggagctgttccatggccctacgctggcgttcaaggatttcggcggccgctttatggcgcagatgctgacccacatcgcaggcgataagccggtcaccatcctcaccgcgacctctggcgacaccggggcggcggtggcgcatgctttctacggcctgccgaacgtcaaggtagtgatcctctatccgcgcggcaagatcagtcccctgcaggagaagctgttctgtaccctcggcggcaatattgaaaccgtggcgattgatggcgactttgatgcctgccaggcgctggtgaagcaggcgtttgacgatgaagagcttaaggcgacgctgggtctcaactcggctaactccatcaacatcagccgcctgctggcgcagatctgttactacttcgaagcggcggcgcagctgccgcaggaagcccgcaatcagctggtgatttccgtgccgagcggcaacttcggcgatctgaccgccggtctgctggccaagtcgctggggctgccgatcaagcgctttatcgccgccaccaacgccaacgacaccgttccgcgctatctgcagggcggcgagtgggcgccaaaagccacccaggcgacgctgtccaacgccatggacgtcagccagccgaacaactggccgcgcgttgaagagctgttccgccgtaaaatctggcgtctcagcgagctgggctatgccgcggtcgatgatgagaccaccaaagcagcgatgcgcgagctgaaggccatcggctacatctctgaaccgcatgcggcgattgcctggcgcgcgctgcgcgatcagctgcagccgggagagtacggcctgttcctcggcaccgcccatccggcgaagttcaaagagagcgtggaggagatcctgcgggagactctgccgctgccgaaggagctggccgaccgcgccgacctgccgctgctgtctcacaacctgccggcggatttcgccgcgctgcgtaagctgatgatgggc

SEQ ID NO: 23467 - DNA, 1356 bp, Klebsiella pneumoniae
atgttgaaatcaccgttattctggaaaatcaccacgttaataggctgtattgtgctgctatctttgccgttaatgatggtcagggagcttattaatgagcgagcggattatcgtagcgaagtggtggacgccattgagcaaagcaccagcggctcgcaaaaactcgccggaccgctgatcgctattccgataaccgagaccctgacccgcatggagaaccaaaaagaggtcaactatcagcggagctgggtgtattactggctgccggagtcgctggcggtcgccggcaaacagaccgtggagtcgaggagggtgggtatctacagcggccaggtctggcataacgccttgcagattaaggcctcgtttgatccgctgcgtctggcggcgctgagaaaaacgaatatcgtcttaggccagccgcggctggtggtgagcgtcggcgatgcccgcggcattggcgccatccatgccccggaggtcaacggtaacgtattaagcgtggagccggggctggggataagcggcgatggcgcaggtattcatatgccaatgcctgcgctggcggaggacaacaagccgcttgagattgccttttcactcgatctgaacgggacgggggagttttcactggtgccgctcgggcgtaacagcgagctgcagctgaccagtaactggccgcatcccggttttctcggcagcttcctgccaacgcaacgggaagtgagtgctgccggctatcgcgcccactggcaaagcagctggttcgccaacgatatggggagctatttcaaggatgatatggagatcccgtggtcgcgactgccggcgttcagtgccgatgtgatgtcccttgccgaccagtaccagctaaccgatcgggcgacaaaatatgccatcctgttaatcgggctgacctttatggcttttttcgtgttcgagagcctgacccgtcgtcccctgcatccgatgcaatatctgctggtgggcttatcgctggtgctgttttacctggtgctgctggcgctctcagagcacattggttttaccgccgcctggctggcggccagcctgtctggcgcggtgatgaatgggatctaccttcaggcggtgctcagaggatggcgtaacagcctgctgtttgtcgccgcgctactgctgctggatggcgtgatgtggtttctgttgcattctgaggatagcgcgctgctgctgggtaccggggtgctggcgctggcgctgagcgtcctgatgtttttgacccgtcgcgtggactggtatgcgttatcgctgccgaaaggcacagtgcctccgacaccggctgccgatgacgataagctgcgtctctggaaagag

SEQ ID NO: 23468 - DNA, 705 bp, Klebsiella pneumoniae
atgtcccgtatgcatgttttagccgtagcggtattgagcgcggcagtcagtggtccgcttgcggccgctggtattaatagtttttcccaggccaaagccgctggcgtcaaagtgaatgccgacgttccgggcgatttttattgcggctgtaaaatcgactggcaggggaaaaaaggcgttatcgatttggaatcctgcggctataaagtgcgtaaaaatgagaaccgcgccagccgggttgaatgggagcacgtagtgccggcatggcagttcggccatcagcgtcagtgctggcaggaggggggacgtaaaaactgcgccaaagatccggaataccgcaagatggaaagcgatatgcacaacctgcagccggcggtgggagaagtgaatggcgatcgcggcaactttatgtacagccagtggaacggcggtgaaggccagtacggccagtgcaccatgaaggtcgattttaaagataaaatcgccgagccccctgcccgcgctcgcggcgccatcgcccgcacctacttctatatgcgcgaccgctatcagctgaatctttcccgccagcaaactcagctgtttaccgcctggaataaacagtacccggtcaccgcctgggaatgtgaacgtgatgagcgcatcgcgaaagtgcagggcaaccataatccgtatgtccagcaggcttgccaggcgcaaaagagc

SEQ ID NO: 23469 - DNA, 729 bp, Klebsiella pneumoniae
atgcgcattcctcgcatccatcatccagaacgcctcattgtcggcagccagatcgcgctgagcgatgacgcggccaaccacgtcggccgcgtcctgcgcatgaccgccggtcagcacctacagctttttgacggcagtaaccaggtgtttgacgcggtcatcaccgaggccggtaagaaaaacgttacggttgaggtgctcagtggcgaacccgacgatcgggaatcgccgctgcatatccatttaggccaggtgatgtcccgcggcgaaaaaatggaattcaccatccagaaatcgatcgaactcggggtaagcctcataacgccactgttttccgagcgctgcggcgttaaactggatgccgaacgtttgcagaaaaagatccagcagtggcagaaaatcgctattgccgcctgcgaacagagcggtcgtaacgtggtaccggaaatacgtccggcgatgcagctggaggcgtggtgcgccgagcaggacagcgggctgaagctcaacctgcacccgcgcgccagcgccagcattaacacgctgccgctgccggttgaacgcgtccgtctgctgattggcccggaaggcgggctgtcggctgaagagatagcgatgaccgcgcaataccagtttactgatatcctgttgggaccgcgcgttctgcgtacagagactactgcgctcaccgccatcaccgccctacaggtgcgttttggcgacttaggt

SEQ ID NO: 23470 - DNA, 699 bp, Klebsiella pneumoniae
atgaacgatattgcgcataacctggcacaggtccgggacaaaatctccggtgctgccgcccgatgcgggcgtgcgccagaagaagtgacattgcttgcagtgagtaaaacgaaacctgcgagcgcgatcgaagaagccattgcagcaggccagcgggcatttggtgaaaactacgtccaggagggcgtggagaagattaaccatttccagcaggctggcgtcagcgggctgcagtggcactttattggccccctgcagtccaacaaaagccggttggtggcagagcattttgactggtgccacaccgtcgatcggctgaaaatcgccacccgcctgaacgagcagcgcccggcgcatttaccgccgctgaaggtgctgattcaaattaacatcagcgatgagcagagcaaatccggcatcccgctggaagcgctcgacggcttagcggcggagatcgctgagttacctcatctggaactgcgcggcctgatggccatccccgcgcctgagtcagaatatgtaaggcagtttgccgtcgcccggcaaatggcggtagcatttgcgcgattaaaaacgcggtaccccacggtcgatacgttgtctctgggaatgtcggacgatatggaagccgcaatcgcggcgggaagcacgatggtgcgcatcggtacagccatttttggtgcgcgcgactacagcaaa

SEQ ID NO: 23471 - DNA, 417 bp, Klebsiella pneumoniae
gtgatgagcggaacctttctcggctttgactttggcaccaaaagcatcggcgtggcggtgggacaacgcatcaccgcgaccgcacgaccattaccggcgctgaaggcgcaggacggtaaaccggactggaacgtcatcgaaaaactgcttaaagagtggcagcctgaggcggtaatcgtcggcctgccgctcaatatggacggcaccgagcaaccgctgacggcgcgcgcgcgtaatttcgccaataaaattcatggccgctttggcgtcgcgatccttctccacgatgaacggctgagtacggttgaggcccgcgcgggcctgtttgaacacggcggctaccgggcgctgaataaaggcagcgtcgattcggcctctgccgtagtcatactggaaagctacttcgagcagagcttt

SEQ ID NO: 23472 - DNA, 591 bp, Klebsiella pneumoniae
atgcaaaaagtcgtcctcgctaccggcaacgccggcaaagtgcgcgaactggcctcgctgctggaagattttggtctcgatatcgtcgctcagaccgagctgggcgtggactctgcggaagagaccggcctgaccttcattgaaaacgcgattctgaaagcgcgccacgcggcgcagatcaccggcctgccggccatcgccgacgattccggtctggccgtcgatgctcttggcggcgcgccgggtatttactccgcacgctattccggcgtcgatgccagcgaccagcagaatcttgagaagctgctcgacgcgttaaaagacgtgccggacgaccagcgtcaggcccagttccactgcgtgctggtctatctgcgccatgccgaggatcccacgccgctggtgtgccacggcagctggcctggggtaatcacccgacaagccgccggtcatggcggcttcggttacgacccgatcttcttcgtcccgtcagaagggaaaaccgcggccgaactgagccgtgaagaaaagagcgccatttcccatcgcgggcaggcgctgaaactgttactggaagcattacgtaatggc

SEQ ID NO: 23473 - DNA, 1025 bp, Klebsiella pneumoniae
gtgccaggttatgcgcaatatcgttcatattccgaggatgagttatgaagctggaagaaatcgtagcccttagtgtaaagcataatgtctccgatctacacctgtgcaattccgccgcaccgcgctggcggcggcagggcaggctggagcccgcgccctttcccgcgccggatattgcgaatttactcaacgactggctcgatgccgcacagttactgcactggcaggaacacggccagattgactttgcgctgaacctggcctgcggtgcgcggctgcgcgccagcgccttcgcccatacgcgtgggatatcgctggtgctgcgtctccttcctgaacagtgcccgcgtctggatatgctcggcgccccgcctgcgctgagcgaactgctggcggaagagagtggtttgctgttggtcaccggagcgacgggcagcggcaagtcgaccaccctggcggcaatggtggggcacctcaatcagcatcttgatggccatattctgacgcttgaagatccggtggaatttattcatcacagcgagcgctgtctgatccagcagcgggaagttggccgtcactgtccttcgttcgccgcggcgctccgcgtggcgctgcgccaggatccggatgtgatcctgctcggggagctacgcgacagcgaaaccattcgcctggcgttaaccgcggcggagaccgggcacctggtaatggcgacattacatacccgcggcgcggcgccggcggtggagagattgatcgatgtctttccggcggaggagaaagatcaggttcgtagccagcttgccggaagcctgtgcgcggtgctggcgcaaaaattgttacctgcacgtcagggcgggagagttgcgctatacgagcttctggtcaacacgccagcggtggcgaatttgatccgtgaaggaaaagtacatcaattgcctggtgtgatgcagaccgggatgcaggccggaatgttgacctttacccagagttttcagcaacgtgtcgctgcaggcgcgctataa

SEQ ID NO: 23474 - DNA, 984 bp, Klebsiella pneumoniae
atgaaaaaatacgctttttctcgttctctaatagcaatatctttgcttgctctattctcttcaggagccagcgcagctgaaaaaatcacgttaaaactggcacataaccttgaacgcagtcacgtggtgcatcaggcgtttgaagagatggccaaagaggtaaaccaactttctgacggtaatatgaagattcgtatttaccccagtagccagatgggcagcgcacgcgaaacgatggagttattacaaaatggcgcgctggatttgaccaaaggttccgccagcgatctggagtcatttgataatatctacgcgatatataatttaccgttcctgtttaacgatcaaaatcatttcaataaggtggtattcgggaaagtgggcaaggaaataatggattcgacgaaagagaaaggattctttgccctttccgcttatgtcgccggaacccgaagtttttatgccaaaaagcccatcacccaaccggaggatttaaaaggactgaagatccgcgtgcaggccagcccgacaaccttaaaaatgattgaattaatggggggctccccgacgccaatctcctttggtgaagtttacaccgccatgcagcaaggggtggtggacggtgcggaaaataacgttccctcctgggtgcagactcgccatatcgaaatcgcgaaagtgttctctgaagatgagcatgcctccattcctgacttcctcgtgatctccagcaaaacctgggacaaactgacgccggggcagcagcaaattctggtcaaagcggccaaagcctcagaggtatatcagcaacagctgtggcagaagatcgacgccgatacccgcgcgcaggccaaagccctggggggcgaaattatcaaagtggataaagcacagttccgtgccgccgtgcagccgctatttgatgactttaagaaagatccaaaacaggccgccctgctggccaaatttgacgccgccgctgaa

SEQ ID NO: 23475 - DNA, 1479 bp, Klebsiella pneumoniae
atgagcctgatcgggctgattctgatgatcttcacctcggtgtttggctttgccaacagcccatcggcgttttatctgatgggctatagcgcgatgccgttttaccttttttccgccctctttttctttatcccgttcgcgctgatgatggcggagatgggctcagcttatcgtcgcgaagagggcgggatctattcctggatgaaccacagcgtcgggccgcgctttgccttcattggtacctttatgtggtttgcctcgtacgtagtgtggatggtgagtaccgccgctaagatctgggtcccgctatctacttttttgtttggcgcggacaaaacccagacctgggcgctgggtagcctgacgccgacgcagacggtcggtattctggcggcctgctggatggtcgtggtgacctttattgccgtcaaagggatcaataaaatcgctaaaattaccgccgtcggcggtatcgcggtgatggggcttaacctggtgctgctgctggtgagcggggcgatccttctgcttaacggcggtcatttcgcccagccgttaaacttcaccctttcgcctaatcccgggtatcagtcgggcatggcgatgctgtcgtttgtggtatttgccatctttgcctatggcggaattgaggcggttggcggcttagtggataagaccgataagccggaaaagaactttgccaaaggtattatcatcgcggcgatcgttatctcgatcggttactcgctggcgattgtgctgtggggcgtgagcgccaactggcagcaggtgcttggcgcgcgttcgaccaacctcggcaacatcacctatgtgctgatgaccagcctcggggcgacgctgggccaggccctgcacctgacccctgcggcgtcagccctgaccggggtctggttcgcccgtattaccggcctgtcgatgtttctcgcttacaccggcgcgttcttcaccctcagctattctcccctgaaagcgattatccagggcacgccaaaagcgctctggccgtcggtgatgacccgcctcaacgtcaacggaatgcccgccgcggcgatgtggctgcagtgtctgctggtcggggtgtttatcgtactggtatcgttcggtggggatagcgcttccgcgttttataacaagctgacgctgatggccaatgtctctatgaccttgccttatctgttcctgaccatcgccttcccgttcttcaaggcgaaaacccatcttgaccggccgttcgtgatcttcaaaaaccgtccgtcgacgctgctggcgaccggcgtggtgctgctggtggtgaccttcgccaatatcttcaccattatccaacccgtcatcgacagcggggactggaacagcaccctgtggatggtcggtgggccgatcttcttctcactgctggcgctggggatctacgaaagctaccgtcggcgcatggcgtccggcgcgctggtgatggagagt

SEQ ID NO: 23476 - DNA, 975 bp, Klebsiella pneumoniae
atgagcgagacggcaacctggcagccgagcgcacccattcccaatctgttgaagcgcgcggcggtgatggcggaaatccgccgtttctttaccgatcgcggcgtgctggaggtggagacgccttgcatgagtcaggcgacggtaacggatattcatttgttcccgttcgaaacccgtttcgtcggcccgggccattctcaggggcttaacctgtacctgatgaccagtccggaataccacatgaagcgcctgctggcggcaggttgcggcccggtcttccagctgtgccgcagcttccgtaatgaagagatggggcgtcatcacaatccggaattcaccatgctggagtggtatcgtccatgctatgacatgtatcgcctgatcaatgaggtggacgatctgctgcagcaggtgctggagtgccaaccggcggaaagtctctcctatcagcaggcgtttcagcgccatctggaaattgacccgctctctgccgataaagcacagctgcgtgaagtcgcagcgaagctggatctgagcaatatcgccgatactgaagaagatcgcgataccctgctgcagctgctgttcaccatgggcgtggagccgcacatcggcaaagatcgaccaacgttcatttatcatttcccggcgactcaggcctctttagcgcagatcagcccggaagatcatcgggtcgctgagcgctttgaggtctattacaaaggtattgagctggcgaacggtttccacgagctgaccgacgcccatgaacagcgcctgcggtttgagcaggataaccgcaaacgcgccgcgcgcggccttccgcagcagcccatcgataacaacctgctggcggcgctggaggcgggtctgccggactgctccggcgtggcgctgggcgttgaccgcgtggtcatgctggcgctgggcgctgaaagcatcggcgaagtgatcgcctttacggtagaccgcgcc

SEQ ID NO: 23477 - DNA, 748 bp, Klebsiella pneumoniae
gacgggagttccacgatgaaaaagttagttctggctgcactgctcacctctttcgcgttcggcgccgctgcgggggcaaaaaatcagctttggcgtctccgcaacctatccgccgtttgaatcgatggacgctaataaccagattgtcggctttgatatcgatctggcccacgcgctgtgcaaacaaatgcaggcagaatgtacctttaccaaccacgcgtttgacagcctgatcccggcgctgaagttcaagaaatatgatgcggtgatttccggaatggatattacgccggagcggagcaagcaggtggccttcaccgacccgtactacgccaactcggcgctggtgatcgccaaaaaagatgcgttccattctttcgatgacctgaaaggcaaacggatcggcatggaaaacggcaccacccaccagaaatatctgcaggataagcatcctgaggtgaagaccgtcgcctatgacagctaccagaatgcgattatcgatttgaaaaatggccgtatcgacggcgtgttcggcgacaccgcggtggtcaacgaatggctgaaaactaacccgcagctgggggcagccacgccgaaagtgaccgacccgcaatacttcggcaccggactcggcattgccgtgcgcccggataacaaggcgctgctggagaaactgaacgccgcgctgaaagcgattaaggccgacggtacctaccagaaaattagcaaccagtggttcccggagtaa

SEQ ID NO: 23478 - DNA, 714 bp, Klebsiella pneumoniae
atggccaaaaccattctgctggtggaagatgacgaggatatagccacgctgctgcggctcaatcttcaggatgagggctatcagatcgtccatgaagccgacggcggccaggccctcgcccggctggagacgcaggtctgggatgcggtgatcctcgatttgatgctgcccggcgtcgatggtctggagatctgccggcgtatccgccagatgacccgctacctgccggtgattatcatcagcgctcgcaccagcgaaatgcaccgcgtgctgggcctggagatgggcgccgacgactatctggcgaagcccttttcactgctggagcttatcgcccgcgtcaaagcgctgtttcgtcgccaggaggcgatggggcagaatctgctgatggacgccgggcgcctgtcctgccatggcctgagcatcgacccgctgtcgcgcgaagtgaagctgcgcggcgagacggtggacctcacgccgcgtgaattcgacctgctgtattacttcgcccgccaccctggggaagtgttttcccggctggcgctgctggagcaggtctggggatatcagcacgagggctatgagcatacggtcaatacccatatcaaccgcctgcgcagtaaaatcgaacgtgacccggccgagccggacatcattcttaccgtctggggaaaaggctataagttcgccccggtgacgcaagaggccgccctg

SEQ ID NO: 23479 - DNA, 843 bp, Klebsiella pneumoniae
atgaacgacttgccggtagtacgctcgccgtggcgcattctgatcctcgtgctcgggttcaccttcctctacgccccgatgctgatgctggtgatctactcgttcaacagctcgaagctggtaacggtctgggccggatggtcgacgcgctggtatagcgaactgttccacgatgatgcgatgatgagcgcggtaggattgagcctgaccatcgccgcctgcgcggcgacggcggcggcgatcctcggtaccatcgccgcggtggtgatggtgcgctttgggcgttttcgcggctccaacggcttcgcgtttatgatcaccgcgccgctggtcatgccggacgtgatcaccggtctctcgctgctgctgctgttcgtggcgctgggacatgccatcggctggccgtcggaccgcggcatgttgaccatctggctggcgcatgtcaccttctgtaccgcctacgtggcggtggtgatctcctcgcgcctgcgcgagctggaccactccattgaagaggcggcgatggatcttggcgccgcgccgctgaaggtcttcttcgtcatcacgctgccgatgattatgccagcggtgatctccggctggctgctggccttcacgctgtcgctggatgacctggtgatcgccagctttgtctccggtcccggggccacgaccttgccgatgctggtcttctccagcgtgcgcatgggggtaaacccggagatcaacgccctggcgacgctcatcctcggcgtggtcggtattgttggttttatcgcctggtatttgatggcccgcgcagaaaagcagcgagtgcgcgatatccagcgtgcaagacaaggc

SEQ ID NO: 23480 - DNA, 591 bp, Klebsiella pneumoniae
atgctggaaaatattaactatgcgctgttcgccctgctcaacgcgacgcctgcctcgccgcagtgggccattgagatggcgatcttcatcgctaaagatctgattctgatcgtgcctctgctggtggtgacattatggctgtgggggcctgcccagcggcagatggtgtttaagctgatgctggcgctgacgatcagcctgaccgtgtcgtgggcgatcggccatctttatccgcacgatcggccgtttgtcgccggcgtaggctataacttcctgcaccacgcggcggacgactccttccccagcgaccatggcaccgtcagctttacctttgccctggccttcctgttctggcatcgcctgtggtccggcgccctgctgatggccattgccgccgccatcgcctggtcccgtgtctatctcggcgtgcactggccgctggatatggtcggcgggctgctggccgggatgtgcggctgccttggcgcggcgctgatctggcacacgttcggcccggcgctataccatcagctgcagcggctgtatcgtctctgcttctccttgccaatccgcaaaggttgggtgcgcggc

SEQ ID NO: 23481 - DNA, 969 bp, Klebsiella pneumoniae
atgtccgcttttaccccggcaagtgaagtcttgctgcgccacagtgatgatttcgagtccgcccgcgttctgtttgccggtgacctgcaggatgacctgcctgcgcgtctggataccgcggccagccgcgcccacacccaacagttccaccactggcaggtcctcaaccgccagatgggtgacaccgtccgttttagcttagtggctgaggccgctgacgtcgccgaatgcgacaccctgatctactactggccaaagaacaaaccagaggcgcagttccagctgatgaacctgctctctctgctgccggtgggaagcgacattttcgtcgtcggtgaaaaccgcagcggcgtccgcagcgcggagcagatgctggctgaatacgcgccattaaacaaagtggatagcgcccgccgctgtggcctctatcatggccgtctggaaaagcagccgaccttcgacgccgacgcattctggggcgaatacacactggataatctgacgattaaaaccctgccgggcgtcttcagccgcgacggtctggacgtcggcagccagctgctgctctccaccctcgagccgtataccaaagggaaagtgctcgacgtcggctgcggcgcgggcgtgctggccgccgcgctggccagccattcaccgaaagtgcgcctcaccctgtgcgacgtcagcgccccggcggttgaagccagccgcgcgacgcttgccgccaacggcctggctggcgatgtgtttgccagcaacgtcttctccgaggtcaatggtcgcttcgacatgatcatctccaacccgcccattccatgacggcctgcagaccagtctcgaagccgcccaggcgctgatccgcggcgcggttcgccatctgaacagcggcggcgagctgcgcattgtcgccaacgccttcctgccgtatccgcaggtgctggatgagacgttcggcttccatgaggtgat

SEQ ID NO: 23482 - DNA, 1626 bp, Klebsiella pneumoniae
atgcgtggcccatggccgcgtttacttagaagattaattatgacgttgtctccttatctgcaagaggtggccaaacgccgcacttttgccattatttctcacccggatgccggtaagaccaccatcaccgaaaaggtgctgctgttcggacaggcgattcagaccgccggtacagtaaaaggtcgtggttccagccagcacgcgaaatccgactggatggagatggaaaagcagcgtggtatctcgatcaccacctcggtaatgcagttcccgtatcatgactgcctggtgaacctgctggataccccggggcacgaagacttctccgaagatacctaccgtaccctgacggcggtggactgctgcctgatggtgattgacgcggcaaaaggcgtcgaagatcggacccgtaagctgatggaagtcacccgtctgcgcgatacgccgatcctcacctttatgaacaaactcgaccgtgatatccgcgatccgatggagctgctggatgaggtcgagaacgagctgaaaatcggctgcgcgccgattacctggcctatcggctgcggcaagctgttcaaaggcgtttatcatctctacaaagacgaaacctacctgtatcagaccggtaaaggccacaccatccaggaagtgcgtatcgtgaaggggctcaacaacccggatctcgacgcggcggtgggggaagacctggcgcagcagctgcgtgacgagctggagctggtgcagggggcgtcgaatgagttcgacaaagatctgttcctggccggggaaatcaccccggtcttcttcggaaccgcgttaggtaacttcggcgttgaccatatgctggatggcctggtggagtgggccccggcgccgatgccgcgcaacaccgacacgcgtgaagtcaccgccacggaagagaaattcaccggcttcgtgtttaaaattcaggccaacatggatccgaaacaccgcgaccgcgtggctttcatgcgggtggtgtccggcaaatatgaaaaaggcatgaagctgcgtcaggtgcgtatcggcaaggacgtagtgatttccgacgcgctgacctttatggcgggcgatcgctcgcacgttgaagaagcgtacccaggcgatatcatcggcctgcataaccacggcaccattcagattggcgatacctttacccagggcgagatgatgaagttcaccggtattccgaacttcgcgccggaactgttccgtcgtattcgcctgaaggatccgctgaagcagaaacagctgctgaaagggctggttcagctctctgaagagggcgcggtccaggtcttccgcccgatcgctaataacgatctaatcgttggcgccgtcggcgtgctgcagtttgacgtggtggtagcgcgtctgaaaagcgaatacaacgtggaagcgatttacgaatcggtcaacgtggccaccgcgcgctgggttgaatctactgacgtgaagaagttcgaagagttcaagcggaaaaatgaagttcagctggcgctggatggcggcgataacctgacctacatcgccccgacaatggtcaacctgaacctgacgcaggagcgttaccctgacgtggtgttccgcaaaacgcgcgagcac

SEQ ID NO: 23483 - DNA, 1375 bp, Klebsiella pneumoniae
gtggcgaaagctccaaaacgcgcatttgtctgtaatgaatgtggtgcggattatccgcgctggcaggggcagtgcagcgcctgccatgcctggaacaccatcaccgagatgcgcatcgccgcgtcgccgcaggtggcgagaaacgagcgtctttcaggctatgccggtaacgccggcgtgtcgaaggtgcagaagctgtcagatatcagcctggaggcgctgccgcgtttctccaccggctttaaagaatttgaccgcgtgctgggcggcggcgtggtgccgggcagcgcgatcctgattggcggcaaccccggcgcgggcaaatcgacgctgctgctgcaaaccctctgcaaactggcggaagggatgaaaaccctgtacgtcaccggggaggagtccctgcagcaggtggcgatgcgcgcccatcgtctcgggttgccaacggccaacctgaacatgctctcggaaaccagcattgagcagatctgtcagatcgccgatgaagaaaagccgcagctgatggtgatcgactccatccaggtgatgcatatggccgacgtgcagtcgtcgccgggcagcgtcgcccaggtacgggaaaccgcggcctatttgacgcgctttgctaaaactcgcggcgtggcgattgtgatggtcggccacgtcaccaaagacggctcgctggccggtccgaaggtgctggagcactgtatcgactgctcggtgctgctggacggggatgccgactcccgcttccgcacgttgcgcagccataaaaaccgctttggcgcggtgaacgagctgggcgtcttcgccatgaccgagcagggcctgcgcgaagtgagcaacccgtccgctatcttcctcagccggggagatgaaatcacctccggtagctcggtgatggtggtctgggaagggacccgcccgctgctggtggagatccaggcgctggtcgatcactcaatgatgtccaacccgcgccgcgttgcggtggggctggaacagaaccgtctggcgatcctgctggcggtgctgcaccgtcacggcggcctacagatggccgatcaggacgtcttcgtcaatgtggtcggcggggtgaaggtcacggaaaccagcgccgacctggcgctgctgctggcgatggtctccagcctgcgcgaccgtcctctgccgcaggatctggtggtctttggcgaagtggggctggccggggaaattcgcccggtaccgagcggtcaggagcgtatctccgaagcggcgaagcacggcttccgccgcgccatcgtcccggcggccaatggtgccgaaaaaagtgccggaaggcatgcaaatctttggcgtgaaaaagctttcagacgcgctaagcgtttttgac

SEQ ID NO: 23484 - DNA, 1661 bp, Klebsiella pneumoniae
caattcgtttataccatgcatcgtgtcggcaaagtggttccgccgaaacgtcatattttgaaaaatatctccctcagctttttccctggcgcgaaaatcggtgtgctcggtctgaacggcgccggtaaatctaccctgctgcgcatcatggccggtatcgacaccgagatcgaaggtgaagcgcgtccgcagcccggcatcaaaatcggctacctgccgcaggagccgcagctcaacccggagcacaccgtgcgcgagtccgtggaagaagcggtcgccgaagtggttaacgcgctgaaggggctggacgaagtctatgccaaatacgccgagccggatgcggacttcgataagcttgccgcacagcaaggcaagttcgaagagattatccaggcgcacgacggccacaacctgaacgtccagctggagcgcgcggccgacgccctgcgcctgccggactgggatgcgaaaatcgctaatctttccggtggtgaacgccgcgcgtcgcgctgtgccgtctgctgctggaaaaaccggatatgctgctgctcgacgaaccgaccaaccacctcgacgccgagtccgtcgcctggctggaacgcttcctgcacgacttcgaaggcaccgtggtggcgattacccacgaccgttacttccttgataacgtcgccggctggatcctcgagcttgaccgcggcgaaggtattccgtgggaaggcaactactcctcctggctggagcagaaagaccagcgtctggcgcaggaagcttctcaggaagccgcacgccgcaaatctatcgagaaagaactcgagtgggttcgccagggcgcgaaaggccgtcagtctaagggcaaagcccgcctcgcgcgctttgaagagcttaacaacgttgaatatcagaaacgtaacgagactaacgaactgttcattccgccaggcccgcgtctgggcgataaagttctggaagtcagccatctgcgcaaatcctacggcgaccgcgttctgattgacgatctgagtttctcggtaccgaaaggcgctatcgtcggtatcatcggtccgaacggcgcgggtaaatccaccctcttccgcatgatgtctggccaggaacagcctgattccggcaccatcaccctgggtgaaaccgttaagctggcttccgtcgatcagttccgcgacgcgatggacaacagtaagaccgtgtgggaagaagtgtctggcggcctggatatcatgaagatcggcaacaccgagatgccgagccgcgcctacgtgggccgctttaacttcaaaggcgtcgaccagggtaaacgcgttggcgagctgtccggcggtgaacgtggtcgtctgcacctggcgaaactgctgcaggtcggcggtaacgtcctgctgctcgatgaaccaaccaacgacctggatatcgaaaccctgcgcgcgctggaaaacgccctgctggagttcccgggctgcgcgatggttatctcgcacgaccgctggttccttgaccgtattgccacccacattctggattaccaggatgaaggtaaggttgagttcttcgaaggtaactttaccgagtacgaagagtacaagaaacgcactctcggcgccgacgcgctggagccgaagcgaatcaagtacaaacgtatcgcgaaataa

SEQ ID NO: 23485 - DNA, 1260 bp, Klebsiella pneumoniae
atggcgtggaatcagcccggtaataacggacaggaccgcgacccgtgggggagcagcaaacctggcggcaactctgagggaaatggcaataaaggcggtcgcgagcaggggccgccggatctggatgatatcttccgcaagttaagtaaaaaacttggcgggctcggcggcggcaagggcggactgggcggcggcaatagcgcgcaggggcctcgcggaccgatgggcgggcgtattgtcggcatcgttgccgcggcggcagtgattatctgggcggccagcggtttctataccattaaagaggccgagcgcggcgtggtcacccgttttggcaagttcagccatctggttgagcctggcctgaactggaaaccgacttttatcgataacgttcaggcggtgaacgtggagtcggtgcgcgaacttgcggcttccggcgtcatgctgacctctgacgaaaacgtggtgcgcgttgagatgaacgtgcagtaccgcgtcaccgatccggagcgctatctgtttagcgtgaccagcgcggacgacagtctgcgtcaggccaccgacagcgcgctgcgcggcgtgatcggcaaatacaccatggatcgcattctgaccgaaggtcgtaccgtgatccgtagcgatacccagcgtgagctggaagagacgattcgcccgtacaacatgggtattactctgctggacgtcaacttccagacggcgcgtccgccggaagaggtgaaggccgcgtttgacgatgccattgccgcgcgtgagaacgagcagcagtacattcgtgaagcggaagcgtataccaacgaagtccagccgcgggcgaatggtcaggcgcagcgtatcctcgaagaggcacgcgcctataagacccagaccgttctggaagcccagggtgaagtggctcgctttgcgaagatcctgccggaatacaaagccgcgccggaaattacccgcgagcgtctgtatatcgaaaccatggaaaaagtgctgagccacacccgtaaagtgctggtcaatgacagcaaaaacggcaatctgatggttctgccgctggatcagatgctgaagggcgccgctgcgccggcagcaaagagcgatagcagtgacgccagcgatctgctgcgcctgccgccagcatccagctcaagcagcgccagcacctcatcaacctcgagctcaaccgggggtagcattatggaccaacgccgcgctaacgcgcagcgtaacgactaccagcgtcagggggaa

SEQ ID NO: 23486 - DNA, 1296 bp, Klebsiella pneumoniae
atgggtaacaacgtcgtcgtactgggcacccaatggggtgacgaaggtaaagggaagatcgtcgatctcctgactgaacgggctaaatatgttgtgcgctaccagggtggtcacaacgccggccatactctcgtaatcaacggtgaaaaaaccgttctccatcttattccatcaggcattctgcgtgaaaacgtcaccagcatcatcggtaacggcgtcgtgctgtctccggccgcgctgatgaaagagatgaagggcctggaagaccgtggtatcccggttcgcgagcgtctgctgctctctgaagcctgcccgcttatccttgactatcacgtggcgctggacgtggcgcgtgaaaaagcgcgtggcgcgaaagcgatcggcactaccggtcgcggcattggcccggcttacgaagataaagtcgctcgtcgcggtctgcgcgttggcgatctgttcgataaagcaaccttcgccgataaactgaaagaagtgatggaatatcacaacttccagctggtgaacttctacaaagcagaagcggttgactaccagaaagtgctggacgatgtgatggcgattgccgacatcctgaccagcatggtggtggacgtatccgacctgctggatcaggcgcgtcagcgcggcgacttcgtgatgttcgaaggcgcgcagggtacgctgctggatatcgaccacggtacctacccgtacgttacgtcctctaacaccaccgcaggtggcgtggcgaccggctccggcctgggcccgcgttatgtggattacgttctcggtatcattaaagcgtactcaactcgcgtcggtgcaggtccgttcccgaccgagctgtttgatgaaactggcgagttcctctgcaagcagggtaacgaattcggcgccaccaccggccgtcgtcgtcgtaccggctggctggacgcggtcgcagtccgtcgcgcggtgcagattaactccctgtccggcttctgcctgactaaactggacgtcctcgacggcctgaaagaagtgaaaatctgcgttggctaccgtatgccggatggccgcgaagtgaccaccactccgctggctgccgataactgggaaggtatcgagcctatctacgaaaccatgccgggctggtccgaaaccaccttcggcgtgaaagagcgcagcggcctgccgcaggcagccctgaactacatccagcgtattgaagagctgaccggcgtgccggtggatatcatctctaccggtccagaccgtaccgagactatgattctgcgcgatccgttcgacgcg

SEQ ID NO: 23487 - DNA, 753 bp, Klebsiella pneumoniae
atgacggaagcgcaaaggcaccaaattctgctggatctgctcgcccaaacggggtttgttaccgtggagcaggtcatgtcgcggctcgggatctcacccgctaccgcccgacgtgatatcaacaagctggatgaaagcggcaaactgaaaaaggttcgtaatggcgcggaagccattagcgaacagcgcccccgctggacgccgatgaacatccaccaggcgcaaaatctggatgaaaaagtgcgtattgcacgcgccgcttcgcaactgatcgcgccgggtgagagcatcgtcattaactgcggctccaccgcctttctgttgggtcgggaactgtgcggcaaaccggtgcagatcatcaccaactatctgccgctggctaactacctgatcgaccaggagcatgacagcgtgattatcatgggcggccagtacaaccgcagccacgccatcaccctcagcccccacggtagcgagaacagcctctatgccggacactggatgtttaccagcggcaaagggctcaccgccgaaggcctctacaaaacggatatgttgaccgccatggccgagcaaaaaatgcttaacgtggtcggcaaactggcggtgctggtcgacagcagcaagatcggcgagcgcgccgggatgctattcagccaggccggacaaatagacgtggtgatcaccggcaaacaggccgatgccgcgatcctcaaacagcttgaggatcagggcgtcagcgtaatccgcgtt

SEQ ID NO: 23488 - DNA, 387 bp, Klebsiella pneumoniae
atgcgtcattacgaaatcgtttttatggtccatcctgaccagagcgaacaggttccgggcatgatcgaacgttacactggtgcaattactgcagcagcaggtacgatccaccgtctggaagactggggccgccgtcagctggcttatccgatcaacaaactgcacaaagctcactacgttctgatgaacgttgaagcgccgcaggaagcgatcgatgagctggaaactaacttccgcttcaacgacgccgttatccgcagcatggtaatgcgtactaagcacgctgttaccgaagcatctccgatggttaaagcgaaagacgagcgccgtgagcgtcgcgaagatttcgccaacgaaaccgcagatgattctgaagctgggggattc

SEQ ID NO: 23489 - DNA, 465 bp, Klebsiella pneumoniae
atgaaactccatgaatcactggcgcagaatcactccattcgcctgcaggcggaagcggaaacctggcaggaggcggtgaaaatcggcgtcgatctgctggtggccgccgacgtggtggaaccgcgctactaccaggcaattctcgacggcgtcgcgcagcacggcccctattttgtgatcgctccgggattagccatgccgcacgggcggccggaagagggcgtcaaaaaaaccggctttgcgctggtcacgctaaagaaaccgctgattttcaaccacgaagataacgacccggtcgacatcctgatcaccatggcggcggttgacgccaccacccaccaggaagtgggcatcatgcagatcgttaacctgtttgatgacgaagccaatttcgaccgtttacgcgcctgccgcagtgagcaggaagtgctggatttaatcaaaaacgccaccgcggcggctgtt

SEQ ID NO: 23490 - DNA, 357 bp, Klebsiella pneumoniae
gtggttaagctcgcatttcccagggagttacgcttgttaactcccagtcatttcactttcgtcttccagcagccacaacgggctggcacgccgcaaatcaccatcctcggccgcctgaattcgctggggcatccccgcatcggtctcaccgtcgccaagaaaaacgtgaaacgcgcacatgaacgcaatcggattaaacgtctgacgcgtgaaagttttcgtttgcgtcaacatgaactcccgccaatggatttcgtggtggtggcgaaaagaggggttgccgacctcgataaccgtgctctctcggaagcgttggaaaaattatggcgccgccattgtcgcctggctcgcgggtcc

SEQ ID NO: 23491 - DNA, 1615 bp, Klebsiella pneumoniae
atggattcgcaacgcaatcttcttatcatcgctttgttgttcgtgtctttcatgatctggcaagcctgggagcaggacaaaaatccgcagccccagcagcagaccacgcagactacgaccacagcagcgggtagcgccgccgaccagggcgtaccggccagtggccaggggaaactgattacggttaaaaccgacgtgcttgagctgactatcaacaccaacggtgggcgatattgagcaggcgctgcttctggcgtatccaaaaacgctgaaatcgaccgaaccgttccagttactggaaaccacgccgcagtttgtctaccaggcgcagagcggcttaaccggccgtgacggtccggataacccggcaaacggcccgcgtccgctgtacaacgtcgataaagaggcgtttgtgctggccgatggccaggatgagctcgttatcccgctgacctacactgacaaagccggcaacgtcttcaccaaaaccttcaccctgaagagcggtggctatgcggtgaacgtgggttacagcgtgcagaatgccagcgagaagcctctggaagtctcaaccttcggtcagctgaagcagaccgctgcgctgccgaccagtcgcgatacgcagaccggtggcctgtccacgatgcatactttccgtggcgccgcgttctccactgcggattcgaaatacgagaaatataaattcgataccattctggataacgaaaacctgaacgtcagcaccaaaaacggttgggttgccatgctgcagcagtacttcaccaccgcatgggtgccgcggaataacgggacgaataacttctacaccgccaacctcggcaacggcgttgtcgctattggctacaaatcgcagccggtactggtgcagccaggccagaccgacaaactgcagagcacgctgtgggtcggcccggctattcaggacaaaatggctgccgttgcgccgcacctggatctgaccgtcgactacggctggctgtggttcatctcccaaccgctgttcaagctgctgaaattcatccacagcttcctcggcaactggggcttctcgatcatcgttatcacctttatcgttcgtggcatcatgtacccgctgaccaaagcgcagtacacctccatggcgaagatgcgcatgctgcagccgaagattcaggccatgcgtgagcgtctgggcgacgataaacaacgtcaaagccaggagatgatggcgctgtataaagcggaaaaagtaaacccgctgggcggctgcttcccgctgattattcagatgccgatcttccttgcgctgtattacatgctgagcgcctcggttgaactgcgtcatgcgccgtttatcctgtggatccacgacctgtctgctcaggacccgtattacatcctgccgatcatcatgggcgcgaccatgttcttcatccagaagatgtcgccgaccaccgtgaccgacccgatgcagcagaagatcatgacctttatgccggtcatcttcacggtgttcttcctgtggttcccgtctggcctggtggtgtactacatcgtcagcaacctggtcaccattattcagcagcagctgatttaccgtggtctggagaaacgt

SEQ ID NO: 23492 - DNA, 1362 bp, Klebsiella pneumoniae
atgagccataacgacactatcgtcgcccaggcaacccctccgggacgcgggggtgtgggcatcctgcgtatctccggccttaaggcgcgcaacgtcgcgcaggcggtgctgggcaagctgccgaagccgcgctatgccgactacctgccgttcaacgacgttgacggtaccccgctggatcaggggattgcgctgtggttccccgggccgaactcctttaccggggaagatgtgcttgagctgcagggccacggcggcccggtcattctcgacctgctgcttaaacgtattctgaccctgccgggcctgcgcatcgccaggccgggtgagttttccgagcgcgcgttcctcaacgacaagctcgatctggcgcaggcagaggccatcgccgaccttatcgacgccagttcagagcaggcggcgcgctcggcgctgaattcgttgcagggggcgttctccgcgcgggtgaatcatcttgtggaagcgctcactcacctgcgcatctacgtggaagcggccattgacttcccggatgaagaaattgatttcctctccgatggcaaaattgaagcccagctgaacgaggtgatggccgatctcgacgccgtccgcgcggaagctcgtcagggcagcctgctgcgcgaagggatgaaagtggtgatcgccgggcggccaaatgccggtaaatcaagcctgctgaacgccctggcgggccgcgaagcggcgatcgtcaccgatatcgccggtaccacccgcgacgtgctacgcgagcatatccatatcgacggcatgccgctgcatatcatcgataccgcaggcctgcgcgatgctaatgacgaagtggaacgtatcggcatcgagcgcgcctggcaggagattgcccaggccgatcgggtgctgtttatggtcgatggcaccaccaccagcgccgttgacccggcggagatctggccagactttatcgagcgcctgcccgctaaattgccgattaccgtggtgcgcaataaagccgatgtcaccggcgaagcgctcggtatcaacgaagtaaatggccactcacttattcgcctgtcggcacgtaccggcgacggcgtggaggtgctacgtaaccacctcaagcagagcatgggcttcgataccaatatggaaggcggcttcctcgcccgccgccgtcacctgcaggccctggaagaggcggcgaaccatctgcagcaaggcaaagcccagctgctgggcgcctgggccggcgagctgctggcggaagagctgcgcctcgcgcagcaggcgctgagcgagatcaccggggagttcacttccgacgatctgctgggccgcatcttctccagcttctgcatcggtaag

SEQ ID NO: 23493 - DNA, 417 bp, Klebsiella pneumoniae
atgaccgttgaatataccgtgatcgagaaggtgccctccgccgaagcgttttgccacctgcgggtagccgccggcatgtcgccgcgccccctggaaggcgccagagccggactgccgcatagctgttatggcgtacatatcctctggcaggagacgccgatcgcgatgggacgcatcgtcggcgacggcgcgattaatttcgatattgtcgacgtcgccgtcgatccggctcaccagggaaaaggccttggccggctggtgatggagaagctggtcgcctggctggacgctaacgcctttgatggcgcctacgttacgctggtggcggatgtgccggaactgtacgcgaagttcggcttcgaaagcgttcgcccggagagcgaggggatggcccgcgtctggcgaacccgcagtcgt

SEQ ID NO: 23494 - DNA, 330 bp, Klebsiella pneumoniae
atgccgggcaaccgcccgcattatgggcgttggcctcaacacgattttccgccatttaaaaaactcaggccgcagtcggtaacctcgcgcatacagccgggcagtgacgtcatcgtctgcgcggaaatggacgaacagtggggatacgtcggggctaaatcgcgccagcgctggctgttttacgcgtatgacaggctccggaagacggttgttgcgcacgtattcggtgaacgcactatggcgacgctggggcgtcttatgagcctgctgtcaccctttgacgtggtgatatggatgacggatggctggccgctgtatgaatcccgcctg

SEQ ID NO: 23495 - DNA, 273 bp, Klebsiella pneumoniae; identical to SEQ ID NO: 19918

SEQ ID NO: 23496 - DNA, 1629 bp, Klebsiella pneumoniae
atgagaaaaaaaaggatcgcttcggcgatagtcttgctggcgccactttgttattcaactaatctgctagcgagccagttgacggtggaacaacggcttgagctgctggaaaaagcgctcaaagacacgcaaaaagagctcaaaaaatatcaggaccaggaaagaaaaagagaccagatttgggcctcatggtctcctcctgcggaaggtcagaagcgcaagaccgggggggcgaccgccgggccgaaaacggcggttaaaccggatgcgctgctggttaaaaatcaacaacctgtcaccgatggcgcgccagcctacagcgcgatgacgctgaaagactttagcaagttcgtgaaagatgaaattggctttagctataacggctacttccgttccggctgggggaccgcctcgcacggctcgccaaaatcatgggcgatcggttcgcttggccgcctgggcaatgaatattccggctggttcgatctgcagctgaagcagcgggtgtttcaggaaggcgataaacgcgtcgacgccatcgtgatgctcgacgggaacgtcggccagcagtattccactggctggtttggtgacaatgccggcggcgaaaactacattcaattctcggatatgtatgttaacaccaaagggttcctgccgtttgcgccggaagccgatttctgggtcggcaaacacggggcgccaaaaattgaaatccagatgctggactggaaaacgcagagaaccgatgcggcggccggcgtagggctggaaaactggcaggtgggcgccgggaaattcgatatcgcgttgattcgcgaagatgtcgatgattatgaccgttctttaagcaataagcagcaaattaacaccaataccctggacgttcgttacaaagagattccgctgtgggataaagccagcctgatggttagcggacgctatgtcgccgccaaccaaagttcctctgagaaatataaagagggcaatgaaggttattatccgtggaaagatacctggatggctggtacctcgttaacgcagaaatttgctaacggcggctttaacgaattctctttcttactggccaataactctattgccagcagcttctcacgctatgccggatccagcccctataccacctttaatggccgctattatggcgatcataccaatggcaccgccgtgcgcttaacctcgcagggggaaacctatttacgcgatgacgttattatggcgaatgccatcgtctactcttttggtaacgacgtctatagctacgaaaccggggcccactccgattttgaatctatccgtacggttctgcgaccggcttatatctgggataaatataaccagaccggcgtcgagctggggtacttcaaacagcaaaacaaagatgttaccggcaagaaatataacgagtccggctacaagaccacgctgttccataccttcaaagtcaataccagtatgctgacctcgcgcccggaaattcgtttctatgccacctatattaaagcgaaggatattgatctggataaggccgcgaataataccaccagcatttttgaagacgggaagaacgatcagtttgccgtgggggcgcaggcggaaatctggtgg

SEQ ID NO: 23497 - DNA, 771 bp, Klebsiella pneumoniae
atgagtatggtgaatacagctccgggtaagatttcagttcgtaacctgaacttctactacggcaaattccatgccctgaagaacatcaacctggatatcaccaaaaaccaggtgacggcgtttatcggtccgtcaggctgtggtaaatccaccctgctgcgcacgttcaacaagatgtttgaactgtatccggagcagcgcgcggaaggtgagatcctgctggatggcgacaacattctgactaacacccaggatatcgccctgctgcgcgctaaggttggcatggtgttccagaaaccaacgccgttcccgatgtccatatacgacaatatcgccttcggcgtgcgcctgtttgaaaagctgtcccgtgccgatatggacgagcgcgtgcagtgggcgctgaccaaagccgcattatggaacgaaaccaaagataaactgcaccagagcgggtattctctctccggtggtcagcagcagcgtctgtgcattgcccgcggcatcgcgatccgcccggaagtgctgctgcttgatgagccgtgctccgcgctggacccgatctccaccgggcgtatcgaagagctgatcaccgagctgaaacaggactacaccgtcgttatcgtgactcacaacatgcagcaggctgcgcgttgctccgaccatacggcatttatgtatcttggcgagctgattgagttcagcaacacggatgacctgttcactaagcccgcgaagaaacaaactgaagattatattactggccgctacggt

SEQ ID NO: 23498 - DNA, 957 bp, Klebsiella pneumoniae
atggctgcaaccaagcctgcatttacccctccggggaaaaagggtgacatgattttcagtgcgctggtaaaactggctgcgctgattgtgctattgatgctgggcggcatcatcgtttccctgatcatctcttcctggccgagcattcaaaagtttggctttgcctttttgtggaccaaagagtgggatgcgcctaacgagatcttcggcgcgctggtcccgatttacggaaccctggtcacctcttttatcgcgctgctgatcgccgttccggtgagcttcggcatcgcgctgtttctgacagaattgtcccccgcctggctcaagcgtccgctgggcattgcgattgagctgctggcggcaatcccgagcatcgtgtacggcatgtggggcctgtttattttcgccccgctgtttgcgacttacttccaggagccggtcggcaacgtcctgtcgaccatcccgttcgtcggcgcgctgtttgccggcccggcttttggtatcggtattctcgccgctggcgtcattctggccatcatgatcatcccttacatcgctgcggtcatgcgcgatgttttcgaacagaccccggtgatgatgaaagagtcggcctatggcatcggctgcaccacctgggaggtgatctggcgcattgtcttaccgttcaccaagaatggggtgatcggcggggtgatgctcggtctgggccgcgcgctgggtgaaaccatggcggtcacctttatcatcggcaacacctaccagctcgacagcatctcgttgtatatgccggggaacagtattacctccgcgctggctaatgagttcgccgaagcggaaaccggcctgcacgtggcggcgctgatggaactgggcctgatcctgttcgttatcacctttatcgttctggccgcgtcgaagtttatgattatgcgcctcgcgaagaatgagggggcacgc

SEQ ID NO: 23499 - DNA, 861 bp, Klebsiella pneumoniae
atgatccgcagtatgaccgcctatgcccgccgtgaaatcaagggtgactggggtagcgccgcatgggagctgcgctcggtaaaccagcgctatctggaaacgtacttccgcctgccggagcagttccgtagtctggagcccgtggtacgcgagcgcattcgcgcccgcctgactcgcggtaaagtcgaatgcaccttgcgttttgaacaagatcccagcgctcagggtgaactcatcctcaacgaaaagctggctaaacagctggtaaacgctgccaactgggtgaaaatgcagagcgatgaaggggaaatcaacccggttgatatcctgcgctggccgggtgtgatggccgccaaagagcaggatctcgacgccatcgccgccgacattctggccgctcttgacggcgcgctggacgacttcatcgtcgcccgcgaaacggaaggccaggccctgaaagcgcttatcgagcagcggcttgaaggcgtgagcggcgaagtggcgaaagttcgcgctcatatgccggaaattctccagtggcagcgcgagcgtctggtcgccaagctggaagatgcggaagtgcagctggaaaataaccgccttgagcaagagctggtgctgatggcgcagcgtatcgacgttgccgaagaactggaccgtctcgaagcgcacgttaaagagacctataacattctgaagaagaaagaagctgtgggtcgccgtctcgactttatgatgcaggagttcaaccgtgaatcgaacaccctggcgtcaaaatcgattaacgccgaggtgaccaactccgcgattgagctgaaggtactcatcgagcaaatgcgcgagcaaatccagaatatcgag

SEQ ID NO: 23500 - DNA, 1191 bp, Klebsiella pneumoniae
atgatcggcccccacggcgtcccggtcgaggtacaaattcgtaccgaagacatggaccagatggcggagatgggggtagcggcgcactgggcttataaagagcacggcggcgaaagcagcaccaccgcgcaaatccgcgctcagcgctggatgcaaagcctgctggagctgcagcagagcgccggtagctcgtttgaatttatcgagagcgtaaaatccgatctgttccccgatgagatttacgttttcaccccggaagggcgcattgtcgaactgcctgccggcgccacgccggtggacttcgcctacgcggtgcataccgatatcggtcatgcctgcgtcggcgcgcgcgtcgaccgtcagccctatccgctgtcgcagccgctctccagcggtcagactgtcgaaattatcaccgcgccgggcgctcgcccgaacgccgcctggctgaactttgtcgtcagctcgaaagcgcgcgccaagatccgtcagctgctgaaaaaccttaagcgcgacgattcggtcagccttggccgtcgtctgctcaatcacgcgctgggcggaagccgcaaactcgccgagatcccaccggagaatatccagcgcgaactcgatcgcatgaagctggcctcgcttgacgatctgctggcggaaatcggtctgggcaacgccatgagcgtcgtggtggcaaaaaacctgcagcagggcgaagccgctgcggcgccggtgccggccaacgcgtcgaaccacggtcatctgccaatcaaaggcgccgatggcgtgttgatcaccttcgccaagtgctgtcgtccaattccaggtgacccgattatcgcccacgtcagcccgggtaaagggctggttatccaccatgaatcctgtcgtaacattcgcggctaccagaaagagccggagaaatttatggcggttgagtgggataaagagaccgctcaggagttcatcaccgaaatcaaggtggacatgtttaaccaccagggcgcgctggctaacctgacggcggcgatcaacaccgcgtcttccaatatccagagcctgaatacggaagagaaagatggccgcgtatacagcgcctttatccgcctgaccgcgcgcgaccgcgtgcatctggcgaatatcatgcgcaaaatccgcgtcatgccggacgtgattaaagtcacccgtaaccgaaac

SEQ ID NO: 23501 - DNA, 1008 bp, Klebsiella pneumoniae
atgaaacgagaactggccatcgaattttcgcgtgtcaccgaagccgccgcgctggcgggctataaatggctgggccgcggcgataagaataccgccgacggcgcagcggttaacgccatgcgcattatgcttaacctcgtcaatatcgacggcaccatcgtcatcggcgagggcgaaatcgatgaagcgccgatgctctatatcggcgaaaaagtgggtaccggcaagggcgatgcggtagatatcgccgtcgatcccatcgaaggcacccgcatgacggcgatgggccaggccaacgccctggcggtgatggcggtcggcgataagggctgcttcctcaacgcgccggatatgtatatggaaaagctgatcgtcggcccgggcgctaaaggcgctatcgaccttaatctgccgctggaagagaacctgcacaatatcgcccgcgccctgaacaagccgctgggcgagctgaccgtcaccgtgctggcgaaaccgcgccacgacgcggtcattgcccagctgcagcagctgggcgtgcgcgtgttcgctattcccgatggcgacgtcgcggcctctattctcacctgcatgccggatagcgaagtcgacgtactgtacggcatcggcggcgcgccggaaggggtggtttccgccgcggtgatccgcgccctcgacggggatatgcaggggcgcctgctggctcgccaccacgtgaagggcgataacgaagagaaccgccgcatcggtgaaaatgagctggcgcgctgcaaaaccatgggcattgaagcgggcaaagtgctgcgtctggatgaaatggcgcgcagcgataacgtcgtcttctccgccaccgggatcaccaaaggcgatctgctggacggcatcacccgcaagggcaatatggccaccaccgagacgctgctgatccgcggcaagtcgcgcactatccgtcgtatccagtcgattcattacctcgaccgtaaagatccggacattcagcagcacatcctg

SEQ ID NO: 23502 - DNA, 1056 bp, Klebsiella pneumoniae
atgaaaattaccgacagcatgcagtgcgatatctggtatcaggcgctgcttgaacgcgcggtggaattcaccggcgtttttttcgtcggcgtgaaaaccaccggcgtattttgtatctcggtctgtcgggcgcgaaaaccccggcgggaaaacgtcgaattttataatgactttaaatccgcgctggatgccggcttccggccatgcaaagtctgtcgcccgacggagaatgcccggacggcccccgcctttgttgaacaagcgctccgcctgctgcgagaagctccaaaggtccgcctcagcgatagcgagctacgtcagcacgatattagtccggaacgcgttcgccgctggttcctgcaaaaccacgggatcacctttcaggcttttcaacggatgcagcgtttgaatatggcgcttcaggaattaaaagcaggccgctcaactaccgatgtcgctttcgatagcggttacgagtccttaagcggcttcggctatacctgcaaaaaattgaccggtttcgcacccagcgcacaacgccaggttgttttaattcatcgttttaccaccccgttagggccaatgtttgtttgtgcaacgcaacggggaatttgtctgctggagtttgtcgacagacgagcgctggagtcagaattcagcgacctgcagcggcggttcaacgccagcatcatcgcaggtgaaaatgcccacaccaggcaggcgcaacaggaaataacggagtatttcgccggacagcgtcaatcgttcgaggtggcgcttgataccccaggcagcgagttccagcgagtggtctggcgccgtttacagcaggttagcttcggtgagacgacgcattatcaatcgattgcgatggagataggtaaaccaacggccacgcgcgcggtggctgctgcaaacggcgctaaccgcgtcgcgattatcatcccgtgccatcgaattatcggcaaagatggttcgatgaccggttacggcggcggcattgcacgaaaaatatggcttattaaccatgaggcaaccatcagggaaaaacgcggc

SEQ ID NO: 23503 - DNA, 822 bp, Klebsiella pneumoniae
atgaacgaacagcagccatttgaagcgattagaaagagcgatgaggcggggcgggagtattggtctgcccgcaaccttggtcccctgcttgactataaagagtggcggaatttttataaggtcattgcaaaagcgataatttcatgtgaggcgagtggtcatccctcggcagaccattttgttgaaaccaacaaaatggtcgaattaggttctggcgccagcaggaatcttgaagatttccacctctcacgctacgcctgctatctggtagtgcaaaatagcgatccgtcgaaaccggtgattgctgcggggcaaacgtactttgccttgcaaacccggcgccaggaattgcaagatgatcaaatatttaagtctctacgagaggatgaaaagcgactgttcctgcgcaatgagctcaaagagcataataaacatctggttgaaacggcccaacgtgctggtgttgagacgactctttattttgctgtctttcaaaaccatggttataaaggtctctatggtggtcttgaccaaaaagcaatccatgagcgtaagggcctaaagaaaagccaaaaaatactcgactatatgggatcgactgagctcgcggccaacctgtttcgtgctacccaaacggaagaaaaactacgtcgggacgcggttgattcgaagcaactcgccaacaaaacgcattatgacgtagggcaaaaagtacgccagactattaaagacctgggtggcactatgcctgaagcacttccttccccggagaaaagtattcagcaactcactatcgcagcgaaaaataagaacgcgcctgag

SEQ ID NO: 23504 - DNA, 426 bp, Klebsiella pneumoniae
atgcgtaactacgatttatcccccctgctgcgtcaatggatcggttttgacaaactggccagcgccctgcaaaccgccggtgaaagccaaagcttcccgccctataacatcgaaaaaagcgacgataaccactaccgcattacccttgcgctggccggtttccgtcaggaagatctggatattcaactggaaggcacccgtctggtggtgaaaggcacgccgcagcagccggaaaaagagaccacatggctgcaccaggggttggtgagccaggccttcagcctgagctttaccctcgccgacaacatggaggtctctggcgcgaccttcaccaatggcctgctgcatatcgatctgacccgcaatgagcctgagcagatcgccccgcagcgtatcgccatcagcgaacgaccagcgttaaatagt

SEQ ID NO: 23505 - DNA, 810 bp, Klebsiella pneumoniae
atggctattaaactgattgcaatcgatatggacggcacgctgctgctgcccgaccataccatctctccagcggtgaaagccgccatcgccgcggcgcgcgagcgcggtgttaacgtggtgctgaccaccggtcgcccttacgctggcgtccacagctatttgaaagagctgcatatggagcagccgggtgattactgcattacctacaatggcgcgctggtgcagaaggctggtgacggaagcaccgtcgcgcaaaccgcgctgagctatgacgactatcgcttccttgagcagctctcccgcgaggtcggctcccacttccatgcgctggatcgcaatacgctatataccgcgaaccgcgatatcagctactacaccgtccacgaatcctatgtggcaaccattccgctggtgttctgcgaagcggagaaaatggatcctgagatccagctgctgaaagtgatgatgattgatgagccggcaatcctcgaccaggccatcgcccgtattccggcggaagtgaaagagaagtacaccgtgctgaaaagtgcgccttacttcctcgaaatactggataaacgcgtcaataaaggcactggcgtgaagtcgctggccgatgcgctgggcatcaagccggaagagattatggcgattggcgatcaggaaaatgatatcgcgatgattgaatttgccggcgtcggcgtggcaatggataacgccattcctgcggtcaaagaagcggcgaacttcatcaccaaatcgaaccttgaagatggcgttgccttcgccattgaaaaatacgttttagcg

SEQ ID NO: 23506 - DNA, 1620 bp, Klebsiella pneumoniae
atgctcagtcaaatacaacgctttggcggcgccatgtttaccccggttttgttgtttccttttgcagggatcgtggtcggtatcgccatcatgctgcgcaacccgatgttcgtcggcgaagcgctgaccgcacccgacagcctgtttgcccagatcgttcacatcattgaggagggcggctggaccgtctttcgtaatatgccgctgattttcgccgtcggtctgccgatcggcctggcgaaacaggcccagggccgggcctgtctggcggtgctggtgagctttctcacctggaactattttatcaacgccatggggatgacctggggccacttcttcggcgtcgatttttccgctgaacccacggccggcagcggcctgacgatgattgccgggattaaaaccctcgacaccagcattatcggcgccatcgtcatctccggtctggtgacggccctgcacaatcgctatttcgataaacccctgccggtattcctcggcatctttcagggttcatcgtttgtggtcattgtcgccttcctcgcgatgatcccttgcgcctggctgactctgctcggctggccaaaggtccagctgggcattgaatcgctgcaggcctttctgcgctcagccggggcgcttggggtgtgggtttacatcttccttgagcgcatcctgatccccaccggcctgcaccacttcgtctatggcccgttcatctttggcccggcggtggtggagggcggactgcaggtctactgggcagagcatctgcaggcgttcagtcagagtacggaaccgctgaagacgctgttcccggagggcggctttgccctgcacggtaactcgaaagtgtttggttcggtggggattgcgctggcgctctacttcactgccgcgccggaaaaccgcgtcaaggtcgccggtctgctcatccccgccaccctgaccgcgatgctggtcgggatcaccgagccgctggagttcaccttcctcttcatctcgccgctgctgttcgccgttcacgcggtgctggcggcgactatggcgacggtgatgtacatctgcggcgtggtgggcaacttcggcggcggcctgctcgatcaattcttgccgcaaaactggatcccaatgttccatcaccacgcttcgatgatgttcattcagataggcatcggcctctgtttcaccgccctctacttcgtagtcttccgtaccctgatcctgcgtctgaacctgaagacgcctggcagggaagagagcgaaatcaagctctacagcaaggccgattaccaggcggcacgaggtaaaaccacggccgccgccgcgccagagacccggctgggtcaggccgctggcttcctgcaggccctcggcggcgccgacaacattgaaagcatcaacaactgcgccacccgactgcgcatcgcgctggtcgatatggcgaaaacgcaaagtgacgacgtctttaaagcgctgggcgcccacggggtagtacgccgcggcaacgggattcaggtcatcgtcggcctgcacgttccccaggtgcgcgaccagctggaaaacctgatgaaagattctctttcgaccgaacataccaccatgacggaggcagtatca

SEQ ID NO: 23507 - DNA, 1146 bp, Klebsiella pneumoniae
atgaaaataaccaatatcaccacgtaccgtttacctccgcgttggatgttcctgaagattgaaaccgatgaaggcatcgtcggctggggcgaaccggtgattgaagggcgcgcccgtacggtggaggcagccgttcatgaatttggcgattacctgattggtcaggatccggcgcggattaatgacctgtggcaggtaatgtaccgcggcggcttttatcgcggcggcccgattatgatgagcgccatcgccggtattgatcaggcgctatgggatattaaaggtaaggtcctgaatgccccggtgtggcaactgatgggcgggctggtgcgcgacaaaattaaagcctacagctgggtgggcggcgaccgccccgccgaagtgattgacgggattaagaagctgcgcggcattggtttcgacacctttaaattaaacggctgcgaagagatgggtatcattgataattcccgcgcggttgatgccgcggtgaataccgtggcgcaaatccgtgaagcgtttggcaatgaaattgagtttggtctcgattttcacggccgcgttagcgcgccgatggctaaggtattaattaaagagctggagccatatcgcccattatttattgaggagccggtattagccgagcaggcggaatattatccgcggctggcggcgcaaacccatattcccattgccgccggcgaacgtatgttttcgcgctttgaatttaaacgggtcctggaagcgggcggggtggctattttacaacccgatctgtcgcacgcaggcggtattaccgaatgctataaaattgccggcatggcggaagcctatgacgttgggctggcgccgcactgtccgctggggccgatcgcgctggcagcctgtctgcacgtcgatttcgtttcgcataacgcggtcttccaggagcagagcatggggatccattacaacaaaggcgccgaactgcttgattttgtgaaaaacaaagaagatttcaatatggaaggcggcttctttaaacctctgatgaagccggggctgggcgtggaaattgatgaggcccgcgtgattgagttaagtaaaaacgcgccggactggcgaaatccgttgtggcggtatgaggatggatctgtcgccgaatgg

SEQ ID NO: 23508 - DNA, 1200 bp, Klebsiella pneumoniae
gtgcaaagtgttgatgttgccattgttggcggtggaatggtggggctggcggtagcctgcggtctacagggtagcggcctgcgcgtcgcagtgctggagaaagcagagccgcgaccgctggccgccgatgcgccgccggcgctgcgcgtttcggcaattaatgccgccagcgaaaagctgctgacgaagctggacgtctggcgcgagatcgtcgcccagcgggccagctgctatcacggtatggaagtgtgggataaagacagctttggccacattagcttcgatgaccagagcatgggctttagccaccttggctatattatcgaaaatgccgtagtgcatcatgcattgtggcagaaggcgcagcgttgcgctgacgttaccctgctggctccggcggaacttcagcaggtggcgtggggcgagaatgaagcctttctcagcctgcaggacggcagcatgctgaccgcgcggctggtgatcggcgccgatggtgccaattcatggctgcgcaataaagccgatattccgctgaccttctgggattaccatcatcatgcgttggtggcgaccatccgtaccgctgagccgcatcaggcggtggcccgccaggcgttccatggcgacgggatcctcgccttcctgccgctcagcgatccgcacctgtgctcgatcgtctggtcgctgtcgccgggggaagcgcagcggatgcagcaggctgatgaaaccaccttcaaccaggcgctgaatatcgcgttcgataatcgccttggcctctgccagctggcaagtgaacgtgaagttttcccgctgaccggccgctatgcccgtcagtttgccgcccatcgactggcgctggtcggcgatgccgcgcataccatccatccgctggccgggcagggggtcaacctcggttttatggatgccgccgagcttattgacgagctgaagcgcctgcacgctcagggcaaagatatcggccagcatctttatctgcgccgctacgagcgcagccgcaagcacagcgcggcgctgatgctggcgggcatgcagggcttccgcgaaatgttctccgggagccatccggcgaagaaatttcttcgcgatgtgggactcaaactggccgatacgctgccgggcgtgaaaccgcagctgattcgccaggcgatgggcctcaacgatctgcctgcctggttacgt

SEQ ID NO: 23509 - DNA, 1092 bp, Klebsiella pneumoniae
atggctcaacagactccgttgtatgaacaacacacgctgtgcggcgcgcgcatggtggatttccatggctggatgatgccgctgcattacgggtcccagattgatgagcaccatgcggtgcgcggcgatgcagggatgttcgatgtgtcgcatatgaccatcgtcgatttccacggcagccggatccgcgagttcttgcgctatttgctggccaacgatgtggcgaagctcaccaccccaggcaaagcgctctacaccggcatgctgaccgcctccgccggcgtcatcgacgacctgattgtctatttcctttctgaagattatttccgcctcgttgttaactccgccacccgcgaaaaagacctcgcctggatctccgaacaagctgaaccttacggccttgaaattaccgttcgcgacgatctgtcgctgatcgcggtgcagggcccccaggcgaaagcgaaggcggcgacgctgtttaccgacgctcagcgtcaggccgtggaaggcatgaagccgttcttcggcgtgcaggccggcgacctgtttatcgccaccaccggctataccggcgaagcgggttatgaaattgcgatgccgaacgagcaggcggctgatttctggcgcggtctgctggacgctggcgttaagccgtgcggtcttggcgcgcgcgacaccctgcgcctggaggctgggatgaacctgtacggccaggagatggacgaaggcgtttccccgctggcggcgaacatgggctggactatcgcctgggagcccgccgatcgtaacttcatcggccgcgaagcgctggagatgcagcgtgaaaaaggcaccgagcagctggttggcctggtgatgaccgagaaaggcgtcctgcgcggtggtctgccggtccgttttaccgatagcgacggtaatcaaaaagaaggcattatcaccagcggcaccttctcgccgacgctgggctacagcatcgcgctggctcgcgtgccggccgggattggcgacaccgcggtggtgcaaatccgtaaccgtgaaatgccggtaaaagtgactaaacctggttttgtacgcaatggcaaagccattgtg

SEQ ID NO: 23510 - DNA, 2871 bp, Klebsiella pneumoniae
atgactcagactttaagtcagcttgaaaaccgcgacgcctttattgaacgtcacattggcccggacgctcagcagcagcaagagatgctgaagaccgtcggcgcggattcgcttaacgccctgatcggccagattgtgccgcaggatatccagctggcgaccccaccgcaggtgggcgacgcgactaccgaattcgccgcgctggcggagctgaaggcgattgccagtcgcaacaagcgcttcaagtcttacatcggcatgggctataccgccgtgcagctgccgccggtcattcagcgcaacatgctggaaaacccgggctggtataccgcctataccccttaccagccggaagtatcccagggccgtctggagtcgctgctcaacttccagcaggtcactctggatctgaccgggttggatatcgcttccgcttcgctgctcgatgaagccaccgccgccgccgaagcgatggcgatggccaaacgcgtcagtaaactgaagaacgccaaccgcttcttcgttgccgccgacgtccatccgcaaaccctggacgtggtgcgcacccgcgcggaaaccttcggcttcgacgtcatcgtcgatgacgccgacaaagtgctcgatcaccaggatgtcttcggcgtgctgctgcagcaggtgggcaccaccggggaaatccacgattacagcaaactgatcgccgagctgaaagcgcgcaaagtgattgtcagcgtcgccgccgactttatggcgctggtgctgctgacggcgccgggtaagcagggcgcggatatcgttttcggttccgcccaacgcttcggcgtgccaatgggctacggcggcccgcacgcagccttcttcgcggcgaaagatgaattcaaacgctccatgccggggcggattatcggcgtatcgaaagatgcggcggggaataccgcgctgcgcatggcgatgcagactcgcgagcagcacatccgccgtgagaaagcgaactccaacatttgtacctcgcaggttctgctggccaacatcgccagcctgtacgcggtattccacggcccggcgggtctgaaacgtatcgctggccgcattcatcgtctgaccgacattctggccgatggcctgcagaagaaagggctgaagctgcgccatgcccactacttcgacaccctgtgcgtcgaagtggcggataaagccgcggtgctggcgcgtgccgaagccctgcagattaacctgcgcagcgatattcacggcgcggtgggcattacgctcgatgaagcgaccacccgcgaagatgtgctgaacctgttccgcgccgtcgtcggcgacgatcacggtctggatatcgataccctggataaagacgtggcgctggatagccgttcgatcccggcggcgatgctgcgcgacgatgcgatcctcacccatccggtgtttaaccgctaccatagcgaaaccgagatgatgcgctacatgcacgccctggagcgtaaagatctggcgctgaaccaggcgatgatcccgctgggctcctgcaccatgaaactgaacgccgcggcggagatgatcccgatcacctggccggaattcgctgagctgcacccgttctgcccggtcgagcaggcggaagggtatcagcagatgatcgcccagctttccgactggctggtgaaactgaccggctatgacgccgtctgtatgcagccgaactccggcgcgcagggcgagtatgctggcctgctggcgattcgccattatcacgagagccgcaacgaaggccatcgcgaaatctgcctgatccctagctccgcgcacggcaccaacccggcttccgcgcagatggcgggtatgcaggtagtggtcgttgcctgtgataaaaacggcaacatcgatctcgccgatctgcgtgaaaaagcagagcaggcgggggccaatctctcctgcatcatggtcacctatccgtcgacccacggcgtgtatgaagagaccattcgcgaagtgtgcgagatcgtgcaccagtttggcggccaggtttatctcgacggcgccaacatgaacgcccaggtcgggatcacctctccgggctttatcggcgccgacgtttcgcacctcaacctgcataaaacgttctgcattccgcacggcggcggcggcccgggcatgggcccaatcggcgtaaaagcgcacctggcgccgttcgtgccgggccacagcgtggtacagattgaaggtatgctgacccgccagggcgcggtttccgccgcgccgttcggcagcgcttccattctgccgatcagctggatgtatatccgcatgatgggcgcggaagggctgaagcaggcgagccagaacgcgatccttaacgccaactacatcgctacccggctgaaagacgcctacccggtgctctacaccggtcgcgatggtcgcgtagcgcacgaatgtattctcgatattcgtccgctgaaagaagagaccggcattagcgagctggatatcgccaagcgcctgatcgactttggcttccatgccccgaccatgtctttcccggtagcggggacgctgatggttgagccgacggaatcggaaagcaaggtcgagctggaccgctttatcgacgcgatgctggcgatccgcgcggaaatcgaccgcgtcaaagccggcgaatggccgttggaggataaccctctggtgaacgcgccgcacacccagggcgagctggtgggcgagtggaaccatccgtacagccgcgagctggcggtattcccggcagggttgcacaacaagtactggccgacggtgaaacgtctggatgatgtctacggcgaccgcaacctgttctgctcctgcgtaccgatgagcgaataccag

SEQ ID NO: 23511 - DNA, 1431 bp, Klebsiella pneumoniae
atgaaaaaattaacccttccgaaagattttttatggggcggcgcggtcgccgcgcatcaggttgaaggcggctgggatctgggcggcaaaggccccagcatctgcgatgtgttgaccggcggggcgcacggcgtgccgcgcgaaatcacccaccaggtcgaagcgggaaaatactacccgaaccacgaagccgtcgacttctacggtcgctacaaagaagacatcaaactgttcgccgagatgggcttcaaatgcttccgcacctctatcgcctggacccgcatcttcccgcagggtgacgaaacccagccgaatgaagagggactgaagttctacgacgacatgttcgacgagctgctgaaatacaacatcgaaccggtgatcaccctctcccacttcgagatgcccctgcacctggtgcagcagtacggcggctggaccaaccgcaaagtggtcgatttctttgtacgcttcgccgaagtggtcttcgagcgctataagcacaaagtgaaatactggatgacctttaacgagatcaacaaccagcgcaactggcgcgcgccgctgttcggctactgctgctccggggtggtctataccgagcatgacaatccggaagagaccatgtaccaggtgctgcaccaccagttcgtggccagcgcgctggcggtgaaagcggcgcggcgcatcaacccggacatgcaggtcggctgcatgctggcgatggtcgccctctacccttactcctgcaaaccggaagatgtcatgttcgcccaggagtcgatgcgcgagcgctacgtctttaccgacgtccagctgcgcggttactacccgagctatgtgttgaatgaatgggaacgccgcggcttcaacatcaggatggaagacggcgacgcgcagatcctgcgcgaaggtacctgcgcctatctcggcttcagctactacatgaccaacgcggtgaaagccgagggcggcactggcgacgccatttccggtttcgaaggcagcgtgccgaacccgcacgtcaaagcctccgactggggctggcagattgacccggtcggcctgcgctattctctgtgtgaactgtatgagcgttatcagaagccgctgtttatcgtggaaaacggctttggcgcctacgacaaagtagaagccgacggcagcatcaacgatgactaccgcatcgactacctgcgcgcccacatcgaagagatgatcaaagcggtcacttatgacggcgtcgatctgctgggctataccccatggggctgcatcgactgcgtctccttcaccaccgggcagtacagcaaacgctacggcttcatctacgtcaacaaacacgacgatggcaccggcgacatgtcccgctcgcgcaagaagagctttaactggtacaaagaggtcatcgccagcaacggtgagaacctg

SEQ ID NO: 23512 - DNA, 501 bp, Klebsiella pneumoniae; identical to SEQ ID NO: 19919

SEQ ID NO: 23513 - DNA, 273 bp, Klebsiella pneumoniae; identical to SEQ ID NO: 19918

SEQ ID NO: 23514 - DNA, 877 bp, Klebsiella pneumoniae
ttcaccgtggaatattcagtattaagtaacgctcgcaaaatgccgatgctgggtttcggcgttttcaaggtgaccgataaagcggagtgtaagcaggcggtgttgaacgccattcgcaccggttatcgcctcatcgataccgctgccgtctacgataatgaagatgcggtgggtgaggccgtgcgcgaagccatcgccgaaggtctgtgtacccgcgaggcgctgtttattacctccaaactgtgggtccaggacatggccaacaccgggatggcgaaagccgggattgccgcgtcattaaaaaaatcgggcctggaatactttgatctttatttgctacatcaggcgatgggcgattatttcagcgcctggcgtgcgctggaagaggcctatgaggccggtaccctgaaagcgatcggcgtctccaatttttacccccatgtgttagctaacttctgcgaaactgtcagaattaaaccaatggtgaaccaggttgaactgcatccttatttcgcgcagcccgcggcgctggaagccatgaagcattatcacgttcagcctgaagcgtgggcgccgttaggcggtggcagacataatccgtatcaagatgcattgcttcgggggatcgccgatgcgcaccagaaaaccattgcgcaggttgttctgcgctggaacgtgcagcgtggcgtcacggtgatccctaaatccacccgccaggagcgcattgaagaaaattttgctatctgggatttcgtattaacagataacgaaatggcgcaaatcagcgccctggatttaggctatgttggcgaagcggctaaaacacttcaaccctgagttcgttcgcggatgtctgggggtgaaaatccacgactga

SEQ ID NO: 23515 - DNA, 648 bp, Klebsiella pneumoniae
atgaacactatgaacgtaattattgccgatgaccatccgatcgtactgttcggtattcgtaagtcacttgagcaaattgagtgggtgaacgtcgttggcgagtttgaagactccacggcccttatcaacaatcttccgaagctggacgcccatgtgctgatcaccgatctgtccatgcccggtgacaaatacggcgacgggatcacgctgattaaatacatcaagcgccacttcccggatctgtcgatcattgttctgaccatgaacaacaatccggcgatcctcagcgcggtgctggatctggatatcgaagggatcgtcctcaagcagggggcgccgaccgacctgccaaaagcgctggccgcgctgcagaaagggaagaaattcaccccggaaagcgtctctcgcctgctggaaaaaatcagcgccagcggctatggcgataaacgcctgtcgccgaaagagagcgaagtgctgcgcctgttcgccgaaggtttcctggtaaccgagatcgccaaaaagcttaatcgcagcattaaaaccatcagcagccagaagaaatcggcgatgatgaagctgggcgtcgaaaacgacatcgccttgctgaactacctctcttccgtctcgctgagcgcgacggacaaagag

SEQ ID NO: 23516 - DNA, 2631 bp, Klebsiella pneumoniae
atgagcgaccttgcgagagaaattacaccggtcaacattgaggaagagcttaagaactcttatctggattatgcgatgtcggtcattgttggccgtgcgctgccggatgtccgagatggcctgaagccggtacaccgtcgcgtactttacgccatgaacgtattgggcaatgactggaacaaagcctataaaaaatcagcccgtgtcgttggtgacgtaatcggtaaataccacccgcacggcgactccgcggtatacgacaccatcgtgcgtatggcgcagccgttctcgctgcgttacatgctggtggacggccagggtaactttggttccatcgacggcgactccgccgcggcgatgcgttataccgaaattcgtctggcgaaaatcgctcatgagctgatggccgatcttgaaaaagagacggtcgatttcgtcgacaactatgacggtacggagcgtattccggacgtcatgccgaccaaaattcctaacctgctggtgaacggcgcctccgggatcgccgtagggatggccaccaacataccgccgcataacctgacggaagtgattaacggctgtctggcgtatgttgacgatgaagacatcagcattgaagggctgatggcgcatattcctggccctgatttcccgaccgccgccattatcaatggccgtcgcggcatcgaagaggcctatcgcaccggtcgcggtaaagtgtacatccgcgcgcgcgcggaagtggaagtggacgcgaaatccggccgcgaaaccatcatcgtgcacgaaattccgtatcaggtgaacaaagcgcgcctgatcgagaaaatcgccgagctggtcaaagaaaaacgcgtggaaggcatcagcgcgctgcgtgacgagtctgataaagacgggatgcgcatcgtgattgaagtgaagcgcgatgcggtaggggaagtggtgcttaacaacctctattcccagacccagctgcaggtctccttcggcatcaacatggtagctctgcaccatggtcagccgaagatcatgaacctgaaggacatcatcgccgcgtttgtacgccaccgccgtgaagtggtgacccgtcgtacgattttcgaactgcgcaaagcgcgcgaccgggcgcatatcctcgaagcgctggccgttgcgctggccaacatcgacccgattatcgaactgatccgtcgcgcgccgaccccggcagaagcgaaaacggcgctggttgcccaggcgtgggatctcggtaacgtcgcggcgatgctggagcgcgccggggatgacgccgcgcgtccggaatggctggagccagagttcggcgtgcgcgacggtaaatactatctgaccgagcagcaggctcaggcgattctggatctgcgtctgcagaaactgaccggccttgagcatgaaaaactgctcgacgaatataaagagctgctggagcagatcgcggagctgctgcacattctcggcagcgccgaccgtctgatggaagtgattcgcgaagagctggagctgatccgcgaccagttcggcgacgaacgtcgtaccgaaatcaccgccaacagcgctgatattaacatcgaagatctaatcaaccaggaagatgtggtggtcaccctgtcgcatcaggggtatgtgaagtatcagccgctgaccgactacgaagcacagcgtcgtggcggtaaaggcaaatcggcagcgcgcattaaagaagaagactttatcgaccgcctgctggtggctaacacccatgacaccatcctctgcttctcaagccgcggccgtctgtactggatgaaggtctatcagctgccggaagccagccgcggcgcgcgcggtcggccgatcgtcaacctgctgccgctggaagccgatgagcgcatcaccgccatcctgccggtccgcgagtacgaagagggcgtcaacgtctttatggcgaccgccagcggtaccgtgaagaaaaccgcgctgaccgagttcagccgtccgcgttccgccggtatcatcgcggtcaacctgaacgaaggcgatgagctgatcggcgtcgatctgacctctggtcaggatgaagtgatgctgttctccgcggccggtaaggttgtacgcttcaaggaagacgccgttcgcgccatgggccgtaccgccaccggcgtacgcggtattaagcttgcggaaaacgacagcgtcgtctcgctgattattccacgcggcgaaggcgcgatcctgacggtgacgcaaaacggttacggtaaacgtaccgcggcggcggagtatccgaccaagtcgcgtgccacccagggcgttatttcgatcaaagtcaccgagcgtaacggttccgtggtcggcgccgtgcaggtggatgactgcgatcagatcatgatgatcaccgacgccgggacgctggtgcgtacccgcgtttccgaagtgagcatcgtgggccgtaacacccagggcgtgatcctcatccgcaccgcggaagatgaaaacgtggtgggtctgcagcgcgtggctgagccggtggatgatgaagagctggatgccatcgatggtagcgcggcggaaggcgatgacgatatcgccccggaagcggataccgatgacgacatcgccgaagacgaagaa

SEQ ID NO: 23517 - DNA, 1128 bp, Klebsiella pneumoniae
atggcatacaccactttttcacagacgaaaaacgatcagctgctggaacctatgttttttggccagccggttaacgtggcccgctacgatcagcaaaaatacgacatctttgaaaagctgattgaaaagcagctctccttcttctggcgtccggaagaggttgacgtttcccgcgatcgcatcgactaccaggcgctgccggaacatgaaaaacatattttcatcagcaacctgaagtaccagacgctgctcgactccatccagggccgtagcccgaatgtggcgttgctgccgctgatctccatcccggagctggagacctgggtagaaacctgggccttctccgagaccattcactcgcgttcgtacactcacatcatccgcaacatcgtcaacgacccggcgaccgtgttcgacgacatcgtcaccaacgagcagatccagaaacgtgcggaaggcatctctcactattacgattcgctgatcgagatgaccagctactggcatctgctgggcgaaggcacccacaccgtcaacggcaaaaccgtgaccgtgaatctgcgcgagctgaaaaagaaactctatctgtgcctgatgagcgttaatgccctggaagcgatccgcttctacgtcagcttcgcctgctccttcgcctttgccgaacgcaaactgatggaaggcaacgccaaaattatccgcctgatagcccgcgatgaagcgctgcacctgaccggcacccagcatatgctgaacctgctgcgctccggcagcgacgatccggaaatggcggaaatcgccgaagagtgcaagcaggagtgctatgacctgttcgtgctggcggcgcagcaggagaaagagtgggcggactacctgttccgcgacggctcgatgatcggcctgaataaagatattctctgccagtacgtcgagtacatcaccaatatccgcatgcaggcggtgggcctcgatctgccgttccagacccgctccaacccgatcccatggatcaacacctggctggtctccgacaacgttcaggtggcgccgcaggaagtggaagtcagttcttatctcgtcggccagatcgattctgaagtcgatgccgacgatctgagcaacttccagctg

SEQ ID NO: 23518 - DNA, 1176 bp, Klebsiella pneumoniae
atgaacgatacccgttttgaaagctgcattaagtgcacggtctgtaccaccacctgcccggtaagtcgggtcaatccgcgctatcccggcccgaaacaagcggggccggacggcgaacgcctgcgtctgaaggatggcgcgctgtacgacgaggcgctgaagtactgcattaactgcaagcgctgcgaggtcgcctgcccgtcggatgtgaaaattggcgatatcattcaacgcgcccgggcacagtacggccagcaaaagccgaccctgcgcgacgccatcctcagccataccgacctgatgggtaccctttccaccccctttgcccccctggtcaacgccgccaccggcttaaaaccggtgcgccgtctgctcgacgcgacgctcaacatcgatcaccggcgtacgctgccgaaatatggtttcggcaccttccgccgcgcttaccgccagctcgccgcccgtcagaagcagtacagcgaacaggtggctttctttcatggctgctacgtcaactataaccatccacagttgggtaaagatctgattcgcgtcgtcaacgcgctgggtaccggggtgcagttgttatcaaaagaaaaatgctgcggcgtaccgctcatcgccaacggttttttcgacaaggcgcgtaagcaggcgcagagcaacgtcgccgcgatgcgggaaaacacgctaccgatcattgccacctcctcgacctgcgcctttacgctacgtgatgaatacccccatctcctcgatgtcgataacagcgatcttcgcgatcgggtcgagcttgccacccgctggatctggaaacagctggctgccggcaggacgctaccgctgcgcccgctgccgctgaaggtggtctatcacaccccgtgtcatatggaaaagatgggctggtcgctgtataccctcgagctgctgcggctgatccccggcctgcagctggaggtgctggattcacagtgctgcggcatcgcaggcacctacgggtttaaaactgagaattacgcggtatcccaggctatcggcgccccgctgttccgtcagattgaggagagcggggccgacctcgtcgtcaccgactgcgagacctgcaaatggcagattgagatgtccaccagcaaacgctgcgagcatccgctgacggtgctggcgcaggcgctcgtc

SEQ ID NO: 23519 - DNA, 312 bp, Klebsiella pneumoniae
atgatccgtaaagccttcgtcatgcaggtgaaccccgacgcgcacgaggagtaccagcgccgccataaccccatctggccggagctggaagcagtgctgaaagcgcacggcgcgcaccactacgccatctatctcgataaagaacgccatctcctgttcgcgacggtggagattgaatcggaagcccgctgggaagcggtcgccagcacggaggtatgccagcgttggtggaaatacatgcgcgaggtgatgcccagcaacccggacaacagcccgctgagcgaggagctcaaagaagtgttttatctggcg

SEQ ID NO: 23520 - DNA, 1257 bp, Klebsiella pneumoniae
atgaccactcaacttgaacaagcctgggaaattgctaagcagcgctacgccgccgtcggcgtggatgtcgaggaggccctgcgccagctggaccgtctgcccgtctccatgcactgctggcagggtgacgacgtcgccggtttcgaaaacccggcgggaagcctgaccggcggtatccaggcgaccggcaactacccgggcaaagcgcgcaatgcagaagaactccgcgccgaccttgagcaggcgctgagcctgatcccggggccaaagcgtctcaatctgcacgctatttacctggaatccgacgcgccggtagcgcgcaatgagattaagccggagcactttaaaaactgggttacgtgggcgaaagccaacaaactggggctggatttcaacccctcctgcttctcgcatccgctgagcgccgacggctttaccctgtcgcacgccaacgatgagatccgccagttctggatcgaccactgcaaagccagccgccgcgtatccgcttattttggcgaacagctgggcacgccgtcggtgatgaatatctgggtgccggacggcatgaaggatataaccgttgaccgcttcgccccgcgccagcggctgctgaacgcccttgatgaggtgatcagcgagaagctcgacccggcgcaccatatcgacgccgtggagagcaagctgttcggcatcggcgccgaaagctacaccgtcggctccaacgagttctatatgggttacgccaccagccgtcagacggcgctgtgcctcgatgccggccacttccatccgacggaagtgatttccgacaagatctccgccgccatgctctacatcccgcgcctgctgctgcacgtcagccgcccggtgcgctgggacagcgaccacgtggtgctgctggatgatgaaacccaggccatcgccagcgaaatcattcgccataacctgtttgaccgcgtgcacatcggcctcgacttcttcgatgcctccatcaaccgcatcgcggcctgggtgattggcacccgcaatatgaaaaaagcgctgctgcgcgccctgctggaaccgaccgcccagctgcgccagctggagaacgacggcgattacaccgcccgcctggcgctgctcgaagagcaaaaatcgctgccgtggcaggccatctgggagatgtactgtcagcgtcacgacacgccggcgggcagccagtggctggacagcgtacgggcttatgagaatgcggttctgagccagcgcggg

SEQ ID NO: 23521 - DNA, 504 bp, Klebsiella pneumoniae
gtgatgcgcaatgttatcgctgccgtcatggcctcaacgctggcgctaagtgcatatagccaggccgctgaagtcgttaccagcgttaactggctccccggagacgaagggggacagcgcggtagccaaagccatatgtttgacggcataagtttaaccgagcagcaacgtcagcagttacgggatcttatgcaacgggcacgccacgacaggctccccgttaatgttagcgaaatggagacaatgcatcgccttgtcaccgcagaaaattttgatgaaaacgctgtgcgcgctcaggcagaaaagatggcgcaggaacaggttgcccgccaggtcgagatggctaaggttcgcaaccagatgtaccacctgcttacgccagagcagcaagcggttttaaatgctaagcaccagcagcgtatggatcagttgcgtgaggttgcaaggatgcagaaaggctcagcgatgatgctttcgagtagtagcaacaccctgcaaccccag

SEQ ID NO: 23522 - DNA, 399 bp, Klebsiella pneumoniae
atgcagacacaaattaaagttcgcggctatcatctggacgtctaccagcatgtgaacaacgctcgctacctggagttcctcgaggaagcccgctgggatggcctggaaaatagccccgcgtttcagtggatgatggagaaaaacatcgccttcgtggtggtgaatatcaatattaactatcgtcgtccggcggtactgggcgatgtgctgacggtgagcagcaaactggagcaactcaacggcaaaagcggcaccctaagccaggtggtcaccctcaaccccaatggcgaagtagtggccgatgcgctgattaccttcgtttgtatcgatttgaaaacccagaaggcgctgccgctggaaggggaattgcgtgcgaaacttgaccagatgaacctgcgc

SEQ ID NO: 23523 - DNA, 489 bp, Klebsiella pneumoniae
atgaaatttgcctatatgtttagtgccttagccgtcgccgcgacgctgaccgcctgtgctaatcaccactcgaacaattcttcgacgcaggcggccgcgcccgacccttacggtatcgcgacgctgagcgtggcgcagcagcagccgagcgtcacggggacgattaatatccgccagagaatcgctttaccgccggatgcggtactgacggtgaccctgtcggatgcttctctggcagatgcgccagcccgcgtattgtcgcaaaaagcggtgcgtaccgaaggcaaacaggcgccatttaactttgcgctgccttacaacccggcagatattcaaccgaacgctcgcattctgctaagcgcggcgatcacggttaacggccagttgatgtttattaccgataccgtgcagacggtaataaaccagggcggcactcatgccgacctgacgctggttccggtccagcagaccgccgttcctgtcgcccag

SEQ ID NO: 23524 - DNA, 861 bp, Klebsiella pneumoniae
atgaacgatttcacttcccttctgcagcagggcaatgcctggctgtttatacccagcgcaatactgctcggcgcgctgcacggcctcgaacccgggcactcaaaaacaatgatggccgcctttatcgtggcggtacgaggaacgttaaaacaggcggtgctgctggggctggcggccacggtttcgcatacggcggtggtctggctgatcgccatggccggcctatggtttggccgcggctggaacgcccaaacctctgaaccctggtttcagctggtctcagggattgtcattgtgctgattgcctgctggatgctctggcgcacctggcgcgaatcgcagccccacacgcaccatgatcaccaccatgaacatgagcaccgccacgaacatgatcatcaccacgaacatgatcatcaccccgaacattatcaccgccatgaccatcaccatgcgtcctcatccgccgcgccgctggtggcggaggagtggcaggacgcgcatcagcgggcccatgcccaggagatcaaccggcgctttgatggccgccaggtgacgaccgggcagatcgtactgtttggcctgaccggcgggctgatcccctgcccggcgtccattaccgtgctgcttatctgtttacagctgaagaaattctccctgggcgccacgctggtgctgggctttagcgttggtctggcgctgacgctggtggcttccggggccatcgccgccctgagccttaaacatgccacccgccgctggccgtggcttaacgacctctcgcgcaaggcgccctggttctcaggcttactgattattgtggtggggatctacatgatgcttcatggcctgagcggcctg

SEQ ID NO: 23525 - DNA, 342 bp, Klebsiella pneumoniae
atggtatgctggcaggcgttgctgaccacgcaggtcggtaatcccggacagaatgaaacggtggatcgtgcaatgtcacatacagttcgacacaaaaagatgttactgacccggctgaagaaaattcaggggcagagtaccgcgttagagaaaatgcttaatcgcgagcatgagtgcgctgaaatattacagcagctggcggcgatccgcggcgcggtcaacggcatgatgctgcaggttattcaggggcatcttaccgaccatgtggtgaaagagcctgacgagacgcagcgcgaagcggatctggagacggtgatgcaggtgattaaatcctatctgaag

SEQ ID NO: 23526 - DNA, 759 bp, Klebsiella pneumoniae
aggcacctgcgctcaccgcgcaacagcatgctggacgccctcaattccgaagcgattcaggttcactatcaggccgattatttcgttgcaggacgggaaaattgccggggcggaggccctggcccgctggcagcagcccgatggcacttttttatcgccggatatctttattccctggccgagcagaccgggctcatcacgcagctgacggaagatatcgtcaggaaaatttttgccgatctcggcccctggctgcggcagcggccggaagtgcacatctccatcaacctgtcggtagatgatttacgctcgcccaccctgccgacgttgttgcacaatcagctacagcactggggaatcgccgccgaacagatcatccttgaaatcaccgagcgcggttttgtcgacccggagacgactatgccggtgatcgctcactatcgtcaggccgggcatcggatctcgattgatgactttggcaccggctactccagcctgagctatctgcagaaactggacgtcgacacgctgaaaatcgataaatcttttgtcgataccctcgagtaccggccgctgacgccgcacattattgaaatggccaaagcgctcaatctggccaccgtcgccgaaggggtggaaaccgaaagccagcgcgactggctgcgccagcatggcgttcagtacgcccagggttggctttacagcaaagcgctgccaaaagagcagttcattctgtgggcagagcataacctccatgcg

SEQ ID NO: 23527 - DNA, 1443 bp, Klebsiella pneumoniae
ttgaggtgccggatggccgctaagcgccccttttccctggccacccggctgaccttctttattagcctcgccaccatcattgctttctttgccttcacctggatcatgatccattcggtgaaggcccactttgaagagcgcgacgttcacgatctcagacagctcagcaccaccctggagacggtcctcgaccacgctgactacccgccagcgcgacggctggagatcgtgaagaatatcattgcgggctacgccaacgtcttcatctgcctggacgatggccagggcaatattctcttccagtcgcccaacgggccggatctcagccatatgctgagtacgccggggctggcgatgcagctgcgcgacgggaatgtgatttcatggaccgatccgcagccgcgggcaatggcgcacgataatcatccactggagacccgcgcctggcggttgatcatgctgccgctgggcaagcaggcggacggtaaaccggcgtaccacctgctgatggccttatccatcgattttcacctgcactatattaatgagctgaaagcgaagctgatctccgcggcgtcgataatcagcctgctgatcatcgccatcgtgctgtttgtggtctaccaggggcataagccgatccgccagatcagtcgccagatccagaatattacctcgcgggatctcgatgtgcgccttgacccgcaggcggtgcctgtcgagctggagcggctggcgctgtcgtttaaccatatgctggagcgcatagaggatgtctttacccgccagtccaacttctccgccgatatcgcccatgaaatccgcacgccgattaccaacctggtgacgcaaaccgaaatcgccttaagccagagccgcagcccgcaggagctggaagaggtgttgtattccaatctcgaagagttctcgcggatgtcgcggatggttagcgatatgctgttcctcgctcaggcggataataaccagctgatccctgagcaacaggcgctggatctggccgaggaagtgcataaggtgtttgagttctttgaggcgtgggcggaagagaaagcggtggcgctgcgttttgtcggtagccattgccgggtgacgggcgatccgctgatgctgcggcgggcaatcagcaacctgctgtcgaacgcgatccgctatacgccggccggccaggcggtgaccatccagttgagcgaaagcgcggagacggtacgcctggtggtggagaaccccggtacgccgattgccgccgagcatctgccgcgcctgtttgaccgtttctatcgcgtcgacccctcgcgccagcgcaaaggggagggcagcggcatcggcctggcgattgtgaaatcgattgtcggagcccaccacggcagcgtggcggcgcagtccgatctgcgctcgacgcggtttattgtggtgttgccgaaa

SEQ ID NO: 23528 - DNA, 1317 bp, Klebsiella pneumoniae
atgcaaacctatttcgaccaggttgatcgcgttcgctttgccggacccaaaaccgataatccgctggcgtttcgccactataatccggatgaaatcgtgctgggaaaacgcatggccgatcatctgcgttttgccgcctgttattggcataatttctgctggaatggcgcggatatgtttggcgccggttcgtttgagcgtccctggcaggccgcgggcgatgcgctggaaatggccaaacgcaaagcggacgtggcgtttgaatttttctacaagctcaacgtgccgtattactgcttccacgatgtcgacgtctcgccagaaggcgcgtcgctgaaagaatatctgcacaatttcgccatcatgaccgaggtgctggcggaaaaacagcagcaaaccggcgtgaaactgctgtggggcaccgccaactgctttacccacccgcgctacggcgccggggcggcgactaaccccgatccggaggtgtttgcctgggcggccacgcaggtggtgaccgccatgaacgctacccaccagctcggcggcgaaaactatgtgctgtggggcggccgcgaaggttacgagtccctgctgaataccgacctgcgtcaggagcgcgagcagattggccgcttcctgcagatggtggtggagcacaagcataagattggctttggcggcgcgctgcttatcgagccgaaaccgcaggagcccactaagcatcagtacgattacgatgtcgcaacggtgtatggtttcctgaagcagtttggtctggaaaatgagatcaaggtgaacattgaagccaaccacgccactctggcggggcactctttccaccatgaaatcgccagcgccatcgcgctgggcattttcggctccgttgatgccaaccgcggcgatgcgcagctcggctgggataccgatcagttcccgaacagcgtggaagaaaataccctggtgatgtacgagatcctcaaagccgggggattcaccaccggcggcctgaactttgacgccaaagttcgtcggcagagcaccgacaaatacgacatgttctatggccatattggcgccatggacgtgatggcgctgtccctcaagctggccgcgcgcatgattgaggatggcaagctcgatcagggtctggcaaaacgctatgccggctggcagggcgagctggggcagaaaattatgagcgggcagatgtcgctggataatattgcccgatacgctgagcagcataatctgaatccgcagcctcagagcgggcgtcaggaattactcgaaaatctcgtcaatacctatatctttggt

SEQ ID NO: 23529 - DNA, 1239 bp, Klebsiella pneumoniae
atggatatcactcagttttcgcaaattaacccgccgcagcgcctgctgatggggccggggccgatcaatgccgacccgcgcgtgctgcgcgccatgtcgagccagctggttggccagtacgatccggcgatgacccactacatgaatgaagtcatggcgctctaccgcggcgtgtttcgcaccgaaaatcgctggacgatgttggtcgacggcacctcgcgcgccgggatcgaagcgattctgctgtcggcgatccgtcccggtgacaaggtgctggtgccggtgttcggccggtttggtcatctgctgtgcgagatcgcgcgtcgctgccgggcagaggtgcacaccatcgaggtgccgtggggtgaggtctttacgccggatcaggttgaggatgcgatcaagcgcgtgcggccgcgcctgctgctcaccgtgcagggcgatacctccaccaccatgctgcagccgctggcggagctgggagagatttgccgtcgtcacgatgtgctgttctataccgacgccaccgcgtcgctcggcggtaacccgctggaaaccgacgcctggcagctggacgccgtgtccgccgggatgcagaagtgcctgggcggtccttccggcacctcgcccatcaccctcagcccgcggatggaagaggtcatccgccgccgccgctgcattgagcaggggatccgcaccgatgcccatcacgatggcgtcgacgagatgatctactccaactatttcgatctcggcatggtgatggattactgggggccggagcgccttaaccaccataccgaagcgacctcggcgctgttcgccgcccgggagtgcgcgcgcctgatcctccaggagggactcgacaacggcatcgcccgccacaaactgcacggcgatgcgctgctgaagggcatccaggcgatggggctcgagacctttggcgacctgcggcacaaaatgaataacgtgctgggggtggtgatccccaacggggtcaacggcgatcaggtacgcaaactgatgctggaagatttcggtattgaaattggcacctcgtttggtccgctgcacggtaaagtctggcgcattggcaccatgggctataacgcgcgtaaagactgcgtgatgcagacgctcagcgcgctggaagcggtcctgaactacctcaggttcaccaccactcagggcgcggcgatgcaggcggcctgggatcactaccgcaccgaggccacccta

SEQ ID NO: 23530 - DNA, 1395 bp, Klebsiella pneumoniae
atgacacttcaccatttcaccatcgccgagatccagcgtgcgctgcacgatggcgaactgagcgcccgggagatcgcccgccagacgctggacgatatcgcccgcgtgaatccgcagatcaacgcctggaccgaggtcaccgcccagcgcatgctggcggaggccgacagcatcgacgccctgcgccgggaaaagcgccccctgccgccgctggcaggcattccttacgcagtgaaaaatctgtttgatgtcgccgggcataccaccctcgccggcgccgaactgctgagcgaccggccgccagcgaccagcgacagctgggcggtgcgccagctgcacagcgccggcgccctgctcagcgggatgctcaatatggacgcctacgcctacggcttcaccaccgaaaacagccactatggcgcgacgcgcaacccgcacgatctgtcgcggatcgccggcggttcttccggcggttcggccgcggcggtggcggccgggctggttcatttcagcctcggcagcgacaccaacggctcgatccgcgtccccgcgtcgctgtgcgggatctttggcctgaaacccactttcgggcgcctgtcgcgctctggcagccatccgtttgtcgccagtctggatcatattggtccttttgcccgccgggtagccgacctcgccgcggtgtatgacgccctgcaggggcgccgaccggccgatgactttcaggctgataaagccagcgagcgcaccggcaatctgctggaacgcggactggaggggctgcgctgcgcgcggctgggcggctatttcaccacctggtgcgatgacgacgcccgggcggccgtggatcgggtcgcccacgcgctgggcgccgacagcgagctgcagttcgcggatgccgcgctggcccgctcggcggcctttatcatcagcgccagcgaaggcggcaatcagtacctgacggatcttcgccactcgcccgagcgctttgaacctcactcccgcgagcggctgctggccggcgcgatgatcccctccgcgtggtatctgcaggctcagcgttttcgccgtcatgcccgtcaggcaatgaaatccctgttcagccaggccgacgtgctgatcgccccggccaccccatgcagcgccacgccaataggcgcggaggagatggtgattaacggccagccgctgccggtgcgcgccagcatgggaatgctgacgcagccgatctccttcctcgggctgccggtggtgaccgtgcccctgcgtaccgccagcggcaagccgattggcctgcagctgattgccgcgccgtttaacgaacaagcctgtcttcgcgccgcgcgggcgctggaagcgatgggcattaccgatgcccgagtggcggagagtgcagca

SEQ ID NO: 23531 - DNA, 1155 bp, Klebsiella pneumoniae
atgattattacaacagcgctggctaatgaaattgtcgcccgggcaatggcgataattcatcataacgtgaatgtgattgaccatcatggacagatcattgcctcaggtgaacggcatcgtatcggcgaacagcatgaagtcgcccgggaggtaatacgcaccgggaaacgcatttgtattaacaacgccgcggaagccgcgcgttttcacaacgtgcatcctggtattaatcatcccattatctatgacgatcgcgtggtgatggtggtaggcatcagcggcgatcccgcggcgataagccgctatgctgaactggcggtgctcaccgccgaactgctggtccgccaggccatagagatgcgggaaaccaactggcggcaacgtctgcgtgacaccttgttttgtcagtatctggaacaaggggctacgcccgccgggcaagaagcgcttcatcgcctgctggaacttggtttcgattttgatacaccgcgggttccgatcgtagtgaccgtgcaggtcgaacagcatcagttaagcgacatactgagtacgctgttgcgggaattctcgcagctctccggcgtaagtgacgttattttgctgggcagccatgaaatattgatcctcaacgcgctaagcgaagcccaggaaactctgctgcggggcattgagtttgtactgagtaatcagataagccattaccatatcgggattggcgtgcaggcggacagcgccccggacattcgcgaggccattcggttcgcccgctcggtgatcgaagtgggtagcaaagtgcagccgcagcggcagatctactactttcgcgaaatggcaatgctctgcctgttcagggtgctggaagacagctatatggtcaatttttttatcaataacgtacgccagctgcttgagcatgattccggcgaagtgctgctggataccctgagcagctttattgccaataatgccgaaccgggcaaaacgtcgctgctgttggggattcatcgtaatacgctcacctatcggctgcagcaaattaaaaagcatatacagctcgatccgatggtcttcaccgacctgacgcagctggcggtgtcggtacactgttatcgccggctgaatccgcgccagagcgaatggattgatagcttaagc

SEQ ID NO: 23532 - DNA, 273 bp, Klebsiella pneumoniae; identical to SEQ ID NO: 19918

SEQ ID NO: 23533 - DNA, 927 bp, Klebsiella pneumoniae
atgagtattcgcataatcccgcaagacgagctgggttcgagcgagaaacgcacggcggaagcaattccgccgttactgttccccaggctgaaaaatctgtataaccgccgcgctgaacgcttgcgcgagctggccgctaataacccgctaggcgattacctgcgctttgccgcgctgattgcccatgcccaggaagtagtgctgtacgaccatccgctgcagatggatctcaccgcccgcattaaagcggccagcgaacagggcaagccgccgctggatatccacgtcctgccgcgcgacaagcactggcacaagctgttgcactcgctgattgccgagctgaagccggagatgagcggcccggcgctggcggtcattgagaatctggaaaaagcctctgagcaggagctggagcagatggccagcgcgctgtttgtttccgatttcgcctccgtcagtagcgacaaagcgccgtttatctgggctgcgctgtcgctctactgggcgcagatggccagtctgatcccaggaaaagcgcgcgccgaatacggcgaacagcgccagttctgcccggtgtgcggctcgatgccggtctccagcatcgtgcaaatcggcaccactcaggggctgcgctatctgcactgcaacctgtgcgaaactgagtggcacgtagtacgcgtcaagtgcagcaactgcgagcagagccgcgacctgcactactggtcgctggacaacgagcaggcggcggtgaaagccgaaagctgcggcgactgcggaacctacctgaagattatgtatcaggagaaggatccgaaagtcgaagccgtcgccgacgatttggcctccctggtgctcgacgcccgcatggaacaggagggcttcgccagaagctcaattaacccgttcatgttccccggcgaaggggag

SEQ ID NO: 23534 - DNA, 501 bp, Klebsiella pneumoniae; identical to SEQ ID NO: 19919

SEQ ID NO: 23535 - DNA, 633 bp, Klebsiella pneumoniae
atgaaaagacgtgacaccatcgtgcgctacacggcgccggaacgcatcaaccactgggtcaccgccttctgcttcgtcctggcggcggtgagcgggttaggctttttcttcccgtcctttaactggctgatgcatatcctcggcacgccgcagctggcgcgaattctccacccgttcgtcggggtagtgatgttcgcgtcgtttatcatcatgtttttccgttactggcatcacaacctaatcaatcgggatgatatcttttgggcgaagaatattcgtaagatcgtcgtcaacgaggaggtgggcgataccgggcgctataacttcggccagaaatgcgtattctgggcggcgattatcttcctggtactgctgctggtgagcggtgtgatcatctggcgtccgtattttgcgccggctttctcaatcccggtgatccgatttgcgctgatgctgcattcatttgccgcagtggcgttaattgtggttatcatggtgcatatctacgccgccctctgggtgaaaggcaccattaccgcgatggtggaaggctgggttaccaaaacgtgggcgaagaaacatcacccgcgctggtaccgagaggtccgccagaaacaggaaaagtcatctgaa

SEQ ID NO: 23536 - DNA, 1251 bp, Klebsiella pneumoniae
atgctggaacaaatgggcattgccgccaaagcggcctcctggcagctggcgttactctccagccgggaaaagaatcaggtactggaaaagatcgccgattatctggaagcgcagaccgacgatattctgcgcgccaacgcggaagatttagccgaagctcgcgccaatggcctgagtgaagcgatgctcgatcgcctcgcgctgaccccggcgcgtctgagcggcatcgccaacgatgtgcgccaggtgtgcaatctggccgatccggtcggccaggtgatcgacggcgggctgctggacagcggtctgcgtattgaacgtcgccgcgtcccgctgggggtgattggcgtgatttatgaagcgcgtcccaacgtgacggtcgacgtcgcctccctgtgcctgaaaaccggcaacgcggcgatcctgcgcggcgggaaagagacctggcgcaccaacgccgccacggtgaaggtgatccagcaggcgctgcaggagtgcggtctgccggccgccgcggtacaggctatcgagagcccggatcgcgcgctggtgggcgaaatgctgaagatggataaatacatcgatatgctgatccctcgcggcggcgcgggcctgcacaagctatgccgtgagcagtcaacgatcccggtgatcaccggtgggattggcgtgtgccatatcttcgtggatgaaaccgccgagatcgcccccgcgctgaagatcatcgtcaacgccaagacccagcggccgagcacctgcaataccgtggaaacgctgctggtgcaccgcaacatcgccgacaccttcctgccggcgttgagcaagcagatggccgagagcggcgtcaccctgcacgccgccccttccgccctccccgcgctgcaaaacggcccagcgaaggtcgagccggtgaaagcggagcagtatgacgacgagtatctgtcgctggatctgaacgtcaaagtggtggctgatatggacgaggctatcgcccatatccgcgaacatggcacccagcactccgacgccatcctgacccgcaccctgcgtaacgccaaccgctttatcaatgaagtggactcttccgcggtatatgtgaacgcctccacgcgcttcaccgacggcggccagttcggcctcggcgcggaagtggcggtcagcacccagaagctgcacgcccgcggcccgatggggctggaagcgttaaccacctataagtggattggtttcggcgacgataccattcgtgcg

SEQ ID NO: 23537 - DNA, 3812 bp, Klebsiella pneumoniae
taccgtctgggcgaaccggtttttgacgttaaagaatgtcagatccgtggcgtgacttattctgcaccgctgcgcgtaaaactgcgtctggtgatctacgagcgcgaagcgccagaaggcaccgtcaaagacattaaagaacaagaagtctacatgggcgaaattccgctcatgaccgacaacggtacctttgttatcaacggtaccgagcgtgttatcgtttctcagctgcaccgtagcccgggcgtcttctttgacagtgacaaaggtaagacccactcctccggtaaggttctgtataacgcacgtatcatcccttaccgcggttcctggctggacttcgaattcgacccgaaagacaacctgttcgttcgtatcgaccgtcgtcgtaagctgccggctaccatcatcctgcgcgcgctgaattacaccactgagcagatccttgacctgttcttcgaaaaagtggtctttgaaattcgcgacaacaagctgcagatggagctgattccggagcgtctgcgcggtgaaactgcctccttcgatatcgaagccaacggcaaagtgtacgttgagaaaggccgtcgcatcacggctcgtcatatccgtcagctggaaaaagacgatatcaagcatatcgaagtgccggttgaatatatcgcgggcaaagtggcggctaaagactatatcgatgaagcgactggcgaactgatctgcccggcgaacatggagctgagcctggatctgctggctaagctgagccagtctggccacaagcgtatcgaaacgctgttcaccaacgatctggaccacggcccgtacatctctgaaacggtacgcgtcgacccgactaacgatcgtctgagcgcgctggtagaaatctaccgcatgatgcgccctggcgagccgccgactcgtgaagccgctgaaagtctgtttgagaacctgttcttctctgaagaccgctacgatctgtccgcggttggtcgtatgaagttcaaccgttctctgctgcgcgacgaaatcgaaggttccggtatcctgagcaaagacgacatcatcgaagtgatgaagaagctcatcgatatccgtaacggtaaaggcgaagtggacgatatcgaccacctcggcaccgtcgtatccgttccgttggcgaaatggcggaaaaccagttccgcgttggcctggtacgtgtagagcgtgcggtgaaagagcgtctgtctcttggcgatctggataccctgatgcctcaggatatgatcaacgccaagccgatttccgcagcagtgaaagagttctttggttccagccagctgtctcagtttatggaccagaacaacccgctgtctgagattacgcacaaacgtcgtatctccgcactcggaccaggcggtctgacccgtgagcgcgcaggcttcgaagttcgagacgtacacccgacccactacggtcgcgtatgtccgatcgaaacgcctgaaggtccgaacatcggtctgattaactccctgtccgtgtacgcgcagaccaacgaatatggcttccttgagacgccgtatcgtaaagtgaccgacggtgtggttactgacgaaattcactacctgtctgctatcgaagaaggcaactacgttatcgctcaggcgaactccaacctggatgaaaacggccacttcgtagaagatctggttacctgccgtagcaaaggcgaatccagcttgttcagccgcgaccaggttgactacatggacgtatccacccagcaggtggtatccgtcggtgcgtccctgatcccgttcctggaacacgatgacgccaaccgtgcattgatgggtgcgaacatgcaacgtcaggcggttccgactctgcgcgctgataagccgctggttggtaccggtatggaacgtgctgttgccgttgactccggtgttactgccgtggctaaacgtggcggtaccgttcagtacgtggatgcttcccgtatcgttatcaaagttaacgaagacgagatgtacccgggcgaagcaggtatcgacatctataacctgaccaagtacacccgttctaaccagaacacctgcatcaaccagatgccttgcgtgtccctgggcgaacctattgagcgcggcgacgtgctggcagacggcccgtccaccgacctcggtgagctggcgctgggtcagaacatgcgtgtagcgttcatgccgtggaacggttacaacttcgaagactccatcctcgtttccgagcgtgttgtccaggaagaccgtttcaccactatccacattcaggaactggcgtgcgtgtcccgtgacaccaagctggggccggaagagatcaccgctgacatcccgaacgtgggtgaagctgcgctctctaaactggatgaatccggtatcgtttatatcggtgcggaagtgaccggcggcgacattctggttggtaaggtaacgccgaaaggtgaaacccagctgacgccggaagagaaactgctgcgcgcgatcttcggtgagaaagcgtctgacgttaaagactcttctctgcgcgtaccgaacggtgtctctggtaccgttatcgacgttcaggtctttacccgtgacggcgtagaaaaagacaaacgtgctctggaaatcgaagagatgcagctgaagcaggccaaaaaagacctgtctgaagaactgcagatcctcgaagccggtctgttcagtcgtatctacgcggtgctggtctccggtggcgttgaagctgagaagctcgacaagctgcctcgcgatcgctggctggaactgggcctgaccgacgaagagaaacaaaatcagctggaacagctggctgagcagtatgacgaactgaaacacgagttcgagaaaaaactcgaagcgaaacgccgtaaaatcacccaaggcgacgatctggcaccgggcgtgctgaagattgttaaggtatatctggccgttaaacgccgtatccagcctggtgataagatggcgggtcgtcacggtaacaagggtgttatctctaagatcaacccgatcgaagatatgccgcacgatgctaacggtacgccggtagatatcgtactgaacccgctgggcgtaccgtctcgtatgaacatcggtcagatccttgaaactcacctgggtatggctgcaaaaggcatcggcgataagatcaacgccatgctgaaacagcagcaggaagtcgcgaaactgcgcgaattcatccagcgtgcttacgatctgggcgctgacgttcgccagaaagttgacctgaataccttcagcgatgaagaagttctgcgtctggctgaaaacctgcgtaaaggcatgccgatcgcaacgccggtattcgacggtgcgaaagaagctgaaatcaaagagctgctgcagctgggcgacctgccgacttccggtcagatcaccctgtttgatggccgcaccggtgaacagttcgaacgtccggtaaccgtgggttacatgtacatgctgaaactgaaccacctggtcgacgacaaaatgcacgctcgttccaccggttcttacagcctggttactcagcagccgctgggtggtaaggcacagttcggtggtcagcgcttcggtgagatggaagtgtgggcgctggaagcatacggcgcggcctacaccctgcaggaaatgctcaccgttaagtctgatgacgtgaacggtcgtaccaagatgtataaaaacatcgtggacggcaatcaccagatggaaccgggcatgccggaatccttcaacgtactgttgaaagaaattcgctcgctgggcatcaacatcgaactggaagacgagtaa

SEQ ID NO: 23538 - DNA, 4221 bp, Klebsiella pneumoniae
gtgaaagacttattaaagtttctgaaagcgcaaactaaaaccgaagagtttgatgcgatcaaaattgctctggcttcgccagacatgatccgttcatggtctttcggtgaagttaaaaagccggaaaccattaactaccgtacgttcaaacctgagcgtgacggccttttctgcgcccgtatctttgggccggtaaaagattatgagtgcctgtgcggtaagtacaagcgcctgaaacaccgcggtgtgatctgtgagaagtgcggcgttgaagtgacccagactaaagtgcgtcgtgagcgcatgggccacatcgagctggcatgtccgactgcgcacatctggttcctgaaatccctgccgtcccgtatcggtctgctgctggatatgccgctgcgcgatatcgaacgtgtactgtactttgaatcctatgtggttatcgaaggtggcatgaccaacctcgaacgcaaccagattctgacggaagaacagtacctggacgcgctggaagagttcggtgacgaattcgacgcgaaaatgggcgcggaagcgatccaggcgctgctgcgcaatatggatctggagcaggaatgcgagcagctgcgtgaagagctgaacgaaaccaactccgaaaccaagcgtaaaaagctgaccaagcgcattaagctgctggaagctttcgttcagtctggcaacaagccggagtggatgatcctgaccgttctgccggtactgccgccagatctgcgtccgctggttccgctggacggtggtcgtttcgcgacgtctgacctcaacgatctgtatcgtcgcgtgatcaaccgtaacaaccgtctgaaacgtctgctggatctggctgcgccggatatcatcgtacgcaacgaaaaacgtatgctgcaggaagcggttgacgccctgctggataacggtcgtcgcggtcgtgcgatcaccggttctaacaaacgtcctctgaaatctttggccgatatgatcaaaggtaaacagggtcgtttccgccagaacctgctcggtaaacgcgttgactactccggtcgttctgttatcaccgtaggtccatacctgcgtctgcatcagtgcggtctgccgaagaaaatggcgctggagctgttcaaaccgttcatctacggcaagctggaactgcgtggcctggccaccaccatcaaagccgctaagaagatggttgagcgcgaagaagctgtcgtttgggatatcctggacgaagttatccgcgaacacccggtcctgctgaaccgtgcgccaaccctgcaccgtctgggtattcaggcattcgaaccggttctgatcgaaggtaaagccatccagctgcacccgctggtttgtgcggcatacaacgccgacttcgatggtgaccagatggctgttcacgtaccgctgacgctggaagcccagctggaagcgcgtgcgctgatgatgtctaccaacaacatcctgtccccggcgaacggcgaaccaatcatcgttccgtctcaggacgttgtactgggtctgtactacatgacccgtgacagtgttaacgccaaaggcgaaggcatggtgctgactggcccgaaagaagctgagcgtatttatcgcgccggcctggcctctctgcatgcgcgcgttaaagtgcgtatcactgaatacgaaaaagacgacaatggtgagtttgtcgcgaaaaccagcctgaaagacacgaccgttggccgtgccattctgtggatgatcgtaccgaaaggtctgccgttctctatcgtgaaccaggcgcttggtaagaaagcgatctccaagatgctgaacacctgttaccgtattctgggtctgaaaccgaccgttatttttgcggaccagacgatgtacaccggctttgcttacgcagcgcgttcaggtgcatccgttggtatcgatgacatggtcatcccggagaaaaaatacgaaatcatcagcgaagcggaagcggaagttgctgagattcaggaacagttccagtccggtctggtgaccgcgggcgaacgctacaacaaagttatcgatatctgggctgcggcgaacgatcgtgtatccaaagcgatgatggataacctgcaaaccgaaaccgtgattaaccgtgacggtcaggaagagcagcaggtttccttcaacagcatctacatgatggccgactccggtgcgcgtggttctgcggcacagattcgtcagctggctggtatgcgtggtctgatggcgaagccggatggctccatcatcgaaacgccgatcaccgcgaacttccgtgaaggtctgaacgtactccagtacttcatctctacccacggtgctcgtaaaggtctggcggataccgcactgaaaacagcgaactccggttacctgactcgccgtctggttgacgttgcgcaggacctggtcgtcactgaagacgactgcggcaccctggaaggcatcaccatgacgccggttatcgaaggtggcgacgttaaagagccgctgcgcgatcgcgtactgggtcgtgtgactgcggaagatgttctgaagccgggtaccgcggatattctggttccacgcaacacgctgctgcatgagcactggtgtgacctgctggaagcgaactccgttgactccgtcaaagtgcgttccgttgtatcctgtgacaccgactttggcgtctgcgcgcactgctatggtcgtgacctggcgcgtggccacctcatcaacaaaggtgaggctatcggtgttatcgcggcacagtccatcggtgagccgggtacacagctgacgatgcgtacgttccacatcggtggtgcggcatctcgtgcggctgctgaatccagcatccaggtgaaaaacaaaggtagcatcaagctcagcaacgcgaagtcggttgtgaactccagtggtaagctggttatcacttcccgtaataccgagctgaagctgatcgacgaattcggtcgtaccaaagagagctataaagtaccttacggtgcggttatggcgaaaggcgacggtgagcaggtagccggcggtgaaaccgtcgcaaactgggatccgcacaccatgccggttatcaccgaagttagcggtttcatccgtttcactgacatgatcgacggccagaccattactcgtcagactgacgagctgaccggtctgtcttcgctggtggttctggactctgcagaacgtaccgcaggtggtaaagatctgcgtccagcactgaaaattgttgatgctcagggcaacgacgttctgatcccaggcactgatatgcctgctcagtacttcctgccgggtaaagcgattgttcagctggaagatggcgtacagatcagctctggtgacaccctggcgcgtattccgcaggaatccggcggtaccaaggatatcaccggtggtctgccgcgcgttgcggacctgttcgaagcacgtcgtccgaaagagccggctatcctggctgaaatcagcggtatcatttccttcggtaaagaaaccaaagggaaacgtcgcctggttatcaccccggtagacggtagcgagccgtacgaagagatgatcccgaaatggcgtcagctcaacgtgttcgaaggtgaacgtgtggaacgtggtgatgtggtttccgacggtccggaagcaccgcacgacattctgcgtctgcgtggcgtacatgctgtgacccgttacattgttaacgaagtccaggacgtataccgtctgcagggcgttaagattaacgataagcacatcgaagttatcgttcgtcagatgctgcgtaaagccaccatcgaaagcgcaggcagctccgacttcctcgaaggcgagcaggtggaatactcccgcgtcaagatcgcgaaccgcgaactggaagcgaacggcaaagtgggcgcaacgttctcccgcgatctgctgggtatcaccaaagcgtctctggccaccgagtccttcatctccgcggcatcgttccaggagaccactcgcgtgctgaccgaagcagccgttgcgggcaaacgcgacgaactgcgcggtctgaaagagaacgtcatcgtgggtcgtctgatcccggccggtaccggttatgcgtatcaccaggatcgtatgcgccgtcgcgctgctggcgagctgccggcggcaccgcaggtgagcgtggaagaagcgtctgccaacctggcagagctgctgaacgcaggtctgggcggttctgacaacgat

SEQ ID NO: 23539 - DNA, 633 bp, Klebsiella pneumoniae
atgtatcaacctgattttccacccgtcccgtttcgtctcggactctacccggtggtggacagcgtggcgtggattgagcgcctgctcgaagctggggtacgtacccttcagttacgcatcaaagaccggcgcgacagcgaagttgaggatgacgtgatcgccgccatcgcccttggtcgccgctatcacgcccgactgttcattaacgattactggcaactggcgattaagcaccaggcctatggcgtgcatctcggacaagaagatctggaaaccaccgatctgagcgctatccgccaggccgggctgcgtcttggcgtctctactcacgatgatatggaaattgatgtcgcccttgcggcacgcccctcttacatcgcgctaggtcacgtcttcccgacgcaaaccaaacagatgccttccgcgccgcagggcctcgagcagcttgccagacatattcaacgcctggcggattaccccaccgtggcgatcggcggaattagcctggaaaaggcgccgggggtactggcgaccggcgtcggcagcatcgcggtggtcagcgccatcacccaggcggcggactggcgggcagcgaccgaccaactgctggcgctggcgggagcgggcgatgaa

SEQ ID NO: 23540 - DNA, 270 bp, Klebsiella pneumoniae
atgaacaagactcaactgattgatgtaattgcggacaaagctgacctgtccaaagcacaggctaaagctgccctggaatctaccctggctgcaattactgagtctctgaaagaaggtgatgctgttcaactggttggtttcggtaccttcaaagtgaaccaccgcgctgagcgtactggccgcaacccgcagaccggtaaagagatcaaaatcgctgcagctaacgtgccggcatttgtttctggcaaagcactgaaagacgcagttaag

SEQ ID NO: 23541 - DNA, 1887 bp, Klebsiella pneumoniae
atgggcttcctgcagctattgatcggccgcgataagtacagtatttccgcctcgacggtcggtgacgaaccgttgaacccggcgcaccgtacggcgctgataatgccgatctgtaacgaagacgttgaccgcgttttcgccggcctgcgggcgacctgggagtcggtgaaagcgaccggtaacgccgctcatttcgacgtctatatcctcagcgatagctataaccccgatatctgtgtggctgagcaaaaggcgtggatggagctgattgccgaagtgcagggcgaagggcagatcttctaccgccgccgtcgtcgtcgagtgaagcgtaagagcggcaacatcgatgacttctgccgccgctggggcagccagtatagctatatggtggtgctggacgctgactcggtgatgaccggtgagtgtctgagcagcctggtgcgcctgatggaagcgaacccgaatgccgggatcatccagtcttccccgcgcgcctcgggcatggacacgctgtatgcgcgttgccagcagtttgccacccgggtgtacggtccgctgtttacggcgggtctgcacttctggcagttgggggagtcccactactggggccacaacgccattatccgcgtgaagccgttcattgagcactgcgcgctggcgccgctgccaggcgagggcaactttgccgggtcgatcctgtcgcacgacttcgtcgaagccgcgctgatgcgccgtgccggctggggggtgtggattgcctacgatctgccgggctcctatgaggagctgccgccgaacctgctggacgagctgaaacgcgaccgtcgctggtgtcagggcaacctgatgaacttccgcctgttccttgtcagagggatgcacccggttcaccgggcggtgttccttaccggcgtgatgtcctacctgtcggcgccgctgtggtttatgttccttgccctgtcgacggcgttgcaggtggtgcatgcccttaccgaaccgcagtacttcctgcagccgcgtcagctgttcccggtgtggccgcagtggcggcctgagctggccatcgcgctgttcgcctcgaccatggtgctgctgttcctgccgaagctgctgagtattattctggtgtggtgtaaagggccgaaagagtacggcggatttatccgcgtcacgctttcactgctgctggaggtcctgttctcggtcctgctggcgccggtccgtatgctgttccacacggtcttcgtggtcagcgccttcctcggctgggaggtggtatggaattcgccgcagcgtgatgatgactccacgccgtggggggaagcctttatgcgccacggctcgcagctgctgctggggctggtgtgggcggtcgggatggcatggctggatctgcgcttcctgttctggctggcgccgatcgtcgtctcgctgatcctctccccgttcgtatcggcgatttccagccgggcgacagtgggcctgcgcaccaagcgctggaagctgttcctgatcccggaagagtattcgccgccgcaggtgctcaaggataccgatgcgtacctgacgatgaaccgtcagcgttcgctggacgatggctttatgcacgcggtgtttaacccgtcgtttaacgccctcgccaccgcaatggccactgcgcgccaccgtcaggggcatatcctggagatcgcccgcgagcgccatgtcgagcaggcgctgaatgaaacgccggataagctgaaccgcgatcgtcgactggtgctgttgagcgacccggtaactatgtcgcgtctgcactatcgcgtatgggccgcgccggagaaatactcttcatgggtgaacgcctatcagcagttggcgcttaacccgctggcgctgaaaacgaaa

SEQ ID NO: 23542 - DNA, 249 bp, Klebsiella pneumoniae
atgcgcattgaagtgtctatcgccaaaacgaccgccttacctaacggcgcgctggaagcgctgaataacgaactctctcgccgtatcgccgagcaattcccggccatcgatagccaggtgagcgtccgctacgccaccggtaatcagctctcggtgtttggcgccctgaaagaagacaaagaccggataagcgaaatcctgcaggaaacatgggaaagcgcggacgactggtttgtccacgatctctcc

SEQ ID NO: 23543 - DNA, 1224 bp, Klebsiella pneumoniae
atgtcgtctgctgaaacccccattaactggaaacgaaacctgaccgtgacctggcttggctgctttttaaccggcgccgccttcagcctggtcatgccctttctgccactctacgtcgaacagctcggcgtcaccgggcatagcgccctgaacatgtggtccgggctggtctttagtattacctttcttttctctgccatcgcctcgccgttctggggggggcttgctgatcgcaaggggagaaaaatcatgctgctgcgttccgccctcgggatggccatcgtgatgatgctgatgggaatggcgcagaatatctggcagtttctgctgctgcgcgcactgctcggcctgctgggcggctttattcccaacgccaacgccctgattgccacccagatcccgcgccataaaagcggctgggcgctggggacactgtctaccggcgcggtaagcggcgccctgctcggcccgctggcaggtggcttcctggccgaccactggggattgcgcaccgtcttctttatgaccgcggcggtactatttatctgtttcttgtttaccctgtttttaatccgcgaaaattttgtgccgatcgccaggaaagagatgctcagtgccagagaggtgttctcttcgctgcagaatcccaaactggtgctcagcctgtttgtgacctcgctgataatccaggtggccaccggttccattgcgccgatcctgacgctttatgtacgcgatctcgcgggcaacgtcagtaacatcgcctttatcagcggaatgatcgcctcggtgccgggcattgccgcgctgatgagcgccccgcggctgggcaaactgggggatcgcatcgggccggaaaaaatcctcatcgtcgcgctgattatctcggtgctactcctgatcccgatgtcgttcgttcagaccccgctgcagttaggtatcctgcgattcctgctcggcgccgcggacggcgcgctgctgccggcggtgcaaaccctgctggtgtacaactcgaccagccagatctccgggcgaatcttcagctataaccagtcgttccgcgatattggcaacgttaccggccccctgattggcgcgtcggtttccgctaactatggcttccgcgctgtatttctggtcaccgcaggggtggtattgtttaatgcgatctactccaccctcagcctgcgtcggccagccgcggatacttcgcattcagtaaat

SEQ ID NO: 23544 - DNA, 1044 bp, Klebsiella pneumoniae
atgacagcacaatcccaggtattgaaaatccgccgcccagacgactggcatatccatctgcgcgatgacgatatgctgaaaaccgtcgtgccttataccagtgagttttatggccgggcgatcgtgatgccgaatctggtgccgcctgtcaccaccgtcgcggcggctatcgcttaccgccagcgcattatggacgccgtgccggccgggcatgattttaccccgctgatgacctgctatctgacagactctctcgacccagcggagctggaacgcggctttaacgaaggggtgttcaccgccgccaagctctacccggccaatgccactactaactccagccacggcgtcaccagcaccgacgccattatgccagtgctggagcggatggaaaaactggggatgccgttgctcgttcacggcgaagtcactcacgccgagattgatattttcgatcgtgaagcgcgctttattgagacggtgatggagcccctgcgccagcgcctgcccggcctgaaagtggtttttgaacatatcaccaccaaagacgccgccgagtacgtgcgtgacggtaatgaactgctggctgctaccatcaccccgcagcatctgatgttcaaccgcaaccatatgctggtgggcggcattcgccctcacctgtactgtctgccggtacttaaacgcaatattcatcagcaggctctgcgggagctggtcgccagcggcttcagccgcgccttcctcggcaccgactccgcaccgcacgcccgccaccgtaaggaagccagctgtggctgcgccggctgctttaacgccccgaccgccctcggcagctacgccacggtgtttgaagaaatgaacgctctgcagcactttgaggctttctgctcgctaaacggcccgcgcttctacggtctgccggtcaatgagagctacgttgaactggtgcgtgaagagacgaccgttgtggacagcattgccctgcctaatgacaccctggtgcccttcctggcgggtgaaaccgttcgctggaccgtgaagaaa

SEQ ID NO: 23545 - DNA, 558 bp, Klebsiella pneumoniae
atgaaaaagatattgatcgccgccgcgctaattgtcagcggcctgctgagcggctgtaatcagctgacccaatacacggtaagcgagcaggagattaaccaggccctgcagaagcgaaaccatttcgccaaagatattggtctgaaaggcgttgccgacgcccatatcgaactgcagaacctgaccagcgctatcgggcgcgaggagccgggcaaagtcaccctgagcgggatcgccaacgtcgatcttaactccctgttcggtacgcagaaagcgacgatcgatctgaagctcaaagcgctgccaacctttgaccgagagaaaggcgccatcttcctgcaggaaatggaagtggtcgatgccaaagtggcgccggagaagctgcagtcggttattcaggccctgctcccctacctgaatcagtctctgcgcagctacttcagccagcagccggcttatgtcctgcgtgaggacgccagcaccggcgaagcgctggcgaagaaatacgccaaaggtatagaggtgaagccaggcgagattgtcatcccctttaccaat

SEQ ID NO: 23546 - DNA, 1062 bp, Klebsiella pneumoniae
atgccagtgttacacaaccgcatttcaaatgagacgttaaaggcgcaaatgctggctgaaaccgagccgcgcacgacgatctcgttctataaatatttcactattgtcgacccgcaggcgacccgtgatgcgctgtgggttgccttaacccagctgaaggtctttggccgcatctatctggcccgggaagggatcaacgcgcaaatcagcgtgccgcaaagcaacgttgaggctctgcgtgagtttctctatggcttcgatccggcgctggcggggctgcgtttcaatatcgctgtggaggacgatggtaagtctttctgggtgctgcgcctgaaagttcgcgatcgtatcgtcgccgacggcatcgacgatccctcgtttgacgcctccaatgtgggggagtatctcaaggcggcggaagtcaacgcgatgcttgacgatccggatgccgtgtttatcgatatgcgcaaccactatgaatatgaggtgggccatttcgaaaacgcgctggagatcccggcggataccttccgcgaccagctgccgaaagccgtggaaatgatgcaggaccataaagacaagaaaattgtcatgtattgcaccggcggcattcgctgtgaaaaagccagcgcctggatgaagcataacggcttcaataaggtctggcacatcgagggtggcatcatcgagtacgcccgtcgcgcccgcgagcaggggctgccggtgcgtttcattggtaaaaactttgtctttgatgagcggatgggcgagcggatctccaatgacgttatcgcgcactgtcatcagtgcggcgcgccgtgcgacacccatactaactgcctgaacgatggctgccatctgctgtttatccagtgcccgagctgcgccgagaagtttgccggctgctgtagcgaagcctgcatggaagagcataagctaccggaagaggagcagcgtaagctgcgcgccgggcgtgaaaacggcaacaaaatctttaataaatcccgtggccggctgaataccaaactcgggatcctcgacccggagccgtcagaaaaacca

SEQ ID NO: 23547 - DNA, 1116 bp, Klebsiella pneumoniae
atgcaatacgatcttatcattattggcagcggctccgtcggcgccgccgctggctattatgcgcgccgtgccggactcaatgttctgatgaccgatgcccatcaacctccccaccaggaaggcagccatcacggcagcagccgtcttatccgtcacgcctatggcgaaggtgagaaatatgttccgctggtgctgcgtgcccagcagctatgggatgaactggcagagatcagtggcgaagccgtgtttgaacgcaccggcgtcattaacctcggccccgccagctccgcttttctcgccaacgtcgccgccagcgcccgtgcgttccagcttgaggtggaagagctggatgcccaggccgtgatgcagcgctggccggagatacgcctccccgatgactatcgggcgattttcgaacccgcttccggcgtactgcgcagcgaactggccgtcgaaacctggatccgtctggcgcgggaagcaggctgcgcgcagctattcaactgtccggtctcggctattcatcaccatgctgacgggatcaccatcgataccctcgacggtgaatatcatggtaaaaagctgctggtcagcgccggcacctgggtcacccgcctgcttccggacctccctatccagccggtacgcaaggtgttcgcctggtaccaggccgatggccgttacagcagcaagaatcacttcccggccttcaccggcgagttgcccaatggcgatcaatattacggtttcccggcggaagataatgaactgaaaattggcaagcataacggcggccagccgatctccaccccgcaggaacgggtagcgtttggcgctgtcgccagcgatggttccgaatccttcccgtttttgcgtaacgtcctgcctggcatcggcggctgcctgcacggcgcctcctgtacctacgacaataccgtcgatgaggactttattatcgatacgttgccaggcaggccagacacgctgctgatcaccgggctgagcggccacggctttaagtttgcgccggtgctgggcgaaattgccagtcagtttgctcagggcgaagcatcgagcttcaatctggcccccttttctctggcgcgctttaacgcg

SEQ ID NO: 23548 - DNA, 623 bp, Klebsiella pneumoniae
atgatgctctgcgaagcgctatatgtggatgaaaaaatatgtctgatcttatcctcgcgtcaacctctccctggcggcgcatgctgctggaaaaactgggtttaccgtttgaatgtgccgcgcctgacgtcgacgaaacgccccggcctgatgaatccgcacgtcagcttgtcacccgactggcgcaggccaaagcgcaaagtctggccacacgcttccctaatcaccttattataggctccgatcaggtttgcgtactggacggtgaaatcaccggcaaaccgcacaccgaggaaaatgcccgcaggcagttaagaaaggccagcgggtcaatcattaccttttataccggactggcgctgtacaactctgccagcggccatctgcaaaccgaatgcgaaccctttgacgttcactttcgccatctcagtgataaagagatagaaggctatgtgcgcaaagagaacccgctgcagtgcgccgggagtttcaagagcgaaggattgggcattacgctgttcgaacggctggaaggccgcgacccgaacaccctggtcggtttacccttaatcgcgctctgtcagatgttgcgccgtgaaaactacaacccgctgttaggctga

SEQ ID NO: 23549 - DNA, 921 bp, Klebsiella pneumoniae
gtggggacaagattgcgcattggggtggtcggcttaggcagcattgcgcagaaagcgtggctgccggtgctgggggcggcggaaagctggacgctgcaggcggcctggtcgccgggtaaagagaaggcgctgcggatctgcgaaacctggcggatgccatacgctgattccctcgatgccctggcggcacagtgcgatgcggtctttgtccatacctcgacggcttcacattatgaagtagtgaatcacttactgaatgccggggttcatgtttgtgtggataaaccattggcggacaagctgagtgaggcggagacgctggtcgagctggcggcgcgacgtcgactgacgttgatggtcggttttaatcgccgcttcgcgccgctctatcgggagctgaaggggcggctgggcgaggcggcctcgctgcggatggataaacaccgtagcgatagcgtcggcaacgatctgcgctttacgctgcttgatgactatctgcacgtggtggataccgcgctatggctggccgacggtcaggcacgtctgcgcggcggcgcgctgaagatcaccccgcaaggcgaaatgctctatgccgaacatcagttcagttcgccccggctgcaggtcaccaccagcatgcatcgtcgcgcaggcagccagcgcgagtgggtgcaggcggtcacggatggcgggctatatgccgtcagcgagatgcgcgaatggcaggaggagtgcggtcatggcgtggtccagcgcccggttgccggctggcaaaccacccttgagcagcgcggctttgtcggctgcgcgcgccattttatcgaatgcgtgcaaaatcagacagttcctgaaactgcaggcgaacaggcgctgctggctcagcggatcgttgagaaactgtggcgcgacgccattagcgaa

SEQ ID NO: 23550 - DNA, 1572 bp, Klebsiella pneumoniae
ttgcgggcgttttactccagggtttggaataacagcgtaatgaaccttttaaaatcactggcggcagtcagttcgatgaccatgttttcgcgcgtgctgggctttgcccgcgatgcgattgtggcgcgtatttttggcgccgggatggcgaccgatgccttttttgtcgccttcaaactgcctaacctgctgcggcgtatttttgccgaaggcgccttctcacaggcgtttgtgccgatccttgccgaatataaaagcaagcagggcgaagatgccacccgcgtgtttgtctcatacgtctccgggctgctgaccctggccctggctatcgttaccgttatcgggatgctggcggcgccgtgggtaatcaccattactgcgcccggctttgccgataccgccgataagtttgcgctaaccacccagctgctgcgtattacctttccctatattttgctgatctccctggcttcgctggtgggggcgatcctcaatacctggaaccgcttttcggtgccggcctttgcgccgacgttcctcaacgtcagtatgattggctttgcgctgtttgccgcgccgtatttccatccgccggtgctggcgctggcctgggcggtgacggtcggcggcgtgctgcagctggcttaccagctgccgcatctgaagaagattggcatgctggtcctgccgcgaattaatctgaaagatgccggcgcgatgcgagtggtgaagcagatggggccggcgatccttggcgtgtcagtaagccagatctcccttatcatcaataccattttcgcctcattcctcgtgtcgggctcggtgtcgtggatgtattatgccgaccgcctgatggagtttccctccggcgtgctgggcgtggcgctcggcactatcctgctgccatcgctgtcaaaaagcttcgccagcggtaaccatgacgagtattgccggctgatggactggggactgcgtctctgttttctgctggcgctgccgagcgcggtggcgctggggatcctcgccaaaccgctgaccgtggctctgttccagtacggcaaattcagcgcctttgacgcggcgatgacccagcgcgcgctggtggcttattccgtagggctgatgggccttatcgtggtgaaagtgctggcgccgggcttctattcacgtcaggacatcaagaccccggtcaagattgctattatcaccctgattatgacccaggtaatgaacctggcgtttatcggcccgctgaagcatgcgggtctgtcgctgtccatcggcctggcggcctgcctgaacgccgcgctgctctactggcaactgcgtaaacagaaaattttcaccccgcagccgggctggttggccttcctgctgcgtctgattattgcagtgctggttatggccgcggcgctgctgggcgtcatgcatctcatgcctgagtggtcgctggggacgatgccgttccgtctgatgcgtttgctggcggtggttatcgccggggtggtagcctatttcgccacgctgctggtgctgggcttccgcgtgaaagagtttgtccgtcgcacggcg

SEQ ID NO: 23551 - DNA, 607 bp, Klebsiella pneumoniae
cgtttcaccgtcaaacagatcgtctggctgaaggttttacttcaccttgcggggtttttgccgctggtctggttattctgggccgggcaccagggctactttagcgccgatccagccaaggatatccagcactttaccggcagaatggcgcttaagtttctgctggcgacgctgctggtctctccgctggcgcgctatgcgaagcagccattattgattcgcgttcgtcggctgttaggtttatggtgttttgcctgggcgacgctgcacctgaccagctataccctactggagctgggcattaacaatctggctctgctgggctcggagattatcacccgcccctatctgacattgggcatgatcagctgggcgattctgctggcgctggcggtgacctccacgcaagcgatgcagcgaaaactggggcgtcgctggcaacttttacacaacttcgtctatctggtggcgatcctcgcgccgatacactacctgtggtcacgtgaagatcgtctcgccgcagcccgttatatatgccctgctggcagcggggctattgacatggcgttacaagaagttccgccagtggtggcgctcaatccggtaa

SEQ ID NO: 23552 - DNA, 2910 bp, Klebsiella pneumoniae
ctctcccatgataagcaaagctgggccttttatattcccgatacgcggatcgctatcgatgataaaccctggccaagcggagccctggcgatggcgtggatcccggcgcaggacgttggtggcgacgatcgtcagcgtagcgatgagttacgtattcgcgccagcaatttggccctcagcggcctgagcgggttacagccgtttgctgataagctggcgccttctctgggcgaactctggcgtaccacgcagcctggcggcaaaatcaatttgctggctctcgatatccccctgcaggcgacggagaaaacgcgttttcaggcgcagtggagcgatctggcgtggaagcagtggaaactcctgcctggggcagagcacttctccggcagtctgaatggcagcgttgagcacggggaattacgcgcccatatggcgaaggcgctgatgccgtatgccggcgtcttccgcgcgccgctggagatagccgctggcgaagccacgctcagttgggtgaaaaacgacaaagggtttatgcttgatggccgcgatatagacgtgcaggcgacaggcgtacgcgcccgcggcggcttccgctatctgcaaccgcagggggacgatccctggctgggcattctggcgggcatcagcaccaatgacggtggccaggcatggcgttatttcccggaaaatctgatgggcaaagcgctggtggactatctcagcggcgcgattaaagcagggcaagccagcgatgcgacgctggtgtatggcggcaatccgcatctattcccttatccgcataatgaaggccagttccaggtttatgttccgctgaagaacgccacttttgccttccaaccggactggccggcgttaaccgggctgaacatcgacctcaattttatcaacaacggcctgtggatgcgggcggataaagcgatgcttggcaacgtgaccgccagcaatctcgatgccgcgatcccggactatgcgcaggaaaaactgctgattgatgccgatatcaaaggcccgggcaaagaggttggaccttactttaatactacgccgctgaaagagtcgctcggggcggcgctggattccctgcagctggatggggatgtgagcgctcgcttacatcttaatatccccctcgacggcgagatgaccaccgcgaaaggcgatgtgcgcctgcagaataatagcctgtttatcaaaccgttagatactacgctgcagaacctgagcggtaatttcagctttgtgaatggcgatctcaatagtcaaacgttgagcgcgacctggtttaatcagccgctgaacctcaatttttccacccgcgaaggtgaaaaagcgtttctggtggatgtcgggatgaatgccaactggcagccgtcgcgcaccgggctgctgccgaaagccgtgagtgaggcgttgagcggtagcgtcccgtgggatggcaaggtcgctatcgaactgccgtaccatggcaatgccagctataaggtcgatatcaacggcgatctgaagaatgtgagcagtcgcttaccttcgccagtcagtaagcccgccggcgaaccccttccggtcaaaattaacgtcgccggcggccttagcagcttcgacctgaccggctccatcggggcgaagaatcatattaacagccgctggttgctcaatcataagctgacgctggatagagcgatccttaccactgacagcaaagggtactctccgctgcccgatcagtccggtatcgagctcaatctgccgccgatggatggcgcgcagtggctggcgctcttcgagaacggcgcggcaaatgaagtgagcagcagcgtgctctttccaccgcgcattgtgctgcgtacgccgtcgctggccctcgcgggtcaacagtggaacaacgtcagtctgatgtcacagccggtcgccggcggctcgcaggttgaggcgcaggggcgtgagatcaatgccacattgacgatgcgcgacaatgctccgtggctggcaaatgtgcgttatctctatttcaatccggccagcgccagcggccagaacgcaacagagaatgtggccccccagacggcgacgcggctggatttccatggctggcccgatctgcagctacgctgcgcggaatgctggctgtggggacaaaaatatggccgcatcgatggggatgtggcgatcaaaggggataccttaacgctctccaacggcctggtggataccgggtttggccggctgacgaccaacggcgtgtgggtgaacgccccttcaggggttcgaacctcgctgaaaggcagactgcacggcaataagacggatgcatttgcggatttctttggcgtctccacgccggtgaaggattcgccgtttgatatcgactacgatctgcactggcgcgcgccgccctggtcacccgatgtcgcgtcgctcaatggcatcattaaaagccacctgggcaaggggcagtttaccgacctgagtaccgggcacgctggtcagctgctgcgtctgctgagtgtggatgccctgctgcgtaaactgcgtttcgatttcagcgataccttcagcgaaggcttttacttcgattcgattaacagtacggcatggattaaggatggcgtactgcataccgatgatacgctggtggatggccttgaagcggatattgctatgaaagggtcggtcgatctggtgcgtcgccagctggatctgcaggcggtggtggcgccggagatctccgcgaccgtcggcgtggcggcggcctttgccgtcaaccccatcgtcggcgcggcggtatttgccgccagcaaagtgctgggtccgctgtggaataaagtttcgattctgcgctaccgcatcaccggcccgattgaccagccgcagatcaatgaagtgctgcgc

SEQ ID NO: 23553 - DNA, 1449 bp, Klebsiella pneumoniae
atgcagtttgaggtcattattcccctgatcgcctacctggtggtggtgttcggtttatccctctacgccatgagaaaacgcgcctcaggtagctttcttaatgagtactttctcggcagccgctcgatgggcggcttcgtgctggccatgacgctaaccgccacctatatcagcgccagctcatttatcggcggacccggcgccgcctataaatacggcctgggctgggtgctgctggcgatgatccagctccccgccatctggctgtcgctgggcgtgctggggaaaaaattcgccatccttgcgcgtcgctataatgctgtcaccctcaatgacatgctgtttgcgcgctatcagagtcgcctgctggtctggctggccagcctgagtctgctggtggcctttgtcggcgccatgaccgtccagtttatcggcggcgcccgcctgctggagacggctgccggtattccttacgataccggcctgctgatcttcggggtcagcatcgcgctgtataccgcctatggcggctttcgcgccagcgtgctcaacgacacgatgcagggcatggtaatgctgatcggcacgatcgtgctgctggtgggcgtgatccacgccgccgggggggttggccatgcggtagagacgctgcagtcgatcgacgtcaagctggtgtccccgcagggcgcggaggatatcctctcgccaacctttatggcctcgttttgggtactggtctgcttcggcgttattggtctgccacataccgcagtgcgctgtatctcctacaaagacagcaaagccgtgcatcgcggcatcattatcggcaccatcgtggtggcgatcctgatgtttggcatgcatctggctggggcattaggccgggcggtgatccccgatttaaccgtgccggatctggtgatcccgacgctgatggttaaagtgcttccgccctttgccgccgggatcttccttgccgcgccgatggcggcgattatgtcgacgatcaatgcccaacttctgcaaagttccgctacgatcatcaaagatctgtacctgaactggcggccggatcaggcgactaacgaaaagcggcttaaacgcatgtccgccggcatcacgctcctgctgggggtcttgttgctgctcgcggcctggcggccgccggagatgataatctggctgaacctgctggccttcggcggcctggaagccgtcttcctgtggccgctggtgctgggcctttactgggaacgcgccaacgcggctggcgcgctgagcgccatgatcgtaggcggcgtcctgtatgccgtactggccacgctgaaagtgcagtttctgggctttcacccgatcgttcccgcgctgctactgagtttgctggcgtttgtggcggggaaccgtttcggtcgtcccgccccacagccccccattttgactactgataaa

SEQ ID NO: 23554 - DNA, 1938 bp, Klebsiella pneumoniae
atgcgattaacgacgaagttctcagcctttattacgctgctaactagcctgaccatctttgtcacgctgattggcgcttcgctgagtttttataacggcattgagaacaaggtcgaaaaccgcgttcaggcggtggcgaccatgctggataaccggctcatcaccacctctttcgataagcttgaaccgcagttggatgagctgatgacgccgatcgagatcgtgcatatcgatttcatgctcaacggcaaaccgctctacagccattcccgacccgatagctatcgcccgctcggcagccatgagcaattccgtgagatcacggttcagtcgcttaaacatcctggtattacgctgcatctggtctacgttgacccgatggtgaactatttccgttcgctgtcgatcactgccccgctgtcgatctccattggcttcatggtggtaattattttcttcgccgtccgctggatccgccgccagctggccggccaggagctgctggaggtgcgttccacgcgtatcctgagcggcgagcgcgggccgcaggtgcgcgggtcggtctatgaatggccggccagcaccagtagcgcgctggatatgctgctgtcggagctgcagttcgccagcgatcagcgcagccggatggatacgcttattcgctcctacgcggcgcaggattcgaaaaccggactgaataaccgcctgttttttgacaatcagctggccacgctgctggaagaccaggagaaggtgggagcctacggcatcgtgatgatgatccgtctgccggagtttgatctgctacgggacaactggggacgggcggcggccgaagaacattactttacgcttatcaacctgctctctacctttattatgcgttaccccggcgcgctgttggcgcgctatcaccgtagcgacttcgccgtgctgctgccgcaccgtacgttgaaagaggcggatagtatcgccggcctgttgctgaaggcgatggatgcgctgcctccaacgcgtatcctcgatcgcgacgatatgatgcatatcggcatctgttctttccgcagcgggcaatcggcggcgcaggtgatggaacatgcggaagcggcgacgcgcaacgcggtgctgcagggcagcaacagctggtcggtctatgatgacacccttccggagaaaggtcgtggcaacgttcgctggcgaacgctgatcgaacagatgctgagccgcggcgggccgcggttgtaccaaaaaccagctgtcacccgcgacgggcgggtacatcatcgtgaactgatgtcgcggatgtacgacggtaaagaagaggtgattgcagcggaatacatgccgatggtgctgcagtttggcctggcggaggagtatgaccgcctgcaggtaacgcgcctgctgccgtttttaggcttctggcccgaggagaatctggcgctccagctgtcggtggagtcgctgatccgtccgcgtttccagcgctggctgcgcgatgccttgatgcagtgtgaaaaatcgcagcgtcagcggattatttttgaacttgcagaggcagatgtttgtcaatatatcggccgtctgcagccggttatgcgattggttaacgctctgggcgttcgggtggcagtggttcaggcggggttaaccctggttggaaccagctggatcaagcagctggatgcggagctgatcaaactgcatccgggtctggcgcgcaacatcgaaaagcgcagcgagaaccaactgctggtgcaaagcctggtggaagcctgtaaaggcatgcctatgcaagtttttgcgacgggcgtacgcagccgcagcgagtggttggtactgtcccaatgcggtgtcacgggcgggcagggggaattttttgccgcctcacagccacttgacacaaatgtgaaaaaatattcgcaaagatactcggtt

SEQ ID NO: 23555 - DNA, 1041 bp, Klebsiella pneumoniae
atgttaaaaaaatttcgtggcatgttttccaatgacctgtccattgacctgggtaccgcgaatacccttatttacgtaaaaggacaaggcatcgtattgaatgagccttccgtggtggccattcgtcaggatcgtgccggatcgccgaaaagcgtcgccgccgtgggtcatgaagcgaagcagatgctcggccgtaccccgggtaatatcgcggcgattcgcccgatgaaggacggcgttatcgctgacttcttcgtgacggaaaagatgctgcagcactttatcaaacaagtgcacagcaacagctttatgcgcccgagcccgcgcgtgctggtgtgtgtaccggttggcgcaacccaggtcgaacgtcgcgctattcgtgaatccgcgcagggcgcaggcgcccgtgaagtcttcctgatcgaagagccgatggcggcagcgattggcgcaggcttaccggtttctgaagcgaccggctccatggtggtggatatcggtggcggtaccactgaggtggcggttatctccctgaacggcgtggtctattcctcttctgtacgtatcggcggtgaccgcttcgacgaagccgttatcaattacgtgcgtcgtaactacggctccctgatcggtgaagcgaccgctgaacgtatcaagcatgaaatcggttcggcttacccgggcgatgaagtgcgcgaaattgaagtgcgcggtcgtaacctggcggaaggcgtgccacgcggcttcaccctgaactcaaacgaaattcttgaagcgctgcaggagcctctgaccggcatcgtgagtgcggtcatggttgcccttgagcagtgcccgccggaactggcgtctgatatctctgaacgcggtatggttctcaccggcggtggtgcgctgctgcgcaacctggaccgtctgttaatggaagaaaccggtattccagtcgtggttgctgaagatccgctgacctgcgtagcgcgtggcggcggcaaggcgctggagatgatcgacatgcacggcggcgacctgtttagcgaagag

SEQ ID NO: 23556 - DNA, 1498 bp, Klebsiella pneumoniae
ctccgctttgccattaagcttgcatgcgcggtggtgctggcgctgtttgtcggtttccattttcagctcgaaacgccgcgctgggcggtactgacggcagcgatcgtcgccgctgggccggcctttgctgctggcggcgaaccgtactccggcgcgatccgctatcgcggtatgttgcgtattgccgggacctttattggctgtattgcggcgctggttatcatcatcctgatgatccgcgcgcctctgttgatgatgctggtctgctgtctgtgggccgggttttgtacctgggtttcgtcgctggtcaaggtcgaaaactcctatgcctgggggctggccgggtacaccgcgctgattatcattattaccatccataccaatccgatgctggcgccgcagtttgctgtcgaacgctgcagcgaaattgtcatcggtattgtcagcgccatcgtcgccgatctcctgttttcgccgcgttcgattaaaaaagagatcgacctcgagctcgataatctgctaattgcccagtataagctgatgcagttatgcgtcgcgcacggtgaaaaagaggaagtggatcaagcctggggagcgctggtacgccgcactacggcgctggaaggtatgcgtagtaacctgattatggaatcctcacgctgggcaaaggcgaatcagcgcctgaaggcgatcaacaccctttcgctaacccttatcacccaggcttgcgaaacctatctgattcagaactcacgcccggaaatggtcacggacgactatcgcgagctgttcgccgagccggttgagacggtgcaggatgttcaccagcagctgaagcgcatgcgccgcttcctgacctggaaaggcgagcataataccccggtcacgatttatagctgggtgggcgccgccacgcgttatctgctgcttaagcgcggcgtggtggggaatactaaaatcagccgtatcgaggatggcgtgttgcgcggcgaaacggtggttaaagtggagtccgccgaacgtcatcacgcgatggtgaacttctggcgcacctccgtctcttgtattctcggaacgctattctggctgtggacgggctggacctcaggcagcggcgcgatggtaatgatcgccgtggttaccgcgctggcgatgcgcttgcctaacccgcgtatggtggcgatagacttcctctatggcaccctggcggcgttaccgttgggcaccttgtacttcctggtgatcatgccggcgacgcagcagagcatgctgttgctttgcatcagcctggcggcaatggcgttctttatcgggatcgaagtgcaaaaaaggcgtctcggatcgctgggggcgctggcgagcaccatcaacattctggtgctggataacccgatgcagttccagttcagccagttcctcgatagcgcgctggggcagatcgtcggctgtttcctcgctctgatggttattctcattgtcagggataactcccgggcca

SEQ ID NO: 23557 - DNA, 1277 bp, Klebsiella pneumoniae
gatgctaaagcaaaaatcaccctgggtggtgacactgctattgaactggatgtgctaaaaggacgctcggtcaggatgttattgatattcgtagtcttggttcaaaaggcgtatttacctttgacccaggtttcacatcaacggcttcttgtgaatctaaaattacgtttatcgatggtgacgaggggatcctgctgcaccgcggcttcccgatcgaccagttagcgaccgaatctaattatcttgaagtctgttatatcctgctgtacggcgaaaagccgacccaggccgaatatgacgaattcaaaactaccgtcacccgccacaccatgattcatgagcagatcacccgtctgttccacgcgttccgtcgcgattcccacccgatggcggtgatgtgcgggatcaccggcgcgctggcggcgttctatcatgattccctcgacgtgaataacccgcgtcaccgcgagattgccgcctaccgtctgctgtccaaaatgccaaccatggcagccatgtgttacaaatattctatcggccagccgtttgtttatccgcgcaacgacctctcctacgccggcaacttcctgcgcatgatgtttgcgacaccgtgcgaagagtatgaagtcaatccggtgctggagcgcgcgatggatcgtattctgatcctgcacgccgatcacgagcagaacgcgtcgacctccacggtacgtaccgcgggctcctccggcgctaacccgttcgcctgtatcgctgcgggcatcgcctccctgtggggaccggcacacggtggcgccaacgaagcggcgctgaaaatgctggaagagatcagctccgttgagcacattccggaatttgttcgtcgtgcgaaagacaagaatgactctttccgcctgatgggcttcggccatcgtgtttacaaaaactacgatccgcgcgccaccgtgatgcgtgaaacctgccatgaagtgctgaaagagctgggcaccaaagacgacctgctgcaggtggccatggagctggagcatatcgcgctgaacgacccgtacttcatcgagaagaaactgtatccgaacgtcgacttctactccggtatcatcctgaaagcgatgggtattccgtcctccatgtttaccgttatcttcgccatggcacgtaccgtgggctggattgcgcactggaacgaaatgcacagcgatggcatgaagatcgcccgtccgcgtcagctgtataccggctacgccaaacgcgatttccagtccgacattaagcgttaa

SEQ ID NO: 23558 - DNA, 741 bp, Klebsiella pneumoniae
atgaaaattgatttaaatgccgacctcggcgaaggctgcgccagcgatagcgcgctgctgcagctggtctcttccgccaatatcgcctgcggctttcacgccggcgatgcggttctcatgcagcaatgcgtgcgcgaggcgctgaaaaacggcgtcgctattggcgcacacccgagcttcccggaccgggaaaatttcggtcgaaccgcgatgcagttaccgccagagacggtctacgcccaggtgctgtatcaaattggcgcgctggcggcaatcgtacacgcccaggggggcgagctgcggcacgtcaaaccgcatggcatgttgtacaaccaggcggcgaaagagccgcctttggccgacgctatcgcccgtgcggtgcgcgatgccgacgccgacctggtgctggttgggctggcgggcagcgagcttatccgcgccggacagcattatcagttgacgacgcgccaggaagtcttcgccgatcgcggctatcaggccgacggcagcctggtgccgcgtagccaaccgggcgcgctgattgagagcgaagagcaggcgctggcgcaaacgctggaaatggtgcagcacaaccgggtgcgcagcctgagcggcgaatgggcgcatgtaaaggcggaaacggtctgcctgcatggcgatggcgctcacgcgctcgatttcgcccgacgcttgcgcgccgcgtttgccgggcggaatatcgacgtcagcgcggacctcgag

SEQ ID NO: 23559 - DNA, 2046 bp, Klebsiella pneumoniae
atgagtcgcaaacaattagccctgctggagccgacgctggtgcgccaggcgctgctggatgccgtgaaaaaactcagcccgatggtgcaatggcgcaatccggtgatgtttatcgtctgggtgggcagtctgttaactaccctgctggcgatcgccatggctggcggcgccctgaccggtagcgccacctttaccgccgccgtcagtatctggctgtggtttaccgtgctgttcgccaactttgccgaagcgatggcggaaggccgcagcaaagcccaggccaacagcctgaaaggggtgaaaaaaacggccttcgcccgcaaactgcgcgccccgcagcatgacgcaccggtcgaccacgtgccggcggaagacctgcgcaaaggcgacgtggtgctggtggaagccggggatattatcccctgcgatggcgaagtcatcgaaggcggcgcctcggtggacgaaagcgccattaccggcgagtctgccccggtgatccgtgaatccggtggcgattttgcctcggtgaccggcgggacacgcattctctccgactggctggtgatccgctgcagcgtgaacccgggagaaaccttcctcgaccggatgatcgccatggtggaaggcgcccagcgccgtaaaacgccgaacgagatcgccctgacgatcctgctgatcgccctgacgctggtgttcctgctggccaccgccaccatctggcccttctcggcgtggagcggcaatgcggtcagcgttaccgtactggtcgccctgctggtgtgcctgatcccgaccaccatcggcgggctgctgtcggccatcggcgtcgccgggatgagccgtatgctcggcgccaacgtgatcgccaccagcggccgtgcggtggaagccgctggcgacgtcgatgttctgctgctggataaaaccgggaccattactctcggcaaccgccaggcctcagccttcctgccggcgcgcggcgtggaagagcgaaccctcgccgacgccgcccagctctcctcgctggcggatgaaacccctgaggggcgcagcatcgtggtgctggcgaaacagcgctttaacctgcgcgaacgcgatctgcagtcgctgcacgccacctttgtcccctttaccgcgcaaacgcggatgagcggcatcaatatcgatcagcgcatgatccgcaaagggtcggtggacgccattcgccgccacgtggaggccaacggcggccacttccctgccgatgtcgataaacaggtggaagaggtcgcccgccagggggccacgccgctggtggtcgccgaaggggaaaaggtgctggggattattgcgctcaaagatatcgtcaaaggcggcatcaaagaacgtttcgcccagctgcgcaaaatgggcattaaaacggtgatgatcaccggcgataaccgcctgaccgccgcggcgatcgccgccgaggccggcgtcgatgatttcctcgccgaagcgacgccggaagccaagctggcgctgatccgccagtatcaatcggaaggtcggctggtggcgatgaccggcgacggcaccaacgacgcgcccgcgctggctcaggccgacgtggcggtggccatgaactccggcacccaggcggcgaaggaagcgggcaacatggtcgacctggattccaaccccaccaagctgattgaggtggtccatatcggcaaacagatgttaatgacgcgcggctcgctgaccaccttcagtattgccaacgacgtggcgaaatatttcgccattattccggcggcgtttgccgcggtctatcctcagctggccatgctgaacgtgatgggcctgcattcgccctcatcggcgatcctcagcgccgttatcttcaacgcgctgatcatcgtctttctgatcccgctggccctgaaaggcgtcagctatcgcccgctctccgcctcggcgatgctgcgccgcaacctgtggatctacggcctcggcggtctgctggtgccctttatcggtattaaagccatcgacctgctgctgaccctgagcggtctggtg

SEQ ID NO: 23560 - DNA, 573 bp, Klebsiella pneumoniae
atgtcattgattcgtccggcacttgtgctatttattctgttaacgctgctcaccggcggcgtctatcctctgctaaccaccagcctgggacaatggtggtttaactcacaggccaacggctcgctgatccgcctgaacggtgaagtgcgcggctcggcgctgattggccagaacttcaccgccgcaggctatttccagggccgcccgtcggccaccgcggagacgacggataatcccatggcctctggcggcagcaacctcgccgccagcaacccggcgctggataaagcggtgagcgagcgcgtgcaggccctgcgcgccgccaacccggacgccgacccgcgggtgccggtcgaactggtcaccacctcggcgagcggtctcgataacaacctgactccggccgccgcgctgtggcaggtgccccgggtggctcaagcgcgccagctgagcgttgagcaggtaacccagttggtgaatcaggccacacaaaccccgctgctgagcttccttggccagccggtggtcaatatactgcaactcaatatggcgctggatgccctgaaggataag

SEQ ID NO: 23561 - DNA, 2685 bp, Klebsiella pneumoniae
atgagtgacgagccgctgcgcccggaccctgaccgcctgctgcagcataccgccgccccgcatcgcggcaaactgaaagtgttctttggcgcctgcgccggggtggggaaaacctgggcgatgctggcggaagcgcagcggctgcgcgcccaggggctggatattctgattggcgtggcggagacccacggccgtaaagagaccgccgcgatgctgcagggcctgagcactctgccgccgcggcggcttgcccatcgcgggcggtacgtctatgagttcgatctcgacgccgccctcgcccgccgtccggcgttgattctggtggatgagctggcgcacagcaatgcgccaggctcccgccatccaaagcgctggcaggatgtggatgaactgctggaggccgggatagatgttttcactaccgttaacgtccagcatctggaaagcctgaatgacgtcgtcagcgggatcaccggcgtgcaggtgcgggagacggttcccgatcccttctttgacgccgcggacgacgtggtgctggtggacctcccccctgacgatctgcgccagcggctcaatgagggcaaagtctacatcggcggccaggccgagcgcgctatagaaaactttttccgcaagggcaatctgattgcgctgcgcgagttggccctgcgccgcaccgccgaccgcgtcgatgagcagatgcgcgcctggcgcgaccgccagggccaggagaaagtctggcacacccgcgatgcgatcctgctctgtatcgggcacaacaccggcagcgaaaagctggtgcgcgccgccgcccggctcgccgcccgcctgggcagcgtctggcatgcggtgtatgtcgagaccccttccctgcaccggctgccggaaggccggcggcgggctattctcgccgcgctgcgtctggcccaggagctgggggccgaaaccgccaccctctccgacccgtcggaagagaaagcggtcctccattacgcccgcgaacataacctcggcaaaatcgtcattggccgccaaagcaagcgccgctggtgggatcgcagcggcttcgccgatcgtctggctcgccatgcgccggacctcgatctggtggtgatcgccctcgatgagaaacccttcccccttgccgcacgcgccagcgacagccgtccggcgctggagaaatggcgcctgcagctgcagggctgcgcggtggcggtggcgctatgcgccatcattaccctggtggccatgcagtggttgatggctttcgaagccgccaacctggtgatgctatatctgctgggggtggtgctcatcgccctggtctatggccgctggccgtcggtgctggcgacggtgatcaacgtcatcagcttcgatctcttttttgtcgccccgcgcgggacgctggcggtgtcggatgtccagtatctgctcaccttcggcgtgatgctcaccgtgggcctgcttatcggcaacctcaccgccggcgtgcgctaccaggcgcgggtggcgcgctaccgtgaacgccgtacccgccatctgtatgagatgtctaaagcgctggcggtgggtcgcagccagcaggatatcgccaccaccagcgagcgatttatcgcctccacctttcaggcccgcagccagctgctgctcccggacgcccagggaaaactgctgcccttaacccaccagccagggctgaccccgtgggatgatgccatcgcccgctggagctttgataagggccaacctgccggcgccggcaccgataccctgcccggcgtgccgtatcagatcttgcccctgaagagcgccgcccgcacctggggactactggtggtggaaccggagaatctgcgccaattgatgatcccggagcagcagcggctgctggagacctttaccctgctggtggccagcgctctggagcgcctcaccctgaccgccagcgaagagcaggcccgtctgaccagcgagcgggaaagcctgcgtaactcgctgctcgccgccctgtcgcacgatctgcgtactccgctaaccgtgctgtttggccaggcggaaattctgaccctcgatctggccagcgaaggttcaaaacatgccccgcaggccaacgaaatccgccagcatgtgctcaacaccacccggctggtgaacaacctgctggatatggcgcggatccagtccggcggctttaatctgcataaggagtggctgacgctggaggaagtggtcggcagcgcgctgcgcatgctcgagccaagcctcggcggccagcatattcagctggatttacccgatcccctccagctggtgcatgtcgacgggccgctgttcgagcgggtgctgatcaacctgctggaaaatgcccataagtatgccggcgcccgggcgagcatcggcattcgcgccgaggcggacgcccggcagctgtcgctggaggtatgggataacggtcctgggatcccggcaggccaggagcagactatctttgataaattcgcccgcggcaacaaagagtcggcgatccctggcgtcgggctgggccttgccatctgtcaggccatcgtcgacgtccacggcgggaccatctccgccagcaaccggcccgagggcggcgcctcattccgtgttacactgcctggagaaacgccccctgaactggaagagctacctgaggaattg

SEQ ID NO: 23562 - DNA, 582 bp, Klebsiella pneumoniae
gtgttcgacagggatgcggcgctggacaaagccatgacactcttctggcagcacggctatgaggcgacctcgctcgccgatctggtcgaggcgacaggagcaaaagcccccaccctgtatgcggaatttgtgaataaagaaggcctattccgcgcagtgttggatcgttacatttcgcgctttgccgcgaagcacgaagccgtgctgtttgccgagggaaaatccgtcgatcgcgcgttgcgtgactacttcacggcggtcgccacctgctttaccagcaaagagacgccggccggctgctttatcatcaatacctccgccgcgctggccgcctcctcgacggatatcgccaataccatcaaatcccgccatgcgatgcaggagcaggcgctaacccagtttctgcagcagcggcaggcgcagggcgaactgcccgcgggccgcgatgtcgcgcagctggcgcaatttcttaactgcgttctgcaggggatgtcgattagcgcccgggaaggcgcggatttcgacaagctgatgcaaatcaccgataccactctccgtctctggccgcaggtcctcgggtcc

SEQ ID NO: 23563 - DNA, 892 bp, Klebsiella pneumoniae
attatgtggagctggtttgttattgctggtctgcaactgctgctggtgatccccctgctgtgggtcgccgcctggtggagcctgcggccattgagtcgctggcaaagaggtgcgcgaactggaggaacatcaccgcgaaaagctcaatcccaacaccactcgcgagctgacccggctggtcagcaacctcaaccgcctggttcgcagcgagcgcgaacgctatgacaaataccgcactaccctcaccgatctcactcacagtctgaaaacgccgctggcggtgatgcagagtacactgcgctcgctgcgcggcgagaagatcagcgtcgacgaggcggagccggtgatgctggagcagataagccgcatctcgcagcagattggttattacctgcatcgcgccagcatgcgcagcggcggcaccctcttgagccgggaattacacccgatcgcccccctgcttgacagcctgacttccgctctcaacaaggtctatcagcgcaaaggggtcaatatctcgctcgacatctcgccggagatcacttttgtcggcgagcagaacgattttatggaagtgatgggtaacgttcttgataacgcctgtaagtattgtctggagttcgtggaagtttccgtgcgccagaccaccgacagccatctgcacatcctggtggaagacgatgggccggggatcccgcagagccagcgccgggccgttttcgaccgcggccagcgggctgataccctgcgtcccggccagggggtagggctctccgttgcgcgtgaaattgtcgaacaatatgatggagagatcatcgccggggaaagcctgctcggcggcgcctgcatggaggtggtgtttggccgccagcagatggaagataaacagagt

SEQ ID NO: 23564 - DNA, 963 bp, Klebsiella pneumoniae
atggtaatgagaaaccgtttccccgtgacgctttggctgacgctagtcgcgttagtcgccgcgctggccctccccgcgcgcgctaacacctggccccttcccccgccgggcagccggctggtgggtcagaatcagtttcatatggtacaggatgacggcggttcgctggaagcgattgccaagaagtacaatgtcggcttcctggccctgctgcaggccaatcccggggttgacccctatgttccgcgcgccggcagcgtgctgaccatccccctgcagacgctgctgcccgatgcgccgcgcgaagggctggtgattaacctcgccgaactgcgcctctactattacccgccgggcaagaatgaagtgaccgtctacccaatcggcatcggccagctgggtggaaccaccatcacaccgacgatggtcacaaccgtgtccgacaaacgggccaatccgacctggacacctaccgccaacattcgcgcgcgctacaaggctatggggattgagctgccggcggtagtgcctgctggtcctgacaatccgatgggccatcacgccatccgcctcgccgcctatggcggagtctatctcctgcacggcaccaatgccgattttggcatcggtatgcgcgtcagttccggctgcattcgtctgcgcgataacgatatcaaggcgctgtacaacactatctcgccgggcacgaaggtgaacattatcaacacgccgatcaaggcgtcggttgagccggatggccgccgtctggttgaggtccatcagccgctatctgagcatatcgatgacgacccgcagaccctgcccattacgcttaatgcggccatgactgcgttcaaacaggcgccgcagaccgacgggacggtgatggagcgcgcgatgaattaccgctcgggcatgccgattgacgtcacccgtcatgctgacccaggaccgcagtcgttg

SEQ ID NO: 23565 - DNA, 3444 bp, Klebsiella pneumoniae
atgcctgaacaatatcgatactcattgccggtcaaagccggcgatcagcgccagcttggcgagttgaccggcgcagcctgcgccactttggtggcggagatggccgaacgccacaacggcccggtggtgctggtggcgcctgacatgcaaaacgcgctgcgtctgaacgacgagatcaggcagtttaccgacagcatggtgatggggctggcggactgggaaacgctcccttacgacagcttctcgccgcatcaggacatcatctcctcccgtcttgccaccctttaccagttacccaccatgcagcgcggcgtactgatcgtcccggtcagcaccctgatgcagcgcgtctgtccgcacagcttccttcacggccacgcgctggtgatgaaaaagggccagcgcctgtcgcgcgatgcgctgcgcgatcagctggagggggccggctaccgccatgtcgatcaggtgatggagcacggcgaatatgctacccgcggcgcgctgctcgacctgttcccgatgggtagcgatcagccctatcgccttgatttctttgacgatgaaatcgacagcctgcgcctgttcgacgttgacagccagcgcacgctggaggaagtggcggccattaacctgctgccggcgcacgagttccccaccgaccagaccgctattgagctgttccgcagccagtggcgcgaccgctttgaggtgaagcgcgatgccgagcacatctatcagcaggtcagtaaagggacgctacctgccggtatcgaatactggcaaccgctgttcttcagcgagccgctgccgccgttattcagctatttcccagccagcacgctgatcgtcaacaccggcgatctcgaggccagcgcggaacgattccagaatgaagcccgcgcccgctttgaaaaccgcggcgtcgatccgatgcgcccgctcctgccgcctgagctgctgtggctgcgcagcgatgagctattcagcgaactgaaaaaatggccgcgcgtgcagctgaaaaccgaacgtctggcggacaaagcggcgaatactaatctgggctaccagacgctgccggacctcgccgtccaggcgcagaacaaagcgccgctggataatctgcgccgcttcctcgagtcctttaccggtccggtgatcttctcggtggaaagcgaaggccgccgtgaagcgctgagcgaaatgctggcgcggattaaagttgcgccaaaacatgtgctgcgtctggaggaagccaccggcaacggccgctatctgatgattggcgccgccgagcacgggtttatcgacagccagcgcggcctggcgctgatttgcgagagcgatctgctcggcgagcgggtggcgcgccgtcgtcaggattcgcgacgcaccattaaccctgacactctgattcgcaacctcgccgaactgcatatcggccagccggtcgttcacctggaacacggcgtgggccgctacgcgggcatgactaccctggaagccggcggcatcaccggcgaatatctgatgctgacctacgccaacgatgccaagctatacgttccggtatcgtccctgcatcttatcagccgctacgccggcggggcggaagaaaacgcccccctgcacaagctgggcggcgatgcctggacccgggcgcgacaaaaagcggctgagaaagtacgcgacgtggcggccgagctgctggatatctatgcccagcgcgcggcgaaggcgggttttgcctttaaacacgaccgcgaacagtatcagctgttctgcgacggcttcccatttgaaaccacgccggatcaggcgcaggcgatcaacgccgtcctcagcgatatgtgccagccgctggccatggaccgcctggtatgcggcgatgtgggcttcggcaagaccgaagtggccatgcgcgccgccttcctcgccgtggagaaccacaagcaggtggcggtgctggtgccgaccaccctgctggctcagcagcactatgacaatttccgcgatcgtttcgccaactggccggtacgcatcgaaatgctctcccgattccgcagcgctaaagagcaggcgcagatcctcgagcaggccgcggaaggcaaaatcgatatcttgatcggcacccacaagctgctgcagagcgaggtgaagctgcgcgatctcgggctgctgatcgtcgacgaagagcaccggtttggcgtgcggcataaagagcgcatcaaagcgatgcgcgccgatgtcgatatcctgaccctcaccgccacgccgatcccgcggacgctgaacatggcgatgagcgggatgcgcgatctgtcgatcatcgccacgccgccggcgcgacgcctggcggtgaagaccttcgttcgcgaatatgacgccctggtggtgcgcgaggcgatcctgcgcgaaacgctgcgcggcggccaggtctactatctgtttaatgacgttgagaacatccagaaagccgccgacaagctggcggagctggtgccggaggcgcggatcgccatcggtcacggtcagatgagggagcgcgaactggagcgggtgatgaatgacttccatcaccaacgcttcaatgtgctggtgtgcaccaccatcatcgaaaccgggatcgacattcccaccgccaacaccatcatcatcgaacgcgccgaccattttggcctcgcccagctgcaccagctgcgcggccgcgttggccgttcgcatcaccaggcctatgcctggctgctgacgccgcatccgaaagcgatgaccaccgatgcgcaaaagcgcctcgaggccattgcgtcgctggaagatctcggcgccggctttgcgctggcaacccacgatctggagattcgcggggccggggaactgcttggggaagatcagagcggtcagatggaaaccattggtttctccctgtatatggagctgctggagaacgcagtcgatgcgctgaaagccgggcgtgaaccctcgctggaagatctcaccagtcagcagacggaggttgaactgcgcatgccttccctgctgcctgatgatttcatccctgacgttaatacgcgcctgtcattctataagcgcattgccagcgccaaaaacgaacaggatctggaggagatcaaagtcgagctgatcgatcgttttggccgcctgcccgatgccgcccgcaacctgctggatatcgcccgtctgcgtcagcaggcgcagaaactggggatccgcaaactggaaagcaacgaaaaaggcggcgtgatcgaatttaacgagaaaaacaacgtcaatccggtgtggttgatcggcctgctgcagaagcagccccagcacttccgcctggacgggccgacgcgcctgaaattcatgcaggacctggaagagcgtaaaacgcggatggactgggttcgccagtttatgcgccaactggaagagaacgccgtcgcc

SEQ ID NO: 23566 - DNA, 1206 bp, Klebsiella pneumoniae
atggatgacatgtaccaacctgccgcactctttatcggcctacgctatatgcgcgggcgcgcagccgaccgcttcggtcgtttcgtctcctggctctcaactatcggtattacgcttggcgtaatggcgctggtgacagtcctgtcggtgatgaacggctttgaacgcgagctgcaaaacaacatcctggggctgatgccacaggccattcttagcgccaaacaggggtcggtgaaccctcagcaactgccggagcgcgaagcgaaacttaatggggtaacccgcgtagcgccgatcaccaccggcgacgtggtgctgcagagtgcgcgcagcgtggcggtcggggttatgctgggcattgatccggcgcagaacgatcccctgactccatacctggtgaacgtcaaacagagcgatctgcaggcgggcaaatataacgttattctcggcgagcagctggcgggccagctgggggttaatcgcggcgataaaattcgcgtgatggttccttccgcgagtcagtttacgccgatgggccgcgtgccgagccagcgtctgttcacggtcatcggcaccttcgccgccaacagcgaagtcgatggctatcagatgctgaccaacatcgacgacgcctcccgtctgatgcgctatccgctggggaatatcaccggctggcgcctgtggctggataaaccgctgcaggtcgacaccctgagtcaacagacgctgccgccgggaactcagtggcaggactggcgcgagcgcaagggcgaactgttccaggcggtgcgcatggagaaaaatatgatgggcctgctgctgagcctgatcgtcgccgtcgcggccttcaacattattacctcgctggggatgatggtgatggagaagcagggcgaagtggcgatcctccagacccaggggctgacgccgcggcagattatggccgtctttatggtgcagggggccagcgccgggatcgtcggcgcgctgctgggagcggtgcttggcgccctgttggccagccagctgaataatttaatgccgatcatcggcgccttccttgacggcgcggcgctgccggtggcgattgagccgctgcaggtcattgttatcgccctggtggcgatggtgctggccctgttgtctacgttgtacccttcctggcgcgctgccgccacccaacccgctgaggctttacgttatgaa

SEQ ID NO: 23567 - DNA, 1044 bp, Klebsiella pneumoniae
atgaaaaaatggtcacgccacctgctcgcggcgagcgctctggcaatcggcatgggcgctgcgcacgcggacgatagcaaaacgctctatttctataactggaccgagtatgtgccgccgggcctgctggagcagttcaccaaagagaccggcatcaaggttatctattcgacctacgagtcgaacgaaaccatgtacgccaagctcaaaacctataaagacggcgcgtacgacctggtcgtcccgtcgacctactttgtcgacaagatgcgcaaagaaggcatgctgcagaagatcgataagagcaagctgactaacttcagcaacctcgatccgcagatgctgaataaaccgttcgatccgaataacgactactccatcccctatatctggggggcgacggccatcggcgtcaacagcgaggcgattgacccgaaaactatcaccagctgggccgacctgtggaagccggaatacaaaagcagcctgctgctgaccgacgacgcgcgcgaagtgttccagatggcgctgcgtaagctgggctattccggcaacaccaccgacccgaaagagattgaagccgcctataacgagctgaaaaagctgatgcccaacgtcgcagcgtttaactctgataacccggcgaacccgtatatggaaggcgaagtgaacctcgggatggtatggaacggctcggcttacgtcgcccgccaggcaggtactccgctggaagtgatctggccgaaagagggcggcatcttctggatggacagcctgtcgatcccggcgaacgccaaaaacgtcgacggcgcgctgaagctgattaacttcctgctgcgcccggatgtcgccaaacaggtcgctgaaaccatcggttatccgacgccgaaccttgcggcgcgcaagatgctcagcccggcagtggccaacgataaatcgctctatccggacgccgcaaccattgagaaaggcgaatggcagaatgacgtcggcagcgccagcgccatttatgaagagtattaccagaagctgaaagcgggccgt

SEQ ID NO: 23568 - DNA, 699 bp, Klebsiella pneumoniae
atgaataagatcctgctgcaatgcgacaacctgtgcaaacgctatcaggaaggcaatgtgcaaaccgatgtcctgcacaatgtcagcttcagcattggtgaaggcgagatgatggctatcgtcggcacctccggctctggcaaaagtacgctgctgcatctgctcggcggcctggatacgcccacctctggcgacgtgattttctccggtcagccgatgagcaagctatccaccgccgcgcgcgccgacctgcgtaaccgcgagctgggctttatctatcagttccaccatctgctgccggactttagcgcactggaaaacgtggcgatgccgctgctgattggcaaaaagaagccggcggatattgaacgccaggcgaaagcgatgctgcaggcggtcgggcttgaacaccgcagccatcaccgtccgtcggagctctccggcggcgagcgccagcgggtggcgattgcccgcgcgctggtgaataaaccgcggctggtgctggcggacgagccaaccggtaacctcgacgctcgcaacgccgacagcatcttccagctgctgggcgaactgaacgtcgcgcagcgcaccgcgtttctggtggtgacccacgacctgcagctggcgaagcgcatgagccgccagctggagatgcgcgatggccgtctgaccgccgacctgaccctgatgggggccgag

SEQ ID NO: 23569 - DNA, 1230 bp, Klebsiella pneumoniae
atggataaattgcttgagcgttttttgcagtacgtttctttggacacgcagtcaaagcctggcgttcgtcaggtccccagcacggaagggcagtggaagctgttacgcctgttgcaggcgcagctggaagaaatgggactggtcaaggtaacgctgagtgaaaaagggacggtaatgggaactttgcccgctaacgttgagggcgatatcccggccatcggttttatctcccacgtcgacacctccccggatttcagtggtaaaaacgttaatccgcagattgttgaaaactatcgcggcggcgatatcgcgctgggtatcggcgatgaggtgctctccccggtgatgttcccggttctgcatcagcttttgggacagacgctgatcaccaccgacgggaaaacgctgctcggggcggacgacaaagccggcattgccgaaattatgaccgcgctggcgaccctgcaggcgaaaaatattcctcatggcgatatccgcgtggccttcacccctgatgaagaggtgggtaaaggggcgaagcatttcgacgtcgaagcctttgacgcccgctgggcctataccgtcgacggcggcggggtcggcgaactggagtttgaaaacttcaacgccgcctcggtgacgataaaaattgtcggtaataacgtgcaccccggcaccgcgaaaggggtgatggtcaacgcgctgtcgctggccgcgcgcattcatgccgaagtaccggccgatgaagcgccggagaccactgaaggctatgaaggtttttatcacctcaccagcatgaaaggcagcgtcgatcgggccgagatgcattacatcatccgcgattttgaccgtaagcacttcgaggcgcgcaagcgcaagatgatggagatcgccaaaaaggtcggcaagggactgcacccggactgttatattgagctggtgatcgaggacagttattacaatatgcatgagcaggtgatcgcccatccgcacgtggtcgatattgcccgccaggcgatggtggactgcgatattgaaccgcagatgaaaccgatccgcggcggcaccgacggcgcgcagctgtcatttatgggactgccgtgcccaaacctgtttaccggtggctacaactatcacggcaaacatgagtttgtcaccctggaaggaatggagaaagcggtgcaggtgatcgtgcgtatcgccgagctgacggcggcacgcaaagggcat

SEQ ID NO: 23570 - DNA, 1599 bp, Klebsiella pneumoniae
atgacgcagcaggcgacaatcaccgatgaactggcctttagtcagccctatggcgagcaggagaagcagatcttaacgcctgaggcggtagaatttctgacggaactggtgagccgctttacgccggcgcgcaataagctgctggccgctcgtttgcagcaacagcaggctattgacgacgggcagcttccggattttatttcggaaactgcttccattagaaatggcgactggactattcgcggtatcccggctgatttgcaggatcgccgcgtggaaatcaccggccccgtcgagcgcaagatggtcattaacgcgctgaatgccaacgtcaaagtctttatggcggactttgaggattcgctggcgcctgactggcgcaaagtcattgatggtcaaatcaacctgcgcgatgccgtgaacggaaccatcagctacaccaacgaggccggcaaaatctatcagttgcagcccaatcccgctgtgctggtatgccgtgtgcgcggcctgcacctgccggaaaagcatgtgacctggcgtaatgaggccatccccggcagcctgttcgattttgcgctctatttctttcataactaccaggcgctgctggcgaaaggaagtggtccctacttctatctgccaaaaacacaggcctggcaggaggcggcatggtggaacgatgtcttcagttttacggaagatcgctttgacctgccgcgcggcaccatcaaggccacgctgctgattgagacgctgccagcggtgttccagatggatgagatcctgcatgcgctgcgcgaccatattgttggcctgaactgcggccgctgggattacatcttcagctatatcaaaacgctgaaaaaccatccggaccgcgtgttgccggaccggcaggtggtgacgatggataaaccgttcctcagcgcctactcacgcttgttgattaagacctgccacaaacgcggcgcgtttgcgatgggcggtatggcggcgtttatcccgagcaaagataccgaacgtaaccgccaggtgctgagtaaagtcaccgccgataaagagctggaggccaacaacggtcacgatgggacctggatcgcccacccgggcctggcggataccgccatggcggtgtttgaccgcgtgctgggcgataagccgaatcagctctcggtcacccggagcgaggatgcgccaattaccgctgaacaactgctggctccctgcgagggcgaacgcacggaagccggaatgcgcgccaacattcgcgtggcggtgcagtacatcgaagcgtggatctccggcaacggctgcgtaccgatttatggcctgatggaagacgccgcaacggccgagatctcgcgcacctctatctggcagtggatccatcatcagaaaaccctgaacgacggtaccccggtcactaaggcgctgttccgccagtggctggcggaagagctgatggtgattcaggaggagctgggagagcaccgcttcagccacggccgctttgacgatgcggcgcgactgatggagcagatcaccacctccgacgagctaattgattttctgacattgccgggctaccgcctgctggcc

SEQ ID NO: 23571 - DNA, 1317 bp, Klebsiella pneumoniae
atggagcatctgcacatgaaaacccgtacccaacaaatcgaagaattaaacaaagaatggacgaatccgcgctgggaaggcattacccgtccctacagcgcggaagaggtggtgaagttacgcggctcggtgaatccggaatgcacgctggcgcagcttggcgcggcgaaactgtggcgtctgctgcacggggaggcgaaaaaagggtacgtcaacagtctcggcgcgctgaccggcggccaggccttgcagcaggcgaaggcgggtatcgaagccatttatctctccggctggcaggtggcggcggatgctaacctggcgtccagcatgtatccggatcaatcactgtatccggccaactcggtaccggcggtggtggatcggatcaacaacaccttccgccgcgccgatcagatccagtggtcagcgggaattgaaccgaacgatccgcgctttatcgactacttcctgccgatcgtggcggatgcagaggccggttttggcggcgtcctgaacgcctttgagctgatgaaatcgatgattgaagccggtgcagcggctgttcacttcgaagatcagctggcatcggtgaagaagtgcggccatatgggcggtaaagtgctggttccgactcaggaggcgattcagaagctggtggcggcgcgtctggcggccgacgtgatgggggtcccgacgctggtcatcgcccgtaccgatgccgacgccgcggatttaattacctcagactgcgatccgtacgatcgtgagtttattaccggggatcgcaccagcgaagggttcttccgcacccacgccgggatcgagcaggcgatcagccgcgggctggcctacgcgccgtatgcggatctggtgtggtgtgaaacgtcgaaaccggatctcgagcaggcgcgccgctttgccgaggctatccatgcgcgtttcccgggcaaactgctggcctataactgctcgccgtcgtttaactggaagaaaaatctcgatgataaaaccatcgccagcttccagcagcagctgtcggacatgggatacaaataccagtttattaccctcgcggggatccacagcatgtggttcaacatgttcgacctcgcccatgcctacgctcagggtgaggggatgcgccactatgttgagaaagtgcagcagccggaattcgccgccgggccggaaggctacaccttcgtctcgcatcagcaggaggtgggcaccggctacttcgacaaggtcaccaccattatccagggtggcacctcgtcggtaacggcgctgaccggctcgaccgaagaagatcagttt

SEQ ID NO: 23572 - DNA, 828 bp, Klebsiella pneumoniae
atggccactacccccattcccgcgaaacgcggcagaaaacccgcggctgccactgcccagcaggctggcggtcaggttcagtcgctgacccgcggcctgaaattactcgaatggattgccgagtcccacagcagcgtcgcgctgaccgaactggcgcagcaggcgggtctgcccaactccacgactcaccgtctgctgaccaccatgcaacagctgggcttcgtccgccaggttggcgagctgggtcactgggccgtcggggcgcatgctttcgtggtcggcagcagctttctacaaagccgcaatctgctggccattgtccacccgatcctgcgccagctgatggaagattccggtgaaacggtgaatttagcggtgctcgaccagagcgaccaccaggcgatcattatcgatcaggtgcagtgcacccagctgatgcggatgtcggcgccaatcggcggtaaactgccgatgcacgcttccggcgccgggaaggcgtttctcgcgcagctgagcgaagagcaggtcaccagtctgctgcaccgtaaagggctgcatgcctatacgcatgccacgctggtctccccgctgcatctgaaggaagatttagcccagacccgcaagcggggctactctttcgatgatgaggagcacgcgctcggcctgcgctgcgtcgccgcctgcatttacgatgaacatcgcgaaccgttcgcggcaatctccatctcaggccccatctcgcgtatgaccgatgatcgggtgactgagctgggcgcgctggtgatcaaggcggcgaaggaagtgacgctggcgtatggcggggttaaa

SEQ ID NO: 23573 - DNA, 1647 bp, Klebsiella pneumoniae
atgaaaaacatcaacccaacgcagacctctgcctggcaggcattacagaaacacttcgacgaaatgaaagatgtcactatcagcgagcttttcgccaaagatagcgaccgtttttctaaattttccgcgacgttcgacgatctgatgctggtggacttctccaaaaaccgcatcactgaagagacgctggctaaactgcaggatctggcgaaagagactgacctggcgggcgctatcaagtcgatgttctcaggtgagaagatcaaccgcaccgaagaccgcgcggtactgcacgtcgcgctgcgtaaccgcagcaatacgccgattgtggttgatggcaaagatgtgatgccggaagtgaacgctgtgctggagaagatgaaaaccttctccgaagcgattatctccggtagctggaaaggctacaccggcaaaccgatcaccgacgtggttaacatcggtatcggcggctccgacctcggtcctttcatggtgaccgaggcgctgcgtccgtataaaaaccacctcaacatgcactttgtctctaacgtcgatggcacccatatcgccgaagtgctgaagaacgtgaatccggaaacgactctgttcctggtggcgtccaagactttcactacccaggaaaccatgaccaacgcccacagcgcgcgcgactggttcctggcaaccgcgggcgacgacaagcacgtggcgaaacacttcgccgcgctttccaccaacgcgaaagcggttggcgagttcggcatcgacaccgccaacatgttcgaattctgggactgggttggcggccgttactccctgtggtcggcgattggtctgtccatcattctctccgtgggcttcgacaacttcgttgagctgctgtccggcgcgcatgcgatggataagcacttctccaccactccggcggagaaaaacctgccggtgctgctggcgctgatcggcatctggtacaacaacttcttcggtgcggaaaccgaagcgattctgccgtacgaccagtacatgcaccgctttgccgcttacttccagcagggcaacatggagtccaacggtaagtatgttgaccgtaacggccacgcggtagactaccagactggcccaatcatctggggtgagccgggcaccaacggtcagcacgcgttctaccagctgatccaccagggcaccaaaatggtaccgtgcgatttcatcgctccggctatcacccacaacccgctgtctgaccaccatcagaaactgctgtctaacttcttcgcccagaccgaggccctggcctttggtaaatcccgcgaagtggttgagcaggaatatcgcgatcagggtaaagacccggcgaccctggagcacgtggtgccgttcaaagtgttcgaaggtaaccgcccgactaactccatcctgctgcgtgagatcaccccgttcagcctcggggcgctgattgccctgtacgagcacaaaatcttcacccagggcgcgatcctcaacatcttcacctttgaccagtggggcgttgagctgggcaaacagctggctaaccgcatcctgccggagctgaaagacggcagcgaagttagcagccacgacagctctactaacggcctgattaaccgttataaagcctggcgcgca

SEQ ID NO: 23574 - DNA, 1629 bp, Klebsiella pneumoniae
gtgttaactctgctacacctgttgtccgcggttgctctgctggtgtggggcacgcatatcgtgcgtaccggggtgatgcgcgtctatggcgctcgcctgcgtaccgttctcagtagcagcgtagagaaaaagccgctcgccttctgcgcgggtcttggcgtgactgcgctggtgcaaagcagtaacgccaccaccatgctggtgacctcatttgtcgcccaggatttagtgggtctgatgccagcgctggtgatggtgctgggggccgacgtcgggacggcgctgatggcgagggtgttgaccttcgacctgtcgtggctgtcgccgttgttgatatttatcggggtgattttcttcctcggccgcaagcagacccgcgccgggcagcttggacgggtggggattggtctggggctgatcctgttggccctcgagctgattgtccaggccgtacaccccataacccaggcgaacggcgtgcaggtgattttcgcctcgctgaccggcgatatcatgctggatgctttgattggcgccgtatttgcaatcattagctactccagcctggcggcggtgctgttaacggcgacgctgaccgcggcgggagcgatctctttcccggtggcgctgtgtctggtgattggcgccaacctgggatcggggctgctggcgatgcttaacaacagcgcggcgaacgcggcggcgcgccgggtggcgctgggcagcctgctgtttaagctggtggggagcctgattattctgccgttcgtccatccgctggccgcggcgatgcacaagctgccgttggccgagtccgagctggttatctacttccacgtcttttacaacctgctgcgctgcatcgcgatggtgccctttgccggaccgatggcgaagctgtgccagcgtctgatccgcgatgagcccgagctggataaccatctcaaacccaagcatctcgacccgtcggcgctggacaccccggcgctggcgctggccaatgccgcgcgcgagacgctgcgcattggtgacgcgatggagcagatgctggagagcctgcacaaggtgatgcatggcgaaccgcgtcaggagaaagagctgcgccgtatggcggatgatatcaacgtactttacaccgctattaagctctatctggcgcgaatgccaaaggatgagctggcggaagaggaatcccggcgctgggcggaaattattgagatgtcgttaaacctcgaacaggcgtccgatatcgtcgagcgaatgggcagcgagatcgccgataaatcgctggcggcgcggcgcgccttctcggtagaagggttaaaggagcttgatgcgctgtacgatctgctgctcagcaacctgcagctggcgatgtcggtcttcttctccagcgatgtgcccagcgcccgccgcctgcggcgcagcaaacaccggttccgcattcttaaccgccgctactcgcatgcgcacgttgaccgtctgcatcagcagaacgtgcagagcatcgaaaccagtacgttgcacctggcgctgctgggggatatgaagcgtctgaacagcctgttctgctcggtggcttacagcgtgatggagcaaccggatgaagacgacgaacgggatgactac

SEQ ID NO: 23575 - DNA, 873 bp, Klebsiella pneumoniae
atgctgcccgactcatcaacccgattaaataaatacatcagcgaaagcggcatctgctcgcgtcgcgaagcggaccgctttattgaacaaggcaacgtctttatcaatggcaagcgcgccactattggcgatcaggtgaagcctggcgatttagtcaaagtgaacggacggttgattgagccgcgcgaagcggatgatctggtactgattgcgctgaataagccggtcggcattgtgagcaccaccgaagatggcgagcgcgacaacattgtcgatttcgtcaaccacagcaagcgtatctttcctatcggccgtctggataaagactcccaggggctgatcttcctcaccaaccatggcgatctggtgaacaagatcctgcgcgccggcaacgaccatgaaaaagagtatctggtcacggtcgataagccggtgaccgatgagttcattcgcggcatgggcgcgggggtaccgattctcgggaccgtgaccaaaaaatgtaaggtaaagaaagaagcgccgttcgttttccgcatcactctggtgcaggggctgaatcgccagatccgtcgtatgtgcgagcactttggctatgaagtgacgaagcttgagcgtacgcggatcatgaacgtcagcctgacggggatccccttgggtgaatggcgtgatctaaccgatgacgagctgatcgacctgttcaagctgattgaaaactcctcttccgaagcgaagccgaaagccaggccgaaggccaaagcggcgactcccggcatcaagcgcccggtggtgaagatggaaaatagcaacgataagggccgcccggctggtaacgggaaacgtttcacccagccgggacgtaaaaagaaagggcgt

SEQ ID NO: 23576 - DNA, 1619 bp, Klebsiella pneumoniae
ttgatattaacctgaagattaaacatgactgaatctttgctcaactgtttgaagaatccttaaaagaaatcgaaacccgcccgggttccatcgttcgtggtgttgttgttgctatcgacaaagacgtagtactggttgacgccggtctgaaatctgagtccgccatcccggctgagcagttcaaaaacgcccagggcgagctggaaatccaggttggtgacgaagttgacgttgctctggatgcagtagaagacggcttcggtgaaactctgctgtcccgtgagaaagctaaacgtcacgaagcttggatcacgctggaaaaagcttacgaagacgctgaaactgttaccggtgttatcaacggcaaagttaaaggtggcttcactgttgagctgaacggtattcgtgcgttcctgccgggttccctggtagacgttcgtccggtgcgcgacacgctgcacctggaaggcaaagagcttgagttcaaagtcatcaagctggaccagaagcgtaacaacgttgttgtttctcgtcgtgccgttatcgaatccgaaaacagcgcagagcgcgatcagctgctggaaaacctgcaggaaggcatggaagtcaaaggtatcgttaagaacctcactgactacggtgcattcgttgatctgggcggcgttgacggcctgctgcacatcaccgatatggcctggaaacgcgttaagcatccgagcgaaatcgtaaacgttggcgacgaaatcactgttaaagtgctgaagttcgaccgcgagcgtacccgtgtatccctgggcctgaaacagctgggcgaagatccgtgggtagctatcgctaaacgttatccggaaggtaccaaactgaccggtcgcgtgaccaacctgaccgactacggctgcttcgttgaaatcgaagagggcgttgaaggcctggttcacgtttccgaaatggattggaccaacaaaaacatccacccgtccaaagttgttaacgttggcgacgttgtggaagtaatggttctggatatcgacgaagagcgtcgtcgtatctccctgggtctgaagcagtgcaaatctaacccatggcagcagttcgcggaaacccacaacaagggcgaccgtgttgaaggtaaaatcaagtctatcactgacttcggtatcttcatcggcctggacggcggcatcgacggcctggttcacctgtctgacatctcctggaacgttgcaggcgaagaagcagttcgtgaatacaaaaaaggcgacgaaatcgcagcagttgttctgcaggttgacgcagagcgtgagcgtatctccctgggcgttaaacagcttgcggaagatccgttcaacaactacgttgctctgaataagaaaggcgctatcgttgttggtaaagtgactgcagttgacgctaaaggcgcaaccgtagaactggctgacggcgtagaaggttacctgcgtgcttctgaagcatcccgtgaccgcgttgaagacgcaactctggttctgagcgttggcgacgaagttgaagcgaaattcaccggcgtggatcgtaagaaccgcgtagtgagcctgtctgtacgtgcgaaagacgaagcggaagaaaaagacgctatcgct

SEQ ID NO: 23577 - DNA, 1746 bp, Klebsiella pneumoniae
atgcagaacgataaagatctctccacgtggcagaccttccgccgactttggccgattatcgcgccgtttaaagccgggctaatcgtagcggcggtggcgttggtgcttaacgcgggcagtgacaccttcatgttatcgcttcttaaaccgttattggatgatggttttggtaaaacggatcgctcagtgctgctatggatgccgctggtggttatcggcctgatggtgctgcgtgggatcaccagctacatctcgagctattgtatttcctgggtttccggcaaagtggtgatgaccatgcgtcgtcgcctgttcggccacatgatgggtatgccggtggccttctttgacaagcagtctaccggaacgctgctgtcacgcatcacctatgattctgagcaggtcgcctcctcctcttccagcgcgctgatcaccgtggtccgcgaaggggcatcgattatcggtctgttcgtgatgatgttctattacagctggcagctgtcgctgatcctgatcgtactggcgccgattgtgtcggtggcgatccgcgtggtctccaagcgttttcgcaatatcagtaagaatatgcagaacacgatggggcaggtcaccaccagcgccgagcagatgctgaaagggcacaaagaggtgctgatgtttggcggccaggaagtggaaaccaaacgttttgataaagtcagcaataaaatgcgtctgcaggggatgaagatggtttccgcctcgtctatctccgacccgatcattcagcttatcgcctccctggcgctggcctttgtcctgtatgccgccagcttcccgagcgtgatggacaccctgaccgccgggaccattaccgtggtcttctcctcgatgattgcgctgatgcgtccgctgaagtcgctgaccaacgtcaatgcccagttccagcgcgggatggcggcgtgccagacgctgtttgcgatcctcgattccgagcaggaaaaagacgaaggtacgcgggtcattgagcgggcgaaaggcaatctcaagttcgagaacgtcacctttacctacccgggtcgcgaagtggccgcgctgcgcaatatcaatctcgatatcccggaagggaaaacagtggcgctggtggggcgctcagggtcgggtaaatcgaccattgccagcctgatcacccgcttctacgatgtcgacgaggggcagatcctgctggatggccacgacctgcgcgagtacaagctgagctcgctgcgcgaccaggtggcgctggtttcgcaaaacgtgcatctgttcaacgataccgtcgccaacaatatcgcctatgcccgtaccgaagagtacagccgcgagcagattgaagaggccgcgcgcatggcctacgccatggatttcatcaacaagatggataatggtctggataccatcatcggcgagaatggcgtgatgctgtccggcggccagcgccagcgtattgctattgcccgcgcgctgctgcgtaacagcccgatcctgatcctcgatgaagctacctcggcgctggataccgagtccgagcgtgccattcaggcggcgctggatgagctgcagaaaaaccgtacctcgctggttatcgctcaccgtctgtcgaccattgagcaggctgatgaaatcgtggtggttgaagacgggcggatcgtggagcgcggaacgcaccatgacctgctggagcataagggcgtgtacgcccagctgcataagatgcaattcggcgaa

SEQ ID NO: 23578 - DNA, 503 bp, Klebsiella pneumoniae
atgccgggcaaccgcccgcattatgggcgttggcctcaacacgattttccgccatttaaaaaactcaggccgcagtcggtaacctcgcgcatacagccgggcagtgacgtcatcgtctgcgcggaaatggacgaacagtggggatacgtcggggctaaatcgcgccagcgctggctgttttacgcgtatgacaggctccggaagacggttgttgcgcacgtattcggtgaacgcactatggcgacgctggggcgtcttatgagcctgctgtcaccctttgacgtggtgatatggatgacggatggctggccgctgtatgaatcccgcctgaagggaaagctgcacgtaatcagcaagcgatatacgcagcgaattgagcggcataacctgaatctgaggcagcacctggcacggctgggacggaagtcgctgtcgttctcaaaatcggtggagctgcatgacaagtcatcgggcattatctgaacataaaacactatcaataa

SEQ ID NO: 23579 - DNA, 425 bp, Klebsiella pneumoniae
atggctaaaccaaagtattcccctgaaacaaaactggctgtggttaatcattatttgtccggtaaagacggagaacagagtacagccgacctttttggtattgaaagaacatctgtccgtcgctgggtcagggcatggcagttccacggtgcagaaggcctgactgcaaaaaataatcattattccgatgaatttaaactcgtggtcgtccgggcggttatcagtgaccgcctgacgatgcgtgaagcggctgcccggtttaatctctccgcagaaatacttgtccggcgctggctcgacgtgtacaacgatgccggagcggaaggtcttttaaacatgcaatgcggacggcccggacaaatgaccaaagcaaaaaatataccacactgacagataaagagtggaaaaatctccccgaagagtca

SEQ ID NO: 23580 - DNA, 831 bp, Klebsiella pneumoniae
atggaactgcttgaagagcatcgctgttttgacggccagcaacaacgctggcgtcatcactcccctgtcctgaactgcgccatgacgttcagcatttttttaccgcctgagcgcgaaacgccgccgccggtgctgtactggctgtcggggctgacctgtaacgatgagaactttaccaccaaggcgggcgcccagcgcattgccgccgagctgggcatcgcgctggtgatgccggataccagcccgcgcggtgacgaggcggccaacgacgacggttacgatctcggacaaggcgccggcttctacctgaacgccaccgaggcgccctgggcggcgcactaccgaatgtacgattacctgcgtgacgaactgcccgcgcttattcgtagcgagtttagcgtcggcgaacgctgcgccgtcagcggccactcgatgggcggccacggcgcgctcattatggcgctcaaaaatcccggccgctacgccagcgtctccgccttcgcgccgatcgtcaatccctcccaggtcccgtggggcaagaaagcgtttaccgcctatctcggcgcggatgaatcggcatggcactcctgggacagctgtgcgctgatgcaggccagccggccggaggacgccgtgccgacgcttatcgatcagggcgacaacgatccattccttgccggacagctgcagccggcggtactggcggaggtcgcgcggcagaaggcctggccgttaacgctgcgcatccagcccggttacgaccacagctattacttcattgcctcgtttattgaagaccatctgcgcttccatgcgcagcatctctttggc

SEQ ID NO: 23581 - DNA, 1492 bp, Klebsiella pneumoniae
gaatatttgttggagatgagcaacatcaacaaatcgtttcctggcgtcaaggctcttgataatgtcaacctgaaggttcgtccgcactccattcatgcgttaatgggtgagaacggcgccggtaaatcgacattattaaaatgcctttttgggatctatcaaaaagattccggtagcattctttttcagggaaaagagatcgatttccattcggcgaaagaagccctggaaaacggtatttcgatggtgcatcaggaattaaacctggtattacagcgttcggtcatggataacatgtggctcgggcgctatccaactaaaggcatgtttgtcgatcaggacaaaatgtaccgggataccaaggccatttttgatgagctggatattgatatcgatccgcgcgcccgcgtcggtaccttatcggtatctcagatgcagatgattgagatcgcgaaggcgttttcctatgacgccaaaatcgtcatcatggatgagccgacgtcatcgctgacggaaaaagaggtcaaccatctgtttaagatcatccgtaagctgaaagatcgcggctgcggtatcgtctatatctcgcataaaatggaagaaattttccagttgtgtcgatgaaataaccatcctgcgcgacggccagtggatcgccacccagccgctggaagggctggatatggataagatcatcgccatgatgttcgggcgttcgcttaaccagcgttttccggatcgcgaaaacactccgggcgaagtgatcctccaggtgcgcaatctcacctcgctgcgccagccctccattcgcgatgtctcctttgacctgcataagggcgaaattctcggtatcgccggcctggtgggcgctaaacgcaccgacatcgtggagaccctgttcggcatccgtgagaaggccagcggcaccatcacgctgcacggcaagaagatcaacaaccacagcgccaacgaggcgattaaccacggttttgcgctggtgaccgaggagcggcgctctaccgggatttacgcctatctggatatcggatttaactcgctgatctccaatattaagaaatataaaaacagcatcggcttgctggataactcgcgaatgaagagcgatacccaatgggttattgactcgatgcgcgtcaaaacccccggtcagcatacgcagattggctcgctttccggtggtaaccagcaaaaggtcattataggccgctggctgctgacccagccggagatcctgatgctggatgagccaacgcgcggtatcgacgtcggcgccaagtttgaaatctatcagctgattgccgaactggctaaaaaagacaaagggatcattattatttcttccgaaatgccggaactgctggggattaccgaccgcattctggtgatgagcaacggcctggtcgcgggcattgttgagactaaaaccactacgcaaaacgaaatactgcgtcttgcgtcattgcacctttaa

SEQ ID NO: 23582 - DNA, 852 bp, Klebsiella pneumoniae
atgaaatacgtaggagcgcacgtgagcgcctcaggtggactggccaatgccgccattcgcgccgccgaaatcgaagcaaccgccttcgccctcttcaccaagaaccagcgccagtggcgcgccgcgccgctcagcgacgagaccatcgccgaattcaaagccgcctgtgaaaagtatcactttggcccggggcagatcctgccgcacgacagctacctgattaaccttggccacccggtggaagaagcgctggaaaaatcccgtgatgccttcattgatgaaatgacccgctgccagcagctgggactgacgctgctcaacttccaccccggcagccatctgcagcagatcccggaggaggagtgcctggcgcgcatcgccgaatcgatcaatatcgcgctggcgaagaccgaaggcgttactgcggtgatcgaaaacaccgctggccagggcagcaacctcggctttaagttcgagcacctcgcggccatcatcgacggtgtggaagataaatcccgcgtcggcgtctgcatcgatacctgccatgctttcgccgccggctacgacctgcgcagcgccgaagcctgcgaaaaaaccttcgccgccttcgaacgcatcgtcggttttcagtatctgcgcggcatgcatctcaacgatgccaagagcgccttcggcagccgggtcgaccgtcaccacagcctgggggaaggcaacatcggccacgattgcttcagctggatcatgcaggacagccgcttcgacggtattccgctgattctggaaaccatcaacccggatatctgggcggaagagattgcctggctgcgggcgcagcagattgccgaagtggcg

SEQ ID NO: 23583 - DNA, 1692 bp, Klebsiella pneumoniae
atgaaaacgctgctgattattgatgccggactcggacaggcgcgcgcctacatggcgaaaaccctgctgggtgccgcggcgccgaaagcgcaccttgagctgattgataacccgaatgacgccgaactggccatcgtgctgggaaccgcgctgccggccgatagcgcgctgaatggtaaaaacgtttacctgggcgatattaaccgtgctgtcgcccatccggagctgttcctgggagaagcgaaagaccacgctaagtcctacgttgcgccagcggcggtagccgttccggccgccgctcaggggcagaaacgcattgtcgcggtcaccgcctgtccgaccggcgtcgcccacacctttatggcggcagaagccatcgaaaccgaagccaaaaaacgcggctggtgggtgaaggtggagacccgcggctccgttggggcgggcaatgccatcaccccggaagaggtggccgaggcggatctggtgatcgtcgctgccgatatcgaggtggacctggcgaaattcgccggcaagccgatgtaccgcaccaccaccggtctggcgctgaagaaaaccgcccaggagctggataaagcggtggcggaagccaaaccgtaccagccatccggcaaacctcaggcggctgctgaagggaaaaaagagtcggcgggcgcctatcgccacctgctgaccggcgtctcctatatgctgccgatggtagtggccgggggcctgtgtatcgcgctctcctttgccttcgggatcaaagcgtttgaagtgaaagacaccctggcggcggcgctgatgcagatcggcggcggctcggccttcgcgctgatggtgccggtactggcaggctttatcgccttctccattgccgaccgtccgggtctgaccccgggccttatcggcggtatgctggcggttagcggcggctccggctttatcggcgggatcatcgctggtttccttgccggttatgtggcgaaagccatcagcacgaagctgaaactgccgcagagtatggaagccctgaagccaatcctgatcattccgctggtctccagtctgatcgtgggtttggcaatgatctatctgatcggtaaaccggtagccggtatcctcgcctggctgacccactggctgcaaaccatgggcaccgccaacgcggttctgctgggcgcgatcctcggcgcgatgatgtgtaccgatatgggcgggccggtaaacaaagcggcctatgcctttggcgttggcctgctgagtacccagacctatgcgccgatggcggcgatcatggcggccggtatggtgccaccgctggcgatgggtatcgcgacgctggtagcgcgcaataagttcgacaaagggcagcgggaagggggcaaagccgcgctggttcttggcctgtgctttatctcggaaggggcgattccttttgccgcccgtgacccgatgcgcgttctgccgtgctgtatcgtcggcggcgcggtaaccggcgctatctccatggcggtcggcgcgaaactgatggcgccgcacggcgggctgtttgttctgctgatcccgggggcgattacgccggtgctgggctacctgctggcgattgttgccggaacgctggtggcgggccttgcctacgccgtgctgaaacgccctgaggcgcaaacagcggaagttgaaaaagcggca

SEQ ID NO: 23584 - DNA, 945 bp, Klebsiella pneumoniae
atgccgtccggcgctgagtttacgcgcgacgagcgacagttaaatcaacatgagaacccaaacgacgccatgagcgacgacaattcacacagtagtgacacagtaaacagcaaaaagggatttttctccctgttactcagccagctttttcacggagaaccgaaaaaccgcgatgaactgctggcgctgatccgtgattccgggcaaaacgaccttatcgatgaagatacgcgtgacatgctcgaaggggtaatggatatcgccgaccagcgggtccgcgacattatgatcccccgttcacaaatgataaccctgaaacgcaaccagacgctggacgagtgcctggatgtcatcatcgaatccgcccactcgcgtttcccggtcatcagtgaagataaagatcacatcgaagggattctgatggccaaggatctgctgccgtttatgcgcagcgacgccgaagccttcagcatggaaaaagtgttacggccggcggttgtcgtcccggaaagcaagcgggtcgaccgcatgctgaaagagtttcgctcacagcgctatcatatggcgatcgttattgacgaattcggcggcgtctctggcctggtgaccatcgaggatatccttgagctcatcgtcggggaaattgaagacgagtacgacgaagaagaagatatcgatttccgccagctgagtcgccacacctggacggtgcgcgccctggcctccatcgaagacttcaacgaggccttcgacacgcactttagcgatgaagaagtggataccattggcgggctggtgatgcaggccttcggccatctgccggcccgcggcgaatctatcgacattgatggttaccaattcaaggtagcaatggcagatagtcgtcgtatcattcaggtgcatgtaaagctgcccgatgacgctccccagccgaagctggaagag

SEQ ID NO: 23585 - DNA, 2580 bp, Klebsiella pneumoniae
atgcaagagcaataccgcccggaagagatagaatcgaaagtccagcttcactgggacgaaaatcgtacatttgaagtaactgaagacgagagcaaagagaagtattactgcctgtcgatgcttccttatccttctggtcgactacacatgggtcacgtgcgtaactacaccatcggcgacgtgattgcccgctaccagcgcatgctgggcaaaaacgtcctgcagccgatcggctgggatgcgttcggtctgccggcagaaggggcggcggtgaaaaacaacaccgcgccagcgccgtggacctacgacaacatcgcctacatgaaaaaccagctcaaaatgctgggcttcggctatgactggagccgcgagctgcgacctgcaccccggaatactaccgctgggagcagaagttcttcaccgagctgtacaaaaaaggcctggtgtacaaaaaacctccgcagtgaactggtgcccgaatgaccagaccgtgctggccaacgaacaggttatcgacggctgctgctggcgctgcgataccaaggtcgagcgtaaagagatcccgcagtggtttattaaaatcaccgcctacgccgatgaactgctgaacgatctggataagctggaccactggccggacaccgtgaagaccatgcagcgcaactggatcggccgttcggaaggggtagaaatctcctttgacgtcaacgactacgctgacaaactgactgtctacaccacccgtccggacacctttatgggttgtacctacctggccgtcgcggcgggtcacccgctggcgcagcaggctgcggcgaataatccggcgctggccgcctttatcgacgagtgccgcaataccaaagtggccgaagccgacatggcgacgatggagaaaaaaggcgtcgataccggctttaaagccattcatccgctgaccggtgaagaaattccggtctgggcggcaaacttgtgctgatggaatacggcaccggcgcggtaatggccgttccgggtcacgaccagcgcgactacgagttcgccagcaagtacggtctgaacattaagccggttatcctcgctgccgacggctccgagccggatctctccgagcaggcgctgaccgagaaaggcgtcctgtttaactccggcgagttcagcggtcttgattatgaagcgggcttcaacgccattgccgacaaactggctgctatgggcgtgggcgagcgtaaagttaactaccgtctgcgcgactggggcgtatcccgtcagcgctactggggcgcgccgatcccgatggtgaccctggaagatggcaccgtgctgccgaccccggaagatcagctgccggtgatcctgccggaagacgtggtcatggacggcatcaccagcccgatcaaagccgatcctgaatgggccaagaccaccgtcaacggccagccggcgctgcgcgaaaccgacacctttgatacctttatggaatcctcctggtactatgcgcgctacacctgcccgcagtatcaggaaggaatgctggattcgaaagcggccaactactggctgccggtagatatctacatcggcggtatcgaacacgccatcatgcacctgctctacttccgcttcttccataagctgatgcgcgacgcgggcatggtgaactccgatgagccggcgaaacagctgctgtgccagggcatggtgctggctgacgcgttctactatgtgggcgaaaacggcgaacgtaactgggtttccccggttgacgccatcgttgagcgcgacgaaaaaggccgcatcgtgaaggccaaagacgcggcgggccacgagctggtgtacaccggcatgagcaagatgtccaagtcgaaaaacaacggcatcgacccgcaggtgatggttgagcgctacggcgcggataccgtgcgtctgttcatgatgtttgcgtccccggcggatatgaccctcgagtggcaggaatctggcgttgaaggggcgaaccgcttcctgaaacgcgtctggaaactggtctacgagcacaccactaaaggagaggttgcggcactgaacgtggcggctctgagcgaagatcagaaagcgctgcgtcgcgatatccacaaaaccatcgccaaagtgaccgatgacatcggccgtcgtcagaccttcaacaccgccatcgcggcaatcatggagctgatgaacaagctggcgaaagcgccgcaggaagatgagcaggatcgtgcgctgatgcaggaagctctgctggcggtggtgcgtatgctcaacccgttcacgccgcacgccagcttcaccctgtggcgtgagctgaacggcgaaggcgatatcgacaacgcgccgtggccggtagcggatgagagcgcgatggtggaagacagcaccctcgtcgtcgtccaggtcaatggcaaagttcgtggtaaaattaccgttgcggtagatgcaactgaagagcaggttcgcgagcgcgccggccaggaacatctggtggcgaaatatctcgacggtaaaaccgtgcgtaaagtgatttacgttcccggtaaactgctcaatctggtcgttggctaa

SEQ ID NO: 23586 - DNA, 963 bp, Klebsiella pneumoniae
atgagtaaacccattgtgatggaacgcggtgttaagtaccgcgacgccgataaaatggcccttatcccggtgaaaaacgtggcaactgagcgtgaagctctgctcagaaaaccggaatggatgaaaatcaaacttccggcagactcgtcccgtatccagggaatcaaagcagcgatgcgtaagaacggcctgcactctgtgtgcgaagaggcctcctgcccgaaccttgcagaatgcttcaaccacggtaccgcgacctttatgatcctcggcgcgatctgtacccgccgttgcccgttctgcgacgtcgcgcatggacgcccggtcgcgccagatgcaaacgagccacaaaagctggcgcaaactatcgccgatatgggtctgcgctatgtcgtagtcacctcggtagaccgtgacgacctgcgtgatggcggcgcacagcattttgccgactgcatcagcgccattcgcgagaaaaacccgtcgattaagatcgaaacgctggttccggatttccgcggccgcatggatcgcgcacttgatattctgacggtgaccccgccggatgtcttcaaccataacctcgaaaacgtgccccgtctttatcgtcaggtacgtccgggcgcggattacaactggtcgctgaagctgctggagcgttttaaagaagcgcacccggagatcccgacgaaatccggcctgatggtaggtctgggcgaaaccaacgacgagatcatcgaagtgatgcgcgacctgcgtcgccatggcgtcaccatgctgacgttaggccagtatctgcagccgagccgtcaccacctgccggtgcagcgctacgtcagcccggaagagtttgaagagatgaaagcggaagcgatggcgatgggcttcacccacgccgcctgcggtcccttcgtccgctcttcctatcatgccgacctgcaggctaaagggatggaagttaaa

SEQ ID NO: 23587 - DNA, 894 bp, Klebsiella pneumoniae
atgtttcgcatcctgcgtaatattgacctcaatctgttgacgatctttgaagcggtatacgtacataaaggtatcgtcaacgccgcgaagatactcaatatcacaccgtcggcgattagccagtcaattaacaaactgcgggcgttgttccccgatccgctatttatccgcaaaggacagggcgtcacccccaccgcctatgccacccatcttcatcaatacatcagccgcggcatggaagctttcctcagcgcgctggatatcaccggtagcccgcaccagcagcgggtgatcactatcgccactacgccagcgatgggagcgctgctgatgcctggcctggccagcgcgctgaagccgacctttccgcagatcctgttgcacaatatcgccatcgtcgacgccgcgcggcagcttgaccagcgccaggtggatctgctcattgatacccacctgcacagcggccaggcgataagccatcatgtgctgtatcaggatcgggtacagatgtactgccgcgcagggcatcccgcgctggacggtccgcaggatgaaacgaccctcgcggagtacgaatttgcgctgctgctgccggaaggccagcgctaccccaccctccatcgccgactacaggaagagatgggcgagcgccgctgcggctttagcacctttaacctgatgacccaggcggcgatgatcgccggaagcgatatgctgggtctgaccaccgaacgcctgttcgccatggtgtcccgtctctggccgctgcagaccctggatttcccctccctcggtgaagagcagattgacgttgcgctgcactttaataagctgagcgggaaagagccattgctgaaagagatcatcgagacggtgatccgttcgtttaaggcg

SEQ ID NO: 23588 - DNA, 465 bp, Klebsiella pneumoniae
gtgaagttgcagctggtggccgttggcaccaaaatgccggactgggtacagaccggctttagcgagtatctgcgccgttttcccaaagatatgccgttcgagctggtggagatccctgccggtaagcgcggtaagaacgctgatatcaaacgcatcctcgaaaaagagggcgagatgatgttagccgctgccggtaagaaccgcatcgtgaccctggatattccgggtaaaccatgggatacaccgcagctggcgcgcgaactggaacgctggaaacaggacgggcgcgacgtcagtttactggtaggcggtccggaaggtctctctcccgcctgtaaagcagcggcggaacagagttggtcgctctccaccctcaccttacctcacccgctggtgcgcgtactggtggccgagagtctttaccgggcgtggagcatcaccaccaaccacccgtaccaccgtgag

SEQ ID NO: 23589 - DNA, 1173 bp, Klebsiella pneumoniae
atgacaattcacgtaacagatgtcgccatcgtgggcggcggcatggtcggcggcgccctggcgttagggctggcgcaacagggatttaccgtgacggtgcttgagaaagcggcgccaccggcgttcgatccggcatccgccccggatgtgcggatctcggcgatcagcgcggcttcggtcggcctgctgaagagtctcggcgtctgggatgccatacgggcgatgcgcgtccatgcttatcgccgtctggagacctgggagtgggagagcgcgcacgtcgccttcgacgccgcggagctcaagctgccggagctgggctatatggtcgagaacaaggttctgcaatggggcctgtggcaagcgctggcggcgcatgaggcggttaccctgcgcgtcggtagcgaactgaaaacgatgcagcgcggcgagacgcagacggcgttgcatttgcgcgagggggagacgatccacgcccggctggttatcggcgccgacggcgctaactcccaggtgcgggagatggccggcatcggcgtgcacgcctggcaatatcagcagtcctgtatgctgatcagcgtcgaatgcgccgacgatcccggcgacagcacctggcagcagtttactcccagcggcccacgcgccttcctgccgctgttcgaccactgggcctcgctggtctggtacgacgccccggcgcggatccgtcagctgcagagcatgaccatggcgcagctccagcaggagatcgccagtcactttccggcgcggctgggacgggtgacgccgcaggcggccggcgccttcccgctcacccggcgtcatgcgctgcagtatgttcagcccggcctggcgctggtgggcgatgcggcgcacaccattcatccactggcggggcagggggttaaccttggctatcgtgatgtcgatgccctgctggagatcctggcggaagcgcgcggccgcggcgaagactgggccagcctgccggtgctgaagcgctaccaggcgcggcggcgagcggataattttatcatgcagtcggggatggatctgttttatgccggtttcagcaatgacttagcgccggtgcggatgctgcgtaatattggcctgatggcggctgaacgcgccggggggctgaagcgtcaggcgctgaagtatgccttaggcttg

SEQ ID NO: 23590 - DNA, 909 bp, Klebsiella pneumoniae
atgcaattacgtaaactggccacggcaatgctggtaatgggaatgaccgctggtctggcgcaggcggaagatgctgccccggcggctggccagaacaccctggataagatcgccaaaaacggggttatcgttgtcggccatcgtgaatcttcggtcccgttctcttactacgataaccagcagaaggttgtgggctactctcaggattattccaacgccatcgtcgatgccatcaagaaaaaactgaacaaacccgatctgcaggtcaaactgatcccggtcacctcgcagaaccgtatcccgttgctgcagaatggcacctttgatttcgagtgcggctcaaccaccaacaaccttgagcgccagaaacaggcggccttctccgataccatcttcgtggtcggtacccgtctgctggtgaagaaaggcggtccgatcaaagatttcccggacctgaaggataaagcggtcgtcgtcacctccggaaccacctcggagatcctgctgcataagctgaacgatgagaaaaaaatgaatatgcgcattatcagcgccaaagatcatggcgactctttccgcaccctggagagcggacgcgccgtggcctttatgatggatgatgccctgctggctggcgaacgcgccaaggcgaagaaaccggataactgggaaatcgtcggcaccccgcagtcgaaggaagcctatggctgcatgctgcggaaggacgatccgacgttcaaggcgctggttgatgaaaccgtcgcccaggctcagacctctggcgaagcggagaagtggtttgacaaatggttcaaaaacccgattccgccaaaaaatcttaacctcaacttcgagctgtcggacgacatgaaagcgctgttcaaatcacctaacgacaaagcactgaac

SEQ ID NO: 23591 - DNA, 1536 bp, Klebsiella pneumoniae
atggtatttgcctctcttcttgaacgccagcgcatacgtctgttgctggcgctgttgtttggagccagcggaacgctggctttttcaccttatgacttctggccagcggctatcgtttcgctgatcggtctgcaggcgttaaccctcaaccgacgcccgctgcaaagcgccgggatcggctatttctggggactcgggctgttcggcacgggtatcaactgggtctatgtcagcatcgcgcagtttggcggaatgcccggcccggttaacgtcttcctcgtcgttctgctggcggcctatctctcgctctacaccggcctgtttgccggcctgctcgcccgtctgtggcctaaaactaactggatacggatggctatcgctgcccctgtcgtctggcaaatcaccgagttcctgcgcggctgggtgctgaccggctttccgtggctacagttcggctacagccagattgacggcccgctgaaaggtctcgcgccggtgatgggcgtcgaggcgattaacttcctgctgatggtagtcagcggcctgctggccctggccctcgtccagcgcaactggaagccgctggcgattgccgcgctgctgttcgccctgcccttcccgctgcgctatatccagtggtatcagctgctgccggcgcgcgcgacccaggtctcgctggtgcaaggcgatatcccacaggccatgaaatgggacgaaaagcagctggtcaataccctgaaaacctacctggcgctgacccagccgcatatcggccactcgcagctgattatctggcctgaatcggcgatcccggatctggagatcaaccagcagcagttcctcagcatgatggacgatctgctgcgcgcaaaagacagctcgctgatcaccggcattgtcgatgcgcgtctcaacaagcagaaccgttacgatacctacaacaccatcattactcttggcaaagataacccgtaccgctacgactcgaccaaccgctacaacaagaaccatctggtgccgttcggcgagtttgtaccgctggagtcgattctgcgtccgctggcgccgttctttgacctgccgatgtcctccttcagccgcggcccctacgtgcagccgcagctgatggcgcataacctgaagctgaccgcggccatctgctacgagataatcctcggtgaacaggtgcgggataacttccggccggacaccgacttcctgctgaccatctccaacgacgcctggttcggcaagtccatcggcccgtggcaacacttccagatggcgcgaatgcgcgccctggagctggcccgcccgctgctgcgcagcaccaacaacggcattactgcggtgatcggcccgcgcggcgagatccagaagatgatcccgcagtttacccgcgaggtgttgaccaccaccgtgacccccaccagcggcttaaccccttacgcccgcaccggcaactggccgctatgggcgctgacggcgctgtttggtttcgccgcgctgctgatgagcctgcgccagcgtcgccga

SEQ ID NO: 23592 - DNA, 903 bp, Klebsiella pneumoniae
atgcgtatatttcttaccggcgcgagcggatttatcggctcacgtattcttccggcgctgcaggcgtcgggccatcaggttatcggcctcgcgcgcagcgagagcaccgcacaggccctgaaggcggccggcgccgaggtgcatcgcggcacgctggatgccccggagtcgctgctggctggcgtcgggaacgccgacgcggtgatccataccgccttcgaccacgacttcagccgctttgccgctaactgcgagaaagaccgccaggcgatcctggccctgggccaggcgctgcgaggcagcacgcggccgctggtgatcacctccggcacgctgatgggcgacgacgggagcggcgccccggcccgggagtcgttcttcaactcagggcactccagcccgcgcaccgcctcagagctcgccggccagcagttgctggaggcgggagtggatgtcagggtggtccgcttaccgcaggtgcatgacaccgtgcgtcagggactgctgacctgctacatcgaacgcgcgatcgccaacggggcggtagccctgcgcggcgagggaagcaaccgctggtcagccgcccatgtcgatgacgtcgcacgtctgtatgtcagcgcgctgcttcagggcgcggccggcgagcgctatcatgcggtggccgaagaggggatcgcattacgcgatattgccgcggtaattgcccacggattaaacctgccgctgacccacctggatgagtcgcaggtcgacgcctggttcggctggtttgcgccgtttaccgcccttgacctgcgcgccagctcggcatggacccgcgagcgcttgcagtggcagccggttggccccgggctgctggaggacctgcagaacatggactatcataaagtgacactgtcacaa

SEQ ID NO: 23593 - DNA, 2319 bp, Klebsiella pneumoniae
gtggagcagcatgcaggcgactttagcgtcaccgtacgcgatgtgcgtcagctgacccagccggaaagcgatctgctgacgctgctgtgggtgctggagggaagcgtaaatctggcggtggcggaaggtgcgtcgcagccgctcgtcgccgacgggctggcgatcgttaaccgcaaccgtcgctggagcctgcgcagcgccggggccaacgccgtgatgatcctcaccctctccgccagctggctggcccgcctcgataatgccttttttgccgtcgattaccagataacgccgcgcacccgggatgccgatgacggcctgcgtcgcctgatgcgccagctgctggtgagcggcctggtcaatcatcctggccattaccgactggaggccaaccgctggctgagtgagatagcgctgctgctggccacgcgctttagccagcccatcgcctccacgccccggcgcgataccgaaaaatggagccggagaatagccagcgtggtggcgcggatcgacgctaactatcagcgtcgcctctcgttgcaggaggtggcggccgcggaatttgtctccgaggcctggctgtcacgcttatttcgcaaagaggtcggggtaagttttgtccagtacctcaccgcgctgcgcctgcgccacgccgccgaccagctattaaccacccgcaaaaccgtccagcaaatcgcccgcgaacagggattcgccagtacgcgaatgatgagcgatttgtttaagcgccagcacggcgtgacgccgcgccagtatcgtgaacagcatcctctggagcttgcccgaccgcgcccgccgcaggccgatcgctggcagccggtggcggccgaccggctgtatgcgcgactcaatgagccggaaccacgcgaccgggaaagtccccccctgccgatcaacccaccgcagacccgggagatcaatctgcgcgatcgtccagcgcgccccgcagcgctgcgccatacccggatggtggtgaccgtgcgcgaactggacgatctgctgcgcgaagatgtgcgccgggaactcgaacagctgcaccacgccctgccggtgtatgccatcgatatcaacgatccctttctcagcagtcggctgttcggcaccggctgggacgatccgcagatggccggctacgcctgctggtacaacctgcagcagatttttagctggctggcggagatgggctggcaggtgatcctgcacaccggcgtcaccacccgcagtgacctgctgcagcgcttcctgcagctcgccgccaaccattttccgccagccacgctcaacagctggcgctttgtctggcactggtcgccgcaggccagcgaagctgcgcgccaggccgcctggcggcagcagcgcggggtccttcatcgcctgctgccgcagccgcagctggggatctggcaccgctttgctcccagcgatcccgggaacgatccgctgttccactcgccgctgctggcagaggcggattttctcgcctgccaggcagatgccaacgaacagctggatctggcccaggcagacagcagccgcctggcctccagcgaacattacccgctgcacaagctgcggcagatccacagcgccctgcgccagcgtcagctcaacctgccgctgtggctgctctcctggaatacgctgaccggcgatacgcgggataccaacggccgcttttttcgcggcgcgctgctgatggataatctgctgggggtggcggaccaggtctggctggcgggcttctggttaaattcaggcctccagggcgaagctcgcgccaacggcaagctcgatacctccagcctggcgctgcactatctgcacggcctgccgcgcccggtttactgggtactctggctctggcggcggctgcgcggcgagatcctggttcacgataaaaacctgctgctgctccaccaccagggtcactaccagctgctgctgcgcaatacggtggtctacaatccctggctctccagcgaagcggcctttatccagcgcttcagccagctctacagcgtgcggctgcagggcctggatggcagctggcgcatcaaacagcacctgttcgatcagcaccacggcgcgttgttcccgctggtggacgcctttcgcagccgcagcggccctgacgccgaggattatcagtggctgatgcatcaggcccgtccggcgctcagcgtggatgaagccaggctcgatggctattggctgcggatcgactcgctgcagagcaatgcgctggtgctgtatgaatttacccctcagctctcctccggcgcggatcccgccccc

SEQ ID NO: 23594 - DNA, 1590 bp, Klebsiella pneumoniae
gtgctagtatccagcaacgttaccatgcagtttggcagtaagccgctgttcgaaaatatctccgttaaatttggcggcggcaaccgttatggtctgatcggcgccaacggcagcggtaaatcgacctttatgaagatcctcggcggcgatctcgaaccgacgctgggcaacgtttctctcgacccgaacgagcgcatcggtaagctgcgtcaggatcagttcgcctttgaagcgttcaccgtgctggatacggtcatcatgggccacggcgagctgtgggaagtgaagcaggagcgcgatcgtatctacgccctcgctgagatgagcgaagaagatggctacaaagtggccgacctggaagtcaaatatggcgaaatggacggctactcggcggaagcgcgcgccggcgaactgctgctcggcgtcggcattccggttgaacagcattatggcccgatgagcgaagtcgcgccgggctggaagctgcgcgtcctgctggcgcaggcgctgttttccaatccggatatcctgctgctcgatgaaccgaccaacaacctggacatcgacaccattcgctggctggagcagacgctgaacgatcgcgacagcactatgattatcatttcgcacgaccgtcacttcctgaacatggtctgcacccacatggcggatctcgactacggcgagctgcgcgtgtatccgggcaactacgacgaatacatgaccgcggccacccaggcgcgtgagcgtctgctggcggacaacgccaagaaaaaagcgcagattgcggacctgcagtccttcgttagccgcttcagcgccaacgcctctaaatcgcgtcaggccacctcgcgcgcgcgccagattgacaaaatcaagctggaagaggttaaagcctccagccgtcagaacccatttatccgcttcgagcaggataagaaactgttccgtaacgcgctggaagtggaagcccttaccaaaggctttgatgaaggtccgctgttcaaaaacgtcaacctgctgctggaagtgggcgaaaagatcgccattctgggcgccaacggcgtgggtaaatccaccatgctgaaaaccctggtaggcgaactgcagccggacaacggcagcgtgaaatggtctgaaaacgcgcaaatcggctactacgcgcaggaccatgagtacgagttcgaaaacgacctgacggtcttcgaatggatgagccagtggaagcaggaaggcgacgacgagcaggcagtacgcagcatcctcggccgtctgctgtttagccaggacgatatcaaaaagccggcgaaggtactttccggtggcgagaaagggcgcatgctgttcggtaagctgatgatgcagaagccaaacatcctggtgatggacgaaccgaccaaccacctggatatggagtcgattgaatcgctgaacatggcgctggagatgtatcagggcaccctgatctttgtctcccacgaccgtgagtttgtcagctcgctggcgacccgcgtcctggagatcactccggaccgcgtgatcgacttcagcggcaactacgaagactacctgcgcagcaaaggtatcgag

SEQ ID NO: 23595 - DNA, 753 bp, Klebsiella pneumoniae
atgaccgttgagctgagcgatgaagagatgctgcgctataaccggcagatcgtcttgcgcggttttgattttgacggccaggagcggttaaaagccgctcgcgtgctggtggtcggcctcggcgggctcggctgcgccgccgcgcagtatctggccgccgccggggtcgggcagctcaccctgctcgatttcgacactgtctcgctctccaacctgcagcgccagacgctgcacagcgacgccaccctcggccagccgaaggtggattccgcccgcgaggcgctggcgcgcattaacccgcacgtccgtctggtcccgctcaatgccttgctggatgagaccgcgctggcggcgcagattgccgatcacgatctggtgctcgactgcaccgacaacgtcgccattcgcaaccagcttaacgtcggctgctttcagcacaaaaccccactggtctccggagcggcgatccgtatggaggggcaaatcagcgtctttacctatcaggatggcgaaccctgctaccgctgcctgagccgtctgttcggcgaaaatgccctcacctgcgtcgaagccggggtaatggccccgctggtgggcaccatcggttcgctgcaggcgatggaggcgattaagctgctgagcggctacggcacccctgccagcggaaaaatcgtcatctacgatgccatgacctgccagtttcgcgaaatgaggctgatgcgtcacccgcagtgcgaggtatgcggctcgcac

SEQ ID NO: 23596 - DNA, 1233 bp, Klebsiella pneumoniae
atggattttaccgccggactgatgccgctcgacacagccctcgcccagatgctcgatcgtattacgccgctgaacgcgacggaaactgtaccgctgttgcaggccatctcgcgtgtgaccgcccatgacatcgtctccccgctggatgtgcccggctttgataacgcggcgatggatggctatgccgtccggctgaacgaccttcgcgacggcgcggcgctgccggtcgccggtaaggccttcgccggccagcctttcaacgacgcctggccgtcgggcacctgtatccgcatcatgaccggcgcgccggtgccggaaggctgcgatgcggtggtgatgcaggaagagactgaacagaccgaggccggcgtgcgctttatcgcgccggtaaaagccgggcagcatattcgccgccgcggagaagatattgcccacggcgcggtggtcttcccggcggggacacccctgacggtggccgagctgccggtgctggcctcgctcggcattgccgaggtcgaggtggtgcgcaaggtacgcgtcgcggtcttctcaaccggcgatgagctgcagctgccgggtcaaccgctcggcgacggccagatttacgataccaaccgcctggcagtgcacctgatgctgcagcagttgggctacgaggtcattaacctcggcattattcctgacgacccggcgaagctgcgtgacgcttttatcgacgccgaccagcaggccgatgtggtcattagctccggcggcgtctcggtgggtgaagccgattacaccaaaactatcctcgaagagctgggggagatcggcttctggaagctggcgattaagccggggaaacccttcgccttcggcaagctcagcagcagctggttctgcggcctgccgggtaacccggtgtccgccaccgtcaccttctgtcagctggtgcaacccctgctggcgaaactctcgggcaagcacggcccgcttcaggcgccccgcctgcgggtccgcgccgccacgcgcctgaaaaagtcgcctggccgcctcgattttcagcgcggtattctgcagcgcaacccggacggcgaactggtggtgaacaccaccggccatcagggctcgcacattttcagctccttcagcctcggcaactgctttatcgtgctggagcgtgagcgcggccatgttgaagcaggtgaatgggtcgaggtcgaacccttcagtcacctgtttggggggctg

SEQ ID NO: 23597 - DNA, 815 bp, Klebsiella pneumoniae
atgaccgttaaagttatcgtcaccgatatggacggaacttttctcaatgacgccaagcagtacgaccgcccgcgtttcctcgcccagttgcgcagctcaggcagcaaggtattgaattcgttgtcgccagcggcaaccagtactatcagctgatctcatttttcccggaaattcgcgagcagatttcattcgtcgcagaaaacggcgctctggtttatgaacatggcaagcagctgttccacggcgaactgacccgccacgaatcacaagtggtgattggcgaattgctcaaagatccgcagctcaactttgtcgcctgcggcctgcagagcgcctacgtcagcgataaagctccggacgcctttgttgagctgatgtcgaagcactaccatcgcctacagcgggtgagcgactatcacgccatcgacgatacgctgtttaaattctctctcaacctgccggacagcgagatcccacaactgattgataaactgcacgtgtcgctcgacggcatcatgaagccggtcaccagcggctttggctttgtcgatttgattatccctggcctgcataaagccaacggcatcagccgtttgctcaagcgctgggatctttcgccgcagcaatgcgtcgccatcggcgacagcggcaatgacgccgaaatgctgaagctggtgaaatacgctttcgccatgggtaacgctgccgacagcatcaaggccatcgccggctacgctaccgacgataataaccatgacggcgcgctgaacgttatccaggccgtcctcgataacaccccgcccttcaacgcctga

SEQ ID NO: 23598 - DNA, 2432 bp, Klebsiella pneumoniae
atgactaccctgaagctcaacaccctcagcgcccgtatccaggcccataaaatggcgctggtgcatatcgtcaagccgccggtctgtaccgagcgcgcccgccactatacggagatgtatcagcggcatctcgataaaccgatcccggtgcgccgcgcgctggcgctggctcaccacctggcggagcgcaccatctggatcaagcacgatgagctgatcgtcggtaaccaggccagcgaagtacgcgccgcgcctattttcccggaatacaccgtcagctggattgagaaagagatcgacgatctcgccgaccgccccggcgccggcttctcggtcagcgaggagaataaacgcgtattgcatgaagtgtgcccatggtggcgcggccagaccgtacaagaccgctgttacggtatgttcaccgatgagcaaaaggcgctgctcgccaccggcattattaaggcggaaggcaatatgacctccggggatgctcacctcgcggtcaactaccccctgctgctggagaaagggctcgacgggatgcgtgcgaaagtcgccgaacgccgctcgcgtatcaatttgacggtactggaagacctgcacggcgagcagttcctgaaagcgattgatatcgtgctggaagcggtcagcgatcacagcaaacgcttcgccgcgctggcgcgcgagatggcgacagcagaatcccgcgaatcacgccgccacgaactgctgacgattgccgaaaactgcgacgtcatcgcccatgagccgccgaaaaccttctggcaggcgctgcagctgtgctacttcattcagcttatcctgcagattgaatccaatggccattcggtatccttcggccgtatggaccagtacctctacccgtactaccgccgcgacgttgagttgcaacagtcgctggatcgcgaacaggccattgagctgctgcacagctgctggctgaagctgctggaggtcaataagatccgttccggctcgcactccaaagcctctgccggcagcccgctataccagaacgtcaccatcggcggccagaatctggtggatggtaagccgcaggacgcggtcaacccgctatcgtatgcaatcctcgaatcctgcggtcgcctgcgttctacccagccgaacctcagcgtgcgctaccacgccgggatgagcaacgacttcctcgacgcctgcgtccaggtgatccgctgcggtttcggcatgccggcgtttaacaacgatgaaatcgtcatcccggaattcattaagctgggcattgagccgcaggacgcctacgattacgcggctatcggctgtattgaaaccgcggtcggcggtaagtggggctaccgctgtaccggcatgagctttattaacttcgcgcgggtgatgctggcgacgctggaaggcggccgcgatgccaccagcggtcaggtgttcctgccgcaggagcacgccctgtcgaaaggcaacttcgctatcttcgatcaggtgctggccgactgggaccgccagattcgttactacacccgtaaatccatcgagattgagtacgtggtcgataccatgctggaagagaacgtccacgatattctctgctcggcgctggtcgatgattgcatcgaacgggcgaaaagcattaagcaggcggcgcgaagtatgactgggtttccggcctgcaggtgggtatcgccaacctcggcaacagcctcgcggcggtgaaaaaactggtcttcgatcagggcgccatcggccagcaggagctggcgaaggcgctggcggaagatttcgacggtctgacccacgagcagctgcgccagcggttgatcaacggcgcgccgaagtatggtaacgatgatgacagcgtcgaccaactgctggcgcgggcctaccagacctatatcgacgagctgaagcagtatcacaacccgcgctatggccgcggcccgattggcggcaattattacgctggcacctcctctatttccgctaacgtcccgttcggcgcgcagaccatggcgacgccggatggccgtaaagcgcataccccgctggcggagggggccagcccggcctccggtaccgatcatctggggccgacggcggttatcagttcggtgggcaagctgccgaccggggcgatcctcggcggcgtgctgcttaatcagaagctgaatccgtcaacgctggagaacgagtccgataagcagaagctgatggtgctgctgcgcactttcttcgaggtgcacaaaggctggcatatccagtacaacatcgtgtcgcgcgacacgctgctggaagccaagaaacatcctgaccagtaccgcgatttagtggtccgcgtcgctggatactcggcgttcttcaccgccctgtcgccggatacccaggacgatatcatcgcccgtaccgaacatacgctgtaa

SEQ ID NO: 23599 - DNA, 909 bp, Klebsiella pneumoniae
gtgcgattgcttaactggagaaggcaggcggcgctgaacgccatgccgggcatcagacccggcgagatccataccccctggcatgagttctggcggcgctttcgtcgccagccggtggcgatgggcgctggtattttcgtgctgttgctgattgcggtagccatcgttgccccatggatagcgccgtacgatgcggaaaattatttcgactacgaccgtctgaacgagggaccttcgctggtgcactggttcggagtcgactccctgggacgggatattttcagccgggtgctggtcggggcgcagatctcgctggccgccggggtactggcggtgctgattggcgcggccatcggcacggtgcttgggctgctggctggctactatgagggctggtgggaccggctcattatgcgactttgcgacgtgttgttcgcctttccggggatcctgctggcgatcgcggtggtcgccgtcatgggcagcgggatggccaacgtgatcatcgccgtggcgatcttctcgatcccggcgtttgctcgtctggtgcgcggcaatacgctggttctgaagcagcagacctttattgaatcggcgcgcagcatcggcgccagcgacgccaccattctgttcaaccatattctgccggggacggtgtcatcgatcgtggtttatttcaccatgcgcattggggtatcgattatttcggcggccagtctgtcgtttctcggcctcggcgcgcagccgcccaccccggagtggggcgcgatgctcaacgaagcgcgggcggatatggtgatgtctccgcacgtggcgctctttccggcggtggcgattttcgtgaccgtgctggcgtttaatctgctgggagatggcctgcgcgatgcgctggatccgaagttaaagggg

SEQ ID NO: 23600 - DNA, 1323 bp, Klebsiella pneumoniae
atgagcaatgtcacgcatcagccgaaaatcggcttcgtctccctgggctgcccgaaaaacctcgtggactcagagcgtatcctgaccgaactgcgcaccgaaggttatgacgtcgtaccgacctacgacaacgccgatatggtgatcgttaacacctgcggctttattgatagcgctgtgcaggaatcgctggaagcgatcggcgaagcgttgaaagagaacggcaaggtaatcgtcaccggctgtctcggcgcgaaagaggatcagatccgcgaagtgcatccgaaggtgctggagatcaccggtccgcacagctatgagcaggtgctggagcatgtccaccattatacgccgaagccgaagcacaacccgttcctgagcctggtgccggaacagggggttaagctgacgccgcgccactacgcctacttaaaaatctctgaaggctgcaaccatcgctgcaccttctgcatcatcccgtccatgcgtggcgatctggtgagccgtccgattggcgaagtgctggccgaagccaaacgcctcgctgacgccggcgtgaaagagctgctggtgatttcgcaggacacctccgcctacggcgtcgacgtcaagcaccgcaccggcttccacaacggtatgccggtgaagaccagcatggtcagtctgtgcgaagagctggcgaagctcggcatctgggtgcgcctgcactatgtctatccgtacccgcacgttgacgatgtgatcccgctgatggcggaaggcaagattctgccgtacctcgatattccgctgcagcacgccagcccgcgtattctgaagctgatgaagcgtccaggttctgcggaccgtcagctggcgcgcattaagcagtggcgtgaaatttgcccggatctgaccctgcgctccacttttattgtgggcttcccgggcgaaacggaagaagatttccagatgctgctcgacttcctgaaagaggcgcgtctcgaccgcgtcggctgcttcaagtacagcccggttgaaggcgctaccgccaacgagctggcggaccaggtgccggaagaggtgaaagaagagcgctggaaccgctttatgcagctgcagcagcagatctctgccgagcgtctgcaggagaaagtggggcgcgaaatcctggtgctggtagatgaagttgatgaagaaggcgccattggccgcagcatggccgacgctccggaaatcgacggcgcggtgtacctgaacggcgaaacccgcgttaagccgggcgacgtggtgcgggtgaaagtcgagcacgccgacgaatacgacctgtggggtacccgggtc

SEQ ID NO: 23601 - DNA, 396 bp, Klebsiella pneumoniae
atgacaacaacagatctcgccccaaagggcgaaatggttttacgcaccctggcaatgccggcggataccaatgccaacggggatatttttggcggctggctgatgtcgcagatggatattggcggcgccattatggccaaagagatcgcccagggtcgcgtggtgaccgtgcgggtggatgggatgacctttttacgcccggtcgccgttggcgacgtggtgtgctgctacgcccgctgcgtgaagcgcggcaacacctcggtgacaatcaatatcgaagtgtgggtgaaaaaagtttcttcagaaccgattggccagcgctacaaggcgacggaagcgctgtttatctacgttgccgttgataatcagggaaaaccacgtcctctgccagcggaa

SEQ ID NO: 23602 - DNA, 963 bp, Klebsiella pneumoniae
gtggaacattttctggcattaaccctggcggggcgtttgccccatcactttcacggcgagacggcccatttccgctggcactggctcggggaagggatccttgagctgacgccgcatgcgcgctgcgaacgcgggctggtactttcctgcgccattcatggcaacgaaacggcgccggtggagatagtcgaccagctggtgcagcgactggtccgggaggcgctcccgctgcgctggcggctgctggtgatcgtcggcaacccaccagcgctgcgggcgaataagcgctatctgcacagcgatatgaaccgcatgtttggcgagcgctggcggcagtttccgctcagtgaggagacgcagcgggcgcagcggctggagcaggcggtggcccgcttttatcgcgaccacgatggcccgcgctggcacctcgatctgcataccgcgatccgcgggtcgctacatccgcgcttcggcgtgctcccggcccgcgatacgccgtgggaggaggattttcttcactggctgggcggcgccgggctggaggcgctggtgtttcatcgccagcccggcgggaccttcacccacttcagctgcgaacggttcgcggcgctggcctgcacccttgagctgggcaaagcgctgccgttgggggaaaacgatctgacgcagtttgccgccgtccagcgggcgttctcccggctgctggtgggagatctggccattgccgacgccccggcgccgctgcgctaccgggtggtacagcagctaacccgccatagtgatgatttccgcttgcatatggcggatcagacgctgaacttcacccccttcgaacccggcacgctgctggcggaggagggcgagacgcggtatgtggtgggacctgagccggagtatgttctgtttcccaatccgaaggtggcgaaaggactgcgcgctggcctgatgctggagaaattatcc

SEQ ID NO: 23603 - DNA, 1476 bp, Klebsiella pneumoniae
atgagtctgtggattaacggcgagtggcggcccggccgtgggccaggtttcagtaaacaggatccggttaacctgaaggttgtctggcagggcgaggcggcggatgccgggcaggttgccgaggcggtggcggctgcccgccaggcgttcccgtcctgggcgcggctgccgtttgccgcccgtcaggcgatcgttgaaaagtttgccgctctgctggaagccagtaaggcggagctgacggcggttatcggcgccgagaccggaaagccgcgctgggaggcggccggggaagtgacggcgatgatcaacaaggtggcgatctcggtgaaggcctaccacgtccgcaccggcgaacagcacagcgatctgcccgacggtgccgccacgctgcgtcaccggccgcacggcgtactggcggtgtttggcccctataactttcccggccatctgccgaacgggcacatcgtgccggcgctgctggcgggcaataccgtggtctttaaacccagcgaactcaccccgcgcagcggcgaagcagtggtgaaactatggcagcaggccggcctgcccgccggggtgctcaacctggtgcagggcggtcgggaaaccggcgaggcgctcagcggccaggcggatatcgacggactgctgtttaccggcagctcaaccaccggttttcatctgcatcgccagctggccgggcaaccgcagaagatcctcgcgctggagatgggcggcaataacccgctgatcgtcgacgatccgcgggacgtggatgccgcggtgcatctgaccatccagtccgcctttattaccgctggccagcgctgcacctgcgcccggcgtctgctggtccgacgcggagaggcgggcgatgtcttcctctcccggctggtgacggtgagccaacggctgatcccggcagcgtgggacgccgagccgcagccgtttctcggcgggcttatctctgaacaagccgcgcagaaagtgcatcaggcctggctgcagcgggtcgccgctggcgcggtcaccctgctggagccgcggttattgcaggccgggacgtcgctgctaacgccggggattgtcgacatgagcgacgtggccaatgtcgaagatgaagaggtgtttggcccgctgcttggggtctggcgctacgacactttcgaggaggcgattgccttagccaacgctacccgcttcggcctctcctgtgggttaatctccccggaacgggagaagttcgatcgactgctgctcgaggcgcgggcagggatagttaactggaacaaaccgctgaccggggcggcgagtaccgcgccgttcggcggcaccggggcgtccggtaaccatcgtccgggggcctggtatgccgccgattattgcgcctggccgatggccagccttgaatcgccgaccctgacgctgcccgccagcctgagcccggggctcgactttctggccggggaggcgtca

SEQ ID NO: 23604 - DNA, 2256 bp, Klebsiella pneumoniae
atgtctgataagcacccgaaccctcaccaacagcaggcaccggtccacgacagcgaggaagcgcagccgggtctcgattcgctggcgccggacgatcgggagtggcgccccacgccgaaacctaccgctccgggcgtcgaacccaccgccccaggcagcctgaaagcgcccgatactcataacagcaaactggattccctggaggcgcaacgcaaagggggggaagattttccgctgaccaccaaccagggcgtgcgcattgctgacgatcagaattcgctgcgcgccggtagccgcggcccaacgctgctggaagattttatcctgcgggagaagatcacccactttgaccacgagcgtattccggagcgtatcgttcatgcccgcggctctgccgcccacggctacttccagccctacaaaagcctggctgcgttgactaaagccgattttctttcgtcagccgataaaatcaccccggtgtttgtacgcttttccaccgtgcagggcggcgcggggtcggcggacaccgtccgcgatattcgcggcttcgctaccaagttttacactgacgaagggatttttgacctggtgggcaacaacacaccggtcttcttcatccaggacgcgatgaagttccccgactttgtccacgccgtgaagcctgaaccccactgggccatcccacaggggcagagcgcccacgatactttctgggactatgtttccctgcagccggaaacgctgcacaacgtgatgtgggcgatgtcggatcgcggcatcccgcgcagctatcgcaccatggaaggcttcgggatccataccttccgtctgattaatgccgagggcaaagccaccttcgttcgctttcactggaaaccggtcgccggcaaggcgtcgctggtgtgggatgaagcgcagaagctgaccggccgcgaccccgattttcatcgccgcgatctatgggaggccatcgaagccggggactacccggaatttgagcttggcctgcaattgatccccgaagagaatgaatttgcttttgacttcgacctgctcgatcccaccaagctgatccccgaggcgctggtgccggtgcagcgggttggcagaatggtcctcaaccgcaacccggataacttctttgccgaaaatgaacaggcggccttccatcccggacatatcgtcccgggcattgatttcagcaacgatccgctgctgcaggggcgtctcttctcttacaccgatacgcaaattagccgcctgggtgggccgaacttccatgaaatccccatcaaccgtccgacctgcccgtatcataatttccagcgtgacgggatgcaccggatggacattgacaccaatccggccaactacgagcccaactcgattaacgacaactggccgcgcgagacgccgcctgccgccaaacgcggtggctttgagtccctcgccgagcgcgtcgacggcgaaaaaatccgccagcgcagcccttcgttcggcgaatattacgcccaaccgcgtctgttctggatgagccagacgccgattgaacagcagcatattatcgatggtttcagcttcgaactcagcaaagtggtccgcacctggatccgcgagcgggtggtcgatcatctggcccacattgatactaagcttgcggaagcggttggggcgaacttagggatcgaactgagcgacgatcagcgcaacattaccctgcccgccccggtcaatggcgtggagaaagaccctagcctcagcctctacgccgatgccgaaggagatgtgaaaggtcgcgtggtggcagtcctgctcaacgaacgcacctcagcgcaggatctggttcagctcctgcaggcgctgcaggcccagggcgtgcacagcaagctgctctactcgcgaatgggcgaagtcattgccgacgatggttctccgctgccgatcgccggcaccttcgccggctccccgtcgctgacggtggatgcggtggtggtgcccggcggcgacctcagcgccctgagtcagagcggtgacgcgcgctattacctgctggaagcctataaacatctgaagccgatcctgctggcaggggatgcgcggcagctgacgtccgttctgcatgttccgacccagggtgaagagggggtcatcgtcaccgatgcgctcgacacgccagcggcggacaaactgctcgccctgatgacggcccaccgcgtgtggtcgagaagcccgaaaatcgccgctattccggcg

SEQ ID NO: 23605 - DNA, 1218 bp, Klebsiella pneumoniae
atgtctcagtcaattacgcgtaaccactttgatgaatggatgatgccggtctacgcgccagcggcgtttattccggtgcggggcgccgggtcacggctgtgggatcagcagggcaaagagtatatcgattttgccggcggtatcgccgtgaacgcgctggggcatgcccatccgcgtctggtgcaagccctgaccgaccaggccggcaagttctggcataccggcaacggctacaccaatgagccgatcctgcgtctggccaaaatgcttatcgatgctaccttcgccgaccgggtcttcttctgtaattccggcgccgaggccaatgaggcagcgctcaagctggcgcgtaaatatgcccacgatcgctttggcagcgagaaaagtggcatcgtcgcctttcagaacgctttccacgggcggacgctgttcaccgtctcggcgggcggtcagccggcctattcccgggatttcgccccgctgccgccgcagatccagcatgccgtatttaacgatctcgagtcggcaaaggccttaatcaatgaccagacctgcgcggtgatcgtcgagccggtgcagggcgaagggggcgtggtgccggccagcgtcgagtttttacgcggcctgcgtcagctttgcgaccagcacaacgccctgctgattttcgatgaagtgcagaccggggtcgggcgcaccggcgagctgtatgcctatatgcactacggcgtgacgcccgatgtgctgaccaccgccaaagcgctgggcggtggtttccctattggcgcgctgctggcgacagaggcctgcgccagcgtgatgaccgtcggcacccacggcaccacctacggcggtaacccgctggccggggcggtggccggcgaactgctgtcgatcgtcaacaccccggaagtgctctccggcgtcagacagcgccatcagtggttttgtgaacgcctgcaggcaattaacgcccgctatggcctgttcaaggagatccgcggcctgggactgctgctcggctgcgtgctaaacgacgcctgggccgggaaggcgaaaaccctcagtaacctggcggcggaagagggggtgatgattctgatcgccggcgccaacgtggtgcgtttcgcgccggcgctgaacgtcagtgaagaagaggtgaacagcgggctggatcgcgtcgagcgggcctgcgcgcgtttcgtggcaggagtctcatca

SEQ ID NO: 23606 - DNA, 825 bp, Klebsiella pneumoniae
atgacgctacaacaagagattattcaggcgctgggcgcaaagccgcagattgatgtcgcaggcgagatccgccgcagcgtcgatttcctgaagtcatacctgcagacctacccgtttattaaatcgctggtgctgggtatcagcggcggtcaggactccaccctgacgggaaaactgtgccagatagcgattaacgaactgcgtgccgaaaccggcgacagtagcctgcagtttatcgccgtccgtttaccctatggcgtgcaggctgatgagcaggactgccaggacgccatcgcatttatccagcctgaccgggtgttgacagtcaatattaaagctgcggtgctggccagcgaacaggcgctgcgcgaagcaggcatcgaactgagcgacttcgttcgcggaaatgaaaaagcccgtgagcgaatgaaggcccagtacagcatcgccggaatgaccaaaggagttgtggtcggtaccgaccatgcggcggaagcgattaccggctttttcaccaaatatggcgacggcggcaccgacatcaacccaattttccgcctgaacaaacgtcagggcaaacagctgctggcccatctcggctgcccggaacatctgtataagaagctgcccaccgccgacctggaagacgatcgcccctccctgccggatgaagtggccctgggtgtcacctacgagaacatcgacgattatctggaaggcaaaacgctggacccgagcatcgccaaaacgatcgagggctggtatctgaaaaccgaacacaagcgtcggccgccgatcaccgtctttgacgatttctggaaaaaa

SEQ ID NO: 23607 - DNA, 480 bp, Klebsiella pneumoniae
atgaagaaactcactgcactgtttgttgcctctactctggctctgggcgcggctaacctggcacacgccgccgataccaccaccgcgccgagcgacagcaagccgatgatgatgcatcataaaggcggcccgggtcagcatgacatgatgtttaaaggcctgaacctgaccgatgcgcagaagcagcagatccgcgacatcatgaagagccagcgcgaaaatatgaaacgtccgtcccttgaagaacgccgcgcgatgcacgatctgatcgccagcgacaccttcgataaggcgaaggcggaagcgcagatcgataagatggaagcgcagcataaagcgatggcgctgtcccgcctggaaacgcagaacaagatctacaacattctgaccccagagcagaaaaaacagttcaatgctaattttgagaagcatctgacagaacgcaacgcgccggcaggtaaaatgcctgcacctgctgaa

SEQ ID NO: 23608 - DNA, 684 bp, Klebsiella pneumoniae
atgctgtatgggttttcacaggttattttgcagggtgcgctcgtcaccctggagcttgcgctcagctcggtcgttctcgccgtcctgattgggctggcgggcgctggcgcaaagttatcgagcaaccgtccactggcgctggtatttgaaggctataccactcttatccgcggcgtgcccgatctggtgctgatgctgctgattttctacggcctgcagattgcgctaaacagcgttaccgacgcgctgggtatggcccagtttgatatcgatccgatgatcgccgggattattacccttggcttatcgtatggcgcctattttacggaaaccttccgcggcgcctacctggcggtgccgaaggggcatatcgaagcggctaccgcctttggctttagcggcgggcagacgttccggcgtattctcttcccggcgatgatgcgctacgcgctgccggggataggcaacaactggcaggttatcctcaaggcgacggcgctggtctcgttgctggggctggaggatgtggtcaaagccacgcagctggccgggaaaagcacctggcagccgttctacttcgccatcgtctgcggcctgatttatctggtgtttaccaccgtttctaatggcgtactgctgctgctcgaacgccgctataccgttggcgtgaagagggctgacctg

SEQ ID NO: 23609 - DNA, 306 bp, Klebsiella pneumoniae
gtgcatctccagaggaaatctacgatgagtaaatgtagcgctgatgaaaccccggtttgctgctgtatggatgttggcacgattgttgacaacaccgactgcaccgcctcctacagccgcgtattcgccaaccgcgctgaagccgagcaaacgctcgccgcgttaagcgaaaaagcccgcaatgtcgaatctgagccgtgccaaattaacccaaccttcactgacgttgacggcggtgtgcagctggatatcgattttgttttcagctgcgaagcagaatccctgatcttccagctgggcttacgt

SEQ ID NO: 23610 - DNA, 1322 bp, Klebsiella pneumoniae
caggggagtgttatgagtcaggcattaccgcttatcacccgtcagggcgatcgcattgccattgtcacggggctacgcacgccatttgctcgtcaggctacggcttttcatggcgttccggccattgatttaggaaaaatggtggttggcgagatgctggcgcgcagcgacattcctgccgaagtcatcgagcaactggtctttggccaggtggtgcagatgccggaagcgccgaacatcgcccgggaaattgtgctgggtaccggcatgagcgtacataccgacgcctatagcgtcagccgcgcctgcgccaccagtttccaggccgtggcgaacgtcgctgaaagcctgatggccggcaccatccgcgccggtattgccggcggcgccgactcctcctctgtcctgcccattggggtcagtaaaacgctggcccgcacgctagtggatgccaataaggcacgcacgctgagccaaaagctgaagctgttttcccgtctgcggccacgcgacctgctgccggtccccccggcggtggctgaatattcaaccggattgcggatgggcgataccgccgagcagatggcgaaaagctgggggatctcccgcgagcaacaggatgccctggcgcatcgttcgcaccagctggcagcgaaagcctgggaagagggtaaactgtccgcagaggtgatgaccgcctatgctccccctttccgcgaaccgctcgagcaggacaacaatattcgtaaaaattcaacgctcgcagattatcagaagttacgcccggcctttgaccgcaaacatggcaccgtcaccgccgccaacagtacgccgctgacggacggcgcggcagcggtgatcctgatgaccgagtcgcgggctaaagagctggggctgaggccgctgggctatctgcgcagctacgcctttaccgccatcgacgtctggcaggatatgctgctggggcccgcgtggtccacgccgctggcgctggagcgcgctggcctgacgctggcggatctcacgcttatcgatatgcacgaagctttcgccgcgcagacgctggccaatctccagtgtctggcaagcgaccgcttgcccgcgaggtgctgggccgctcgcaggccaccggtgaggtagatgaaagcaagtttaacgtcctcggcggctctatcgcctacggtcaccccttcgccgccaccggcgcgcggatgatcacccagacgctgcatgagctgcggcgacggggcgggggatttggtttggtgacggcctgcgcggcaggtggtctgggtgcggcgatgatcgtggaggctgaataa

SEQ ID NO: 23611 - DNA, 2142 bp, Klebsiella pneumoniae
atggatactgtttccgcttttaagcttgaggtccgtgcggacaaaatcgcggtgatcaccattgatgccccgggtgaaaaaatgaataccctgaaagccgaatttggcagtcaggtacggggattgatacgccagttacgtgacgataagtcagtgcgcggcgtagtatttatctccgccaaagcggataactttatcgccggcgctgatatcaacatgattgcccgctgccgcagcgcgcaggaggcggaagcgctggcgcgccagggacagcagattatggctgagatccatggcctgtcgatcccggtgattgccgctatccacggcgcctgccttggcggcggtctggagctggcgctggcctgtcatggccgtatctgtagcgatgacgaaaaaacccgactcggcttgccggaggtacagcttggcctgctgccgggttccggcgggacgcagcgtttaccgcggctgatcggggtcagcaccgcgctggatatgatgctcaccggcaagcagctgcggccgcggcaggcgctgaaggccggtctggtggacgaggtggtgccgcaggcgattttactgcaggcggcggtggagttggcgctgaagggacgaccgaccagccgggaggtgcctgttcgtgaacgcgtactggcagggcccctggggcgccatctgttattccagtttgtcggtaaacaaacgcagcgcaaaacgcagggaaattacccggcggtgaagcgaatcttgcaggtcgtcgagaatggtctggcccatggctgcagcagcggatacgctgaagaggcgcgcgcatttggcgaactggcaatgagcccgcagtcgcaggcgctgcgatcgatcttctttgccagtaccgatctgaaaaaagaccctggcgccgaggcgggccccggtccgctgagaagcgttgcagtactgggcggtggcttgatgggcggggggatcgcctatgtgaccgcctgtaagggggggctgccggtgcggattaaagatatccagccgcgtggcatcaaccacgccttaaagtacagctgggatctgctgaataaacaggttcgtcagcgtcgactgcgcccagtggagcgcgatcgtcagatggcgctgatctccggcactaccgactatcagggctttgctcatcgcgatgtggtgatcgaggcggtatttgaagacctggctctcaaacagcggatggtcagcgaagtggaacaatacggcgggccgcagaccatctttgcgtcgaatacctcatcgttgccaatcggcgatattgccgctcacgccagccgcccggggcaggtaattggcctgcattttttcagtccggtggaaaaaatgccgctggttgaggtgatcccgcacaagggaaccgacccgcagactatcgccaccgtggtacagctggctaaacggcaggggaaaacgccgattgttgtcgcagataaagcggggttctatgtgaaccgtatcctcgcgccgtatatcaatgaagcgatgcgcctgctggtggaaggcgaaccgattgaagtcattgataacgcgttggttaaattcggtttcccggtggggccgattcaactgctggatgaggtgggtatcgataccggcaccaaaattatccctgtgctggagagcgcgtttggagaacgttttagcccgcctgcaaacatcattgacgcgattttgaaggacgatcgcaaaggcagaaaaaataatcgtggtttctatctttatgagacaaaagggcgtaaaagcaaaaaacggcccgacccggcagtctatccgctgctcggcatcggccgcccgcagtcgcggctctccgcgcagcaggtggcggagcgctgtgtgatgatgatgcttaacgaagcggcgcgctgctttgatgagcagattatccggagcgcgcgcgatggcgatatcggcgccgtctttggtatagggtttccgccatttcttggcggcccgttccggtatatggatactatcggcgcgggtgaagttgccgcgatcctgcagcgcctggccgcccagttcggcccacgttttacaccctgtgacactttattacgcatggccgaacaggggaccaccttttggccagcggatgaacggctgacc

SEQ ID NO: 23612 - DNA, 918 bp, Klebsiella pneumoniae
atgagctggattgaacgaattaaaagcaacatcactcccacccgcaaggcgagcattcctgagggtgtatggaccaagtgcgacagctgcggtcaggtactctaccgcgccgagctggagcgcaacctggaggtttgtcctaagtgcgatcaccatatgcgcatgtcggcgcgtaatcgcctgcatagcctgttggatgaaggttctctggtagaactgggtagcgaacttgagccaaaagatgtgctgaagttccgcgattcaaaaaaatacaaagaccgcctggcgtccgctcagaaagagacgggcgagaaagacgcgctggtggtgatgaaaggtacgctctacgcgatgccggtggttgccgccgcctttgaattctcctttatggggggatcgatgggttccgtcgtcggcgcacgctttgtacgcgcggtggagcaggcgctggaagataactgcccgctgatctgcttctccgcctccggtggcgcccgtatgcaggaagcgctgatgtcgctgatgcagatggcgaaaacctccgcggcgctggcgaaaatgcaggagcgcggactgccgtacatctccgtgctgaccgacccgaccatgggcggcgtatcggcgagctttgcgatgctgggcgatctgaacattgccgagccgaaagcgctgatcggctttgccggtcctcgcgttatcgagcagaccgtacgcgagaagctgccgccgggattccagcgcagtgagtttctgattgaaaaaggggcgatcgatatgatcgttcgccgtccggaaatgcgtctcaagctggccagcattctggcgaagctgatgaacctgccggcgccggttgccgtttcggaagcgcctcatgaaggcgtggtggtgccgccggcaccggatcaggaacctgaggcc

SEQ ID NO: 23613 - DNA, 1083 bp, Klebsiella pneumoniae
atggcaggaaatacaattggacaactctttcgcgtcactaccttcggcgaatcgcacggtctggcgctgggctgcatcgttgacggcgtgccgccgggcatcccgctgaccgaagccgacctgcagcacgacctcgatcgtcgtcgcccgggtacctcgcgttacaccacgcagcgtcgcgagccggatcaggtcaaaatcctctccggcgtcttcgaaggcgttaccaccgggaccagtatcggtctgctgattgagaacaccgatcagcgttcgcaggattacggcgcgatcaaagatctgttccgtccgggacacgccgattacacctacgagcaaaagtatggtctgcgcgactatcgcggcggcggtcgttcttctgcgcgcgaaaccgcgatgcgcgtagcggccggggcgattgccaaaaaataccttgccgcgaagttcggcatcgtcattcgcggctgcctgacgcagatgggcgatattccgctggccatcaaagattgggatcaggttgagcagaaccccttcttctgtccggacccggataaaatcgacgccctggatgaactgatgcgcggcctgaaaaaagagggcgactccattggcgcgaaagtgacggtagtggctgacggcgtaccgccaggcctcggcgagccggtcttcgaccgcctggatgccgatatcgcccacgcgctgatgagcatcaacgccgtgaaaggggtggaaattggcgacggcttcgaggtggtgaagctgcgcggcagcgaaaaccgcgatgagatcaccaaagccgggttccagagcaaccacgccggcggcattcttggcggcatcagcagcggccagcagatcgttgccaacatcgcgctgaagcctacctccagtattaccgttcccggtcatacgattaaccgctttggcgaagaagtggagatgatcaccaaagggcgtcacgatccgtgcgtcggcatccgcgccgtaccgatcgctgaggcgatgctggcgatcgttctgatggatcactttatgcgtcagcgcgcgcagaatggcgacgtgacgacgacaattccacgctgg

SEQ ID NO: 23614 - DNA, 891 bp, Klebsiella pneumoniae
atgaagatcctgcttactggtggtaccggcctgattggccgacatctgatacccagattgctggagctcgggcatagcgtcacggtctccacgcgacatccggataccgcccgcgcccgtctcgatccgcgcgtcaccctgtggcgcgatttcgagggccatcaccacctcaatgacattgatgccgtcatcaatctggcgggtgaacccatcgctgataaacgctggacggccgagcagaaacaacgcttgtgccatagccgctgggatctcacgcagcggctggtgggcctgatccacgccagcgacacccctccctccgtgctgatcagcgggtctgccatcggctactatggcgacctcggcgaggtggtggtgaccgaagaagagccaccgcacaatgagtttacccataagctgtgcgcccgctgggagcaaattgcctgcgaagcgcaaagcgagcgtacccgcgtctgcctgctgcgcaccggcgtggtactggctccgcggggcggtattctcggcaaaatgacacccgcctttaagctcggcctcggcgggcctatcggcaacggcagacagtacctggcctggatccatatcgacgatatggttaacggcattctgtggctgctggataacgatctgcgcggtccgttcaatatggtttctccctacccggtgcataacgagcagttcgcccatgcgctgggtcatgcgctccatcgaccggcgattttccgcgttcccgccgccgctatccgcctgttgatgggggaatccgccgtcctggtgctcggcggccagcgcgcgctgccaaagcgtctggaggccgccggctttgccttccgctggtacgatctggacgaagcgctaaaggatgtgctgagt

SEQ ID NO: 23615 - DNA, 1134 bp, Klebsiella pneumoniae
gtgaaaatcctcgttgatgaaaatatgccctatgcccgtgagctttttagccgtttaggcgacgtgcaggcgatcccaggccgtccggtcccggccgatgccctgaccgatgcggatgccctaatggtgcgttcggtcacccgggtcaatgaagcattgctcgccggcaaggccattaagttcgtcggcaccgctaccgccggcaccgatcacgtcgatcaggcgtggctgcagcaggcggggattggtttctctgcggcgcccggctgtaacgccattgcggtggtagagtacgtcttttcatcgctgctgatgctggctgaacgcgacggctttgcactgcgcgaccgcaccgtcgggatcgtcggcgtcggtaacgttggcgggcgactgcaaaagcgcctggaagcgttggggatcaaaactctgctctgcgacccaccgcgcgccgatcgcggcgacgaaggtgacttccgctccctcgaggcgctggtccaggaagccgatgtcatcaccttccatacaccgctgtataaagaagggcaatataaaaccctgcatctggcggatgaggcgctgattagccgcctgaagcccggaacgattttgatcaacgcctgccgcgggccggtggtggataacgctgcgttgctgaaacgactggaagccggtcagtccctgagcgtggtgctggacgtttgggagccggagccggatctcaacgtagagcttcttaagcgagtggatatcggcacggcgcatatcgccggctatacccttgaagggaaggcgcgcgggacgacgcaggtgttcgaagcctatagcgcctttatcggccatccgcagcaggtggcgctggataccctgttgccggccccggagtttggccgcatcaccctgcatggcccgctcgatcagccgacgctgaaaagactggttcatttggtgtatgatgtgcgccgcgatgatgcgccgctgcggaaggtggccggcgtcgccggtgaattcgacaagctgcgtaaaaattatcaggaacgtcgcgaatggtcttcgctgtatgtgcagtgcagcgatgagcaggcggcgacgctgttgcgccagctcggttttaacgccgtgcatcatcctgttcgt

SEQ ID NO: 23616 - DNA, 1011 bp, Klebsiella pneumoniae
atgtctgaaggctggaatattgccgtactgggcgcaacgggcgccgtaggcgaagccctgctcgaaactcttgctgaacgccagttcccggtaggagagatttttgctctggcgcgcaacgacagcgcgggcgaacatctgcgttttggtggcaagtcggtgatcgtcaaagacgccgccgaatttgactggacccaggcccagctggctttcttcgccgccggcgtcgaagccagtgcagcgtatgtcgaagaagcgaccaacgccgggtgtctggttatcgatctcagcggcctgtttgcgctggagccggacgtaccgctggtggtgccggacgtgaacccgttcgtattaggcgattaccgcaaccgcaacctgattgcggtgcctaatagcctgaccagtcagctgttgacggcgctcaaaccgctgatcgatcagggcgggttgtcgcgcattagcgtcacgaacctgctctccgcctcggggcaggggaaaaaagcggtggatgcgctggcggggcagagcgctaagctgctgaacggcatccctatcgatgaagacgatttctttggtcgccagctggcgttcaacatgctgccgctgctgccggatcgtgaaggtagcgtgcgcgaagagcgccggatcgtcgatgaagcgcgcaaaattcttcaggatgacgggctgatgatctccgccagcgtcgttcagtcgccggtcttctacggccatgcgcagatggtgagcttcgaagcgatgcgcccgctggcggcggaggaggcgcgcgacgcttttacccgcggcgaggatatcgaactttctgaagagggcgaattcccgactcaggttggtgatgcctccggcaatgcccgcctctccatcggctgcgtgcataacgattacggtatgccggagcagatccagttctggtcggtagcggataacgtgcgcttcggcggcgcgctgatggcggtgaagatcgccgagaagctgattgaggagtacctgtac

SEQ ID NO: 23617 - DNA, 511 bp, Klebsiella pneumoniae
atgagccagcctgtcattaccctgtggtccgatgccgattttttctcaccgtacgtgatgtctgtctatgtcgctctgcaggaaaaaagcctgccttttacccttaaaaccgtcgacctgaaccgcggcgaacatctgcaggcgggctggacaggctatgccgccacccgtcgcgtaccgctgctggaggttgatgatttcgcgctaagtgagtcttcggcgattaccgagtatctggatgagcgttttgcgccgccggagtgggagcgcatctacccgcatgatctgcaaaaacgagcccgcgcccggcagatccaggcctggctgcgcagcgatctgatgccaattcgtgaagagcgatccaccgccgtggtgtttgacggggcgaaaatgccggacctcagcgaggccggcaggcaatctgcggaaaagctgtttgccaccgccaccacgctactggcccacggcgggcaaaatttatttggcgaatggtctattgccgacgcagacc

SEQ ID NO: 23618 - DNA, 780 bp, Klebsiella pneumoniae
atgaaaaaactggcgttgtctctctctttagcgctggccctttccagcgtttccacggtctttgccgccatcccgcaaaaaattcgtatcggtaccgatccgacttatgctcccttcgaatcgaagaatgcgcagggagaattggtcggttttgatatcgatctggcaaaagagctgtgtaagcgtattaatacgcaatgtacctttgttgaaaacccgctggatgcgctgatcccctccttaaaagcgaagaaaatcgacgcgattatgtcttcgctgtcgattactgaaaagcgccagcaggaaattgccttcactgacaagctgtatgcggcagattcgcgtctggtggtgaaaaagggcagcccggtaacgccggatctcgccaccctcaagggtaagcgcgtgggcgtgctgcaggggacgactcaggaaacctatggcaatgagcactgggcgccgaaaggtatcgaaattgtctcctatcaggggcaggacaatatctattccgacctgaccgccggccggatcgacgccgcgttccaggatgaggtcgcggccagcgaagggttcctgaaacagcctatcggtaaagattaccagtttggtggcccgtcaatcaaagacgagaaactgtttggtgttggcaccggtatggggctgcgtaaggaagacaacgaactgcgtgaagcgctgaataaggcgtttgcagagatgcgtaaggacggcacctacgacaagctggcgaaaaaatatttcgattttaacgtatacggcgaa

SEQ ID NO: 23619 - DNA, 2484 bp, Klebsiella pneumoniae
atgaagcagaggtcattctgcccgggaagattaagcaccgcgatcgccatcgcgctgtgctgctttccgccattttccagcggacaggaaaacccgggaacggtatatcagtttaacgacggctttattgtcggcagtcgcgaaaaggtcgatctgtcgcgcttttcgaccagcgcgattaccgaaggcacttactcccttgacgtctacaccaacgacgagtggaaagggcgctacgatttacgcatcgcgcgcgataaagatggtcggctgggcgtctgctacaccaaagcgatgctggcccaatatggcatcgcggcggaaaagctcaatccgcagctgagcgagcaggagggctactgcggtagcctcaaatcctggcgcaacgaagaaaacgtcaaagacaacctggtccagtcctccctgcggttgaacatttcggtaccgcagatctatgaagatcaacgcctgaaaaactatgtcagcccggagttctgggacaaaggtattaccgcgctcaatcttggctggatggcgaacgcctggaacagccatacctcttcggtaggcgggtcggataacagcagcgcctatctgggcgtcaacgccggactgtcgtgggacggctggctgctgaagcacatcggcaacctgaactggcagcagcagcagggtaaagcgcactggaacagcaaccagacctatctccagcgccctatcccacagctcaactccatcgtcagcggcgggcagattttcaccaatggtgaatttttcgacaccatcggtctgcgcggggttaatctttccaccgatgacaatatgttcccggacggcatgcgctcgtatgctccggaaattcgcggcgtggcgcagagcaacgccctcgtcaccgtgcgccagggcagcaatattatctatcagaccaccgttccgcccggaccgtttaccctgcaggatgtctatccttccggctatggcagcgatcttgaggtctcggtgaaagaagcggatggctcggtagaagtgtttagcgtgccttacgcctccgtcgcccagctgctgcgcccgggcatgacccgctacgcgctctccgccggtaaagtggacgacagcgcgctgcgcaacaagccgatgctctatcaggcgacctggcagcacgggatcaacaacctgttgaccggctacaccggggtcaccggttttgacgactatcaggccttcctggtggggaccgggatgaacaccggcatcggcgcgctctcttttgacgtcacccattcgcggttgaagagcgatgcccatgatgactcgggtcagagctatcgcgcgacctttaaccgcatgtttaccgatacccagaccagcatcgtgttggcggcgtatcgctactcgacgaaaggttattacaacctcaacgacgcgctgtacgccgtcgatcaggaaaaaaatagtcgcagcaactacaccctgtggcggcaaaaaaacggcatgaccttcacggtgaaccagaacctgccggacggctggggcgggttttatctcagcggccgtatctccgattactggaaccgctccgggaccgagaagcagtatcaggtcagctacaacaattcatttggtcgtctctcctggtcggcgagcgcgcagcgcgtctatacgccagacagctccggtcatcgtcgcgacgatcgtatttcactcaacttcagctacccgctgtggtttggcgataaccgcaccgccaacctgacgtcgaacacctcgttcaataactcgcgctttgccagctcgcagattggtatcaacggttcgctggacagtgaaaacaaccttaactacggcgtgtcgaccaccaccgccaccggcggtcagcatgatgtggcgctcaacggcagctaccgtacgccatggaccaccctcaacggcagctacagccagggcgaaggctatcgtcagagcggcattggcgccagcgggacgatgatcgcccacagcggcggcgtggtgctctcaccggaaagcggctcgacgatggccctgattgaagccaaagacgcggccggggcgatgcttccgggatcgccgggcacccgtgtggacagcaatggttacgccatcctgccgtatctgcgcccgtaccggattaacgccgtggaaatcgacccgaaaggcagccatgacgacgtggccttcgatcgcaccgtggcgcaggttgtgccgtgggaaggcagcgtggttaaggtcgcgttcggcactaaggtgcagaacaacctcaccctgcaggcgcgccaggcgaaccacgagccgttgccgtttgcggcaagtattttctcccccgacggcaaggagatcggcgttgtcggccagggcagcatgatgtttatcagcgatgcgaacgccaaacgcgcgattgtgaagtggagcggcgggcagtgttcggtggatctgggacagcaaacaacaaaggatagcgtatgtcgc

SEQ ID NO: 23620 - DNA, 1176 bp, Klebsiella pneumoniae
atgaaggatgtcgtgattgtcggcgcgctgcgaacgccgattggctgctttcagggcgcattatcgcgccattcagccgtcgagctggggagcgtggtggtgaaggcgctggtggagaagacgggaatcgatccgcacagcgtggatgaggtgatcctcggccaggtgctgaccgcggggaccggacaaaatccggcgcgtcagtccgctattcgcggtgggctgcctaacaccgtatcggctatcaccattaacgatgtctgcggttccggcctgaaggctctgcacctcgctacccaggcgatccagtgcggggaagcggacgtggtgatcgctggcggccaggagaatatgagccgcgctccgcatgtgcttaccgacagccgcaccggcgcccagctgggcaacagccagctgattgacagtctggtgcatgatgggctgtgggatgctttcaacgattatcatatgggcgtcacggcggaaaacctggcccgggaatttggcatcagtcgcgagctgcaggacgcctgggcgctcagctcacagcataaggcgcgcaaggcgattgattccggtcgctttcgcgatgagatcgtcccggttgtcaccgagcataacggcgcggcgcgcaccgtggataccgatgaacaaccgcgggtggatgccagcgcggaagggctggccagcctgcagcccaccttcgatcgccttggatcggtaaccgccggcaacgcctcaagcatcaatgacggcgcggcggcggtaatgatgatgagcgaggctaaagcgttggagctggggctgccgatccttgcgcggatccgcgccttcgccagcgtcggcgtcgatccggcgctgatgggcattgccccggtgcatgccacccgtcgctgtctggagcgggccggctggcggctggacgacgtcgatctgatcgaagccaatgaggcctttgccgctcaggcgatctcggttggccgggtactggagtgggatgagcgccgggtcaacgtcaacggcggcgcgatcgccctcggccaccccatcggcgcctccggctgccggattctggtgtcgctggtgcatgaaatgatcaagcgcgatgcccgcaaaggtctggcgacgctgtgcattggcggcggccaaggcgtggcgctggcggtagaacgcgca

SEQ ID NO: 23621 - DNA, 699 bp, Klebsiella pneumoniae
atgaagcgtattgccctttttttctgtttcatttttagttttgcggcccatgccaacaatattattgttaacggtacccgctttatttatccaggaaatgaaaaagaaataacggtacagctttcaaataacgccgaccgtccggcgctggcgcaggcctggctggataacggcgatgccgatgccacaccggataccattaccaccccgtttattatcaccccgccgatttcgcgcgttgacgccaagagcggccagacgctgcgtattaagctcggcagcagcgccggtctggcgaaagataaagagacgctgtggtggctgaatctgctggaaattccgccggtggtggccaatcagaaaaatgaaggccagaacgtgctgcagctggcgatccgttcgcgctttaaatttatttatcgtcctgccggactgggcaaccgcgatgcggcggccgagaagctgaccctgaccgccagcggcagtagtctcgccatcaacaacccgacgccgttctacattaccgtcagccgtatttcccgcgacggcggtaaagccctgaacagcaaaaccgtgatgctggcgccgcagtccagccagacggtggcgctctcctccgccgtcaaccgcggcgaaaccctgaccgttaacaacattaatgactatggcgccgatgtcgcagtgaaagtggccgttaaa

SEQ ID NO: 23622 - DNA, 1281 bp, Klebsiella pneumoniae
atgacctggttcatagaccgacgcctgaacgggaaaaacaaaagcgccgtcaaccgccagcgctttttgcgccgttataaggcgcagattaaacagtcgatctccgaggccatcaacaagcgctcggtgaccgatattgagagcggagaatccgtctcgatcccgacggacgatatcaacgagccgatgtttcatcagggtcgcggcggcctgcgcaaccgcgtccacccgggcaacgaccattttgtgcaaaacgaccgcattgagcgcccgcagggcggtggcggcggcggcggtagcggtcaggggcaagccagcgccgatggtgaaggaaaggatgagtttgtcttccagatctcgaaagatgaatacctggatctgttatttgaagatctggccctgccgaacctgaagaaaaaccagcaccggcagctgaacgagtttaaaacccatcgcgcgggttttacctccaatggggtgccagccaacatcagcgtggtacgttcactgcagaactcgctggcccgccgtacggcgatgaccgccggcaagcgtcgtgaactgcgcgccctggaggaggatctggaagccatcagccgcagcgaaccggtgcagctgctggaggaggagcgcctgcgcaaagagattgccgaactgcgggctaaaatcgagcgggtgccgtttatcgacacctttgatttacgctacaaaaattacgaaaaacggccggagccttccagccaggcggtgatgttctgtctgatggacgtctcaggctcgatggaccaggccaccaaagacatggccaagcgcttttatatcctgctgtatctgttcctcagccggacttataaaaacgtcgacgtggtctatatccgccaccatacccaggcaaaagaggtggatgagcacgaattcttctattctcaggaaaccggcggcaccattgtctccagcgccctgaagctgatggatgaagtggtgcaggcccgctatgatccggcgcagtggaacatctacgccgcccaggcgtcggatggcgacaactgggccgatgactccccgctgtgccacgaactgctggcgaagaaaattctgccggtggtgcgttattacagctatatcgaaattacccgccgggcgcatcagaccctgtggcgcgagtatgaacacctgcaggcgacctttgataatttcgccatgcagcatattcgcgaccaggaggatatctacccggtattccgcgaactgtttcacaagcagtcatctaaaagtgaagct

SEQ ID NO: 23623 - DNA, 1257 bp, Klebsiella pneumoniae
gtgcaccgcgcggaacgctcctttcctaaggatacgcctgatatgaaagagattgctttacccctccacccggcgccggcgcgcgtctggatagccgtcgttgcgctcgggatctgcgccttttcgatcgtcaccagcgaactggcgccggtgggcatgctcagcgccctggcggcggattttcaccagacggaatccggcgtgggcctcgccgtcaccgcctatggctgggtaggcgccctggcggctctgctttccggcgcaatgccgacgcgtatttcccgcaaggcgctgctggtcgggctgatgctgatcctcgcgctttcctgcctcgccgcaacccggtcttattcgatgttcgccctgatgagcgcccgcatgattggcgccctggcgcatggcgccttctgggccttaattggcattgtcgccgcgcagctggtgccgccgcaccggctggggctggccacggcgatcatttttggcggcgtgtcagcggcaagcgtagtgggggtgccgctggcgagctttatcgccaccctggcgggctggcgactcgcgtttatgtcgatggccttgctgtcactagccgccgctgcggtgctgtgctcgacgctgcccccgctggccgcccctgcccccgtcaggctgcgtgtttatcgcgatatcttccgcaatccgctgctcggtggcctgtatggcgccacggcctgcatcattaccgctcactttgccgccttcacctacattgaaccactgctgataaatctgcagggagtcccggcgaccgctctctccggcctgctgctgctgtcaggggtttccgggctgctgggtaacgttatcgcgggtaagctgatcgatcgtcatctgaaggggctgattttcgctgcgctgctgctgagcgggggcgcgctggcgctccttggcgccgcccgtcttgcgccactgccgttctgttttagcgggctactgttagccctgtggggcgccggcatcgcgattgtgttcgtcggcttacagacctggctgctgcgcagcgcgggcgctgtcgcccagccggcgtcagccatttatgtggccatttttaatgccgccatcggcaccggggcgtttgtcggcggccagctgatcgcctcagctggcctgtcgggaatggtgtggctggcggcggggatcatggtgggcagtacgctgctgatcgccctgctgaaagcgcctctgcccggtcaggtcagtgcggcgacggcaggcgct

SEQ ID NO: 23624 - DNA, 1197 bp, Klebsiella pneumoniae
atgactacgaatacggtctcacgcaaggtagcgtggctacgtgtcgtgacgttggccatcgccgcgtttatttttaacaccacagagtttgccccggtcggtctgttgtcggatattgccgacagcttcggcatggaaaccgcccaggtgggcatgatgctgaccatctacgcatgggtggtggcgttaatgtcgctgccgtttatgctgctgaccagcaaagtggagcgccggcgcctgcttatcggcctgtttattctgtttatcgccagccacgtcctgtcgttttttgcctggaattttgacgtgctggtgatcagccgcattggtatcgcctttgcgcatgcagtgttctggtcgataacgtcggcactggccatccgcatggccccgccgggcaaacgggcgcaggcgctgagcctgatcgccaccggtaccgcgctggcgatggtgtttggtattccgatcgggcgcattatcggccagtactttggctggcggatgaccttcctggcgatcggcctcggcgcgttagccaccctggcctgcctcgtaaaactgctgccgaccctgccgagcgaacattctggctcgctgaaaagcctgccggtgctgttccgccgcccggcgctggtcagcgtgtacattctgaccgtggtggtggtgaccgctcattataccgcctacagctatatcgagccctttgtccagacggtagcgggcctgagcggcaactttgccaccgtactgctgctgatccttggcggggccggtattatcggcagcattctgttcggtaaactcggtaaccagcacgcgtcggggctgataagcctggcgattgccctgctgctcgcctgcctgctgctgctgctgccggcctcgcataacccgcagcacctgatgctgctcagcatcttctggggggtggcgatcatgattatcggtctcggcatgcaggtgaaagtgctggcctccgctccggatgccaccgacgtcgccatgtctctgttctcgggcatctttaatatcggcataggcgccggggcgctggtcggcagccaggtgagtctgcatctttccatggcctccgtcggctacgtcggcgccattccggcgctggtcgcgctggtctggtcgctgatgatattccgtcgctggccggtatcgctggaagaccatcatgccgaccactcc

SEQ ID NO: 23625 - DNA, 666 bp, Klebsiella pneumoniae
atgttcgatttgtttaaagcaatagggctcggcctggcggtgcttttaccgctggcgaatccactcacaaccgtggcgctgttccttggcctggccggtaatatgaacaacgccgagcgtaataaacaggcgttaatggcatcggtgtatgtcttcgccatcctgatggtgtcgtggtatgccggtcaggtggtgatgaatacattcggcatatcaatacctgggctgcgtatcgccggcggattgattgtggcctttatcggtttccgcatgctgtttccccagcaaaaagcccacgattcgatggaagcgaagatcaaatcggaagaactgcaggatgaaccgaccgccaatatcgcctttgtgccgctggcgatgccaagcaccgccggtccgggcaccatcgcgatgattattagctccgcctcgaccgttaagcacggcgtggacttcccggagtgggtggtgctggcggcgccgccgatcatctttttgctgttaggggtgattctgtgggcttgtctgcgcagttccggcgcgattatgcgtctggttggcaaaggcggcatcgaggccatctcgcgactgatgggctttctgctggtctgcatgggcgtgcagtttattattaacggcgtgctggagatcatttcgacctggcatccc

SEQ ID NO: 23626 - DNA, 480 bp, Klebsiella pneumoniae
atgtacaccatcaccgacatcgcccctaccgacgccgaatttatcgccctgattgccgccctcgacgcctggcaggagactctctacccggcggagagcaaccacctgctggaccttagccagctgccgccgcagacggtcatcgccctggcgatccgcagcccgcagggcgaggccgttggctgcggggctattgtcctcagtgaggaaggctttggcgagatgaagcgggtctatatcgatccccagcaccgcggccagcagctgggagaaaagctgctggcggcgctggaagcgaaagcgcgtcagcgcgactgccataccctgcgcctggagaccggtatccatcagcatgcggccatcgccctctacacgcgcaacggctatcagacccgctgcgcgtttgcgccgtatcaacccgatccgctcagcgtgtttatggagaaaccactgtttgccgatcttcgttcagcagcgcta

SEQ ID NO: 23627 - DNA, 1194 bp, Klebsiella pneumoniae
atgatcaccactctccggcgctccaccatcgcgctgctggcatcgtcgttactgttgactatcggccgcggggccacactgccgtttatgaccatctatctcacccgacgctttcagctggaggtggatgtgattggctatgccctgtcgctggcgctggtggttggggtgttgttcagcatgggttttggcatcctcgctgacaggttcgataaaaagcgctatatggtgtggtcagtgctggtgtttattctcggcttcagcgcaataccgctggtcaataacgccctcctggtggtgatcttctttgcgctgatcaactgcgcctactcggtcttttccaccgtcctgaaagcctggttcgccgatcggctgacggcagagaaaaaagcgcgcatcttctcgctgaactacaccatcctcaacatcggctggaccgttgggccgcccatcggcaccctgctggtaatgcacagtatcaatttgccgttctggctggcggccgcctgcgccgcctttccgctggtgtttattcagctgtttcttcagcgggatggcgccgccgcggcccagccgggcgccgcgccctggtcgccttcggtgttgctgcgcgaccgggcgctgctgtggtttacctgctccgggctgctggcctccttcgtcggcggcgccttcgcctcctgtctctcgcagtatgtgctggtggtcgccagcagcgatttcgccgagaaagtggtggctgtggtgctgccggtcaacgccgcggtggtggttgctctgcagtacgcggttggccggcggctgagcgcgagaaatatccgcccgctaatgaccttcggcaccgtctgctttgtgatcggccttgtgggctttatgttctctggcgccagcctgtgggcttgggggatctcggcggcgatcttcaccctcggggaagtgatttatgcccccggggagtatatgctgattgaccatattgccccgccggggatgaaggccagctacttctccgcccagtcgctggggtggcttggggcggcattcaacccgatgctgacggggttgatcctcacccatctgccgcactggtcactttttgtcattcttatcgtggcgattgtcgccgcctggctgatgattttccgcgggatcaatgcccgcccctggcaaccggattctccgctggccaacgcc

SEQ ID NO: 23628 - DNA, 1515 bp, Klebsiella pneumoniae
atgtctgaacaacaagcacaaggtgccgatgaggccattgaccttaataatgaactgaaagctcgtcgcgaaaaactggctgcgctgcgtgagcagggcgtagctttccccaacgatttccgtcgcgatcatacctctgaccaattgcatgctgaattcgatgcgaaggacaacgatgaactcgcttccctgaacgttgaagttgcggtggctggtcggatgatgacccgtcgcgtgatgggcaaagcctccttcgtcaccctccaggacgtcggcggccgcattcagctgtacgtggcgcgcgatgacctgccggaaggcgtctacaacgaacagtttaagaaatgggacctcggcgatatcatcgccgcccgcggcaagctgttcaaaacgcaaaccggcgaactctcgatccactgcaccgagctgcgcctgctgaccaaagccctgcgcccgctgccggataaatttcacggcctgcaggatcaggaagttcgctatcgccagcgctatctggatctgatcgccaacgaagagtcgcgtcatacgttccgtatccgttcgcagatcctcgccaccatgcgccagttcatggtggcccgcggctttatggaagtcgaaacgccgatgatgcaggtgatccctggcggtgcgtccgcccgtccgttcattacccatcacaacgccctggatctcgatatgtacctgcgcatcgcgccggaactgtatctgaaacgtctggtggttggcggttttgaacgcgtgtttgaaatcaaccgtaacttccgcaacgaagggatctccgtacgccataacccagagttcaccatgatggaactgtatatggcgtatgcggactacaaagacctgatcgaactgaccgagtcgctgttccgcaccctggcgcagacggtgctgggcaaaaccgaagtgccgtatggcgaccaggtgtttgatttcggcaagccgtttgaaaaactgaccatgcgggaagcgatcaagaaacaccgtccggaaaccaacatggcggatctggataacttcgacgcggcgaaagcgctggcggaatctatcggtattcaggtagagaaaagctgggggctgggacgcatagttaccgaaatctttgacgaagtggcggaagcgcatctgattcagccgaccttcatcaccgaatacccggcggaagtttctccgctggcgcgccgtaacgacgtcaacccggaaatcactgaccgctttgaattcttcatcggcggccgcgaaatcggtaacggtttcagcgagctgaacgatgccgaagaccaggcgcagcgcttccaggatcaggtgaacgccaaagcggcgggcgatgacgaagcgatgttctatgacgaagactacgtgaccgccctcgagtacggcctgccgccgaccgccggtctgggtatcggtatcgaccgcatggtgatgctgtttaccaacagccataccatccgcgacgtgatcctcttcccggccatgcgtccgcagaag

SEQ ID NO: 23629 - DNA, 1332 bp, Klebsiella pneumoniae
atgagttctgccaagaagatcgggctatttgcctgtaccggtgtcgtcgccggtaatatgatggggagcgggattgcattattacctgcgaacctggccagcatcggtggtattgccatttggggctgggtaatttcaattattggtgcgatgtctctggcttatgtttatgcccgactggccactaaaaacccgcagcagggcggtcctattgcctacgctggcgaaatatctccggcattcggtttccagaccggtgtcctttattatcatgcaaactggattggtaacctggccatcgggattaccgcagtttcttatctctctacgttcttcccaattttaaataacccggtgccagcaggtattgcctgtattgccatcgtgtggatctttactttcgttaatatgctcggcgggacctgggtcagccgtctgaccaccattggtctggtactggtgcttattccggtagtcatgaccgcggtcgtcggctggcactggtttgatgtcgctacctatcaggcgaactggaatacctccagcaccaccgatagccacgcggttattaaaagtatcctgctctgcctgtgggccttcgttggcgtagaatccgccgccgtgagtaccgggatggtgaaaaacccgaaacgtaccgtgccgctggcaaccatgctgggtaccgcgatggccggtatcgtctacatcgccgcgactcaggttatcgccggtatgtatcctgcttctcagatggccgcgtccggtgcgccgttcgcaattagcgcctctaccatcctcggcggctgggctgcaccgatggtatccgctttcaccgcctttgcctgcctgacttctctgggctcgtggatgatgctggttggccaggccggtgtgcgtgccgccaacgacggtaacttcccgaaagtgtatggcgaagttgataacaacggtattccgaaaaaaggcctgctgctggccgcagtgaaaatgaccgcgctgatggtgctgattaccctgatgaactccgccggtggtaaagcctctgacctgttcggcgaactgaccggtatcgcggtactgctgaccatgctgccttacttctactcctgtgttgacctgattcgtttcgaaggcatcaacatccgtaacttcgttagcctgatttgttcggtactgggttgcgtgttctgcttcatcgcgctgatgggcgcaagctccttcgaactggccggcaccttcatcgttagcctgattatcctgatgttctacggtcgcaaaatgcaccagcgccagaacaacgcatcggataacaacaccaccgctaacgcgcac

SEQ ID NO: 23630 - DNA, 2292 bp, Klebsiella pneumoniae
atgaaagtagatatcgatacccaggatgtacgatacgctgacgcctggctgggctttcgcggtacggcgtggcaaacgcagatcgacgttcgcgactttattcagcataactacaccccttacgagggcgatgagtctttcctcgccgacgcgacgccagcgaccaccgccctctgggagcaggtgatggccgggatccgcgtcgagaacgccacccatgcgccggtggatttcgacaccaatgtcgccacctccatcaccgcccacgcggcgggctatatcaacctgccgctggaaaagatcgtcggcctgcaaacggaccagccgctgaagcgcgccctgcatccttttggcggcatcaagatgatcaaaagcgccttcgaggcctatggtcgcgaaatggatcctgactttgagtatcagtttacggcgctgcgtaagacccacaatcagggcgtttttgacgtctattccccggatatgctgcgctgccgcaaatccggggtgctgaccgggctaccggacggctatggccgcggacggatcatcggcgattaccgccgcgtggcgctgtacggcattcgctacctggtccgcgaacgtgagctgcagtttgccgacctgcagccggcccttgagcgcggcgaggcgctggaggccaccctgcgcctgcgcgaagagctggccgaacagcggcgcgcgctgctgcagatgcaggagatggcggcccgctacggctgcgatatcgcccacccggcgcgcactgcccgggaggcggtgcagtggctctacttcgcctacctggcggcggtgaagtcgcagaacggcggcgccatgtcgctggggcgcacggccaccttcctcgacatctatatcgaacgcgatctgcgcgccggtttattaaatgaggagcaggcccaggagctcattgaccacttcatcatgaagatccgcatggtgcgtttcctgcgcaccccggaatttgattcgctgttctccggggatcccatctgggcgacggaggtgctgggcggcatggggctggatggtcgcaccctggtcagcaaaaccaccttccgctatctgcatactctgcacaccatgggcccggcgccggagccgaacctgaccgtgctctggtcgcaagcgctgccggcggcgtttaaaaaatatgccgcccgggtctctatcgccacctcgtcgctgcagtatgagaacgacgatctgatgcgcagcgattttcacagcgacgactacgccatcgcctgctgcgtcagcccgatggtgatcggcaagcagatgcagttcttcggcgcccgcgccaatctcgccaaaacgctgctctacgcgattaacggcggggtggatgagaaactgaagatccaggtggggccgaaaaccgaccctctgcgtgatgaggtgctggactacgacaccgtgatggccagcctcgaccactttatggactggctggcggtgcagtacatcagcgcgctgaacatcatccattgcatgcatgataagtacagctacgaggcggcgctgatggccctgcacgaccgcgacgtctaccgcacgatggcctgcggcatcgccggcctgtcggtggcagcggattcgttgtcggcgataaagtacgcccgggtgaagccggtgcgcgatcaccacgggctggcggtggactttgtcattgaaggcgactatccgcagtacggcaacaacgacgatcgggtcgatgccatcgcctgcgacctggtggagcgctttatgcgcaaaattcaggcgctccccacctggcgtcaggcggtgccgacccagtcgatcctgaccattacctccaacgtggtatacggccaaaaaaccggcaacaccccggacggacgtcgggcggggacgccgttcgctccgggggccaatccgatgcatggccgcgaccggaaaggggcggtggcgtcgctgacctcggtggcgaaactgccgtttacctacgccaaagatggcatctcgtacaccttctccatcgtgccggcggcgctcggcaaagccccgtcagctcaggaaaacaacctggtgggcctgctggacggctacttccaccacgaggagacggtggaggggggacagcatctcaacgtcaatgtgctgaaccgggaaaagctgctcgatgcgatagaacacccggagcagtatccgaatctgacgatccgcgtctccggctatgcggtccgctttaacgcgctgacccgcgaacagcagcaggatgtgatctcccgaacgttcaccagccaactc

SEQ ID NO: 23631 - DNA, 1329 bp, Klebsiella pneumoniae
atgagtacgactgagagcattgcatccagccagacaagcctttcgtcctggcgtaaatctgacaccacctggaccctgggcctgtttggcaccgctatcggcgccggggtgctgtttttcccgatccgcgcaggcttcggcgggctgatcccgatcctggtgatgctggtgctggcctatcccatcgccttttattgccatcgggcgctggcccggctatgcctgtcgggggctaacccctccggcaatatcaccgaaacggtggaagagcattttggcaaaaccggcggggtggtgatcacctttctgtacttcttcgccatctgcccactgctgtggatttatggcgtcacgatcaccaatacctttatgactttctgggagaaccagctgcagatgccggctctcaaccgcggggtggtggcgctgctcctgctgctgctgatggcgtttgtcatctggtttggtaaagacctgatggtcaaggtgatgagctatctggtgtggccgtttatcgccagcctggtggtgatctccctgtccctgatcccctactggaatagcgcagtgattgaccaggtcaacctcagcgatatcgccttaaccggtcacgacggcattctggtgacggtatggctgggcatctccatcatggtgttctccttcaacttctcgccgatcgtctcctcgtttgtggtctccaaacgcgaagagtatgaagcgcagtttggccgcgagtataccgaacgcaaatgctcacagatcatctcccgggccagcatgctgatggtggcggtggtgatgttcttcgccttcagctgcctgtttaccctctcaccgcagaacatggcggacgccaaggcgcagaatatcccggtgctctcctatctggcgaaccactttgcctcgatgtcgggcaccaaatccacctttgccaccctgctggagtatggcgcgtcgatcatcgccctggtggccatcttcaaatcgtttttcggccactatctcggcacgctcgaggggctgaacggtctgatcctgcgctttggctataaaggggataaaacccgggtctccagcggcaagctcaataccctgagcatggtgttcatcatgggctcgacctgggtggtggcgtatgccaaccccaatatcctcgacctgattgaggccatgggcgcgccgattatcgcctcgctgctgtgcctgctgccgatgtacgccattcgtaaagcgccttcgctggccaaataccgtggccgtctcgacaacctctttgtgaccgctatcggtctgctgaccatcctcaacattgcttacaaactgttc

SEQ ID NO: 23632 - DNA, 1944 bp, Klebsiella pneumoniae
atgcggttgtttattgcagaaaaaccgagtctcggtcgggctatcgccgatgtgttgcctaaaccgcaccgcaaaggcgatggctatattgagtgcggcaacgggcaggtggtcacctggtgtatcggccacctgctggagcaggcgcagccggacatctacgacagccgctatgcccggtggaatctcaacgatctgccgattgtgccggagaaatggcagctgcagccaaagccctcggtcaccaaacagctgaatgtcatcaagcgcctgctcggcgacgccgaggaggttatccacgccggcgacccggacagagaagggcagctgctggtggacgaagtactcgactacctgcagctggcgccggagaagcgtcagcaggtgcagcgctgtctgattaacgatctcaacccgcaggcggtggagcgggcgatcaaccgtctgcgcgccaacagcgagttcgtgccgctctgcgtgtcggcgctggcgcgggcccgcgccgactggctgtatggcatcaatatgacccgcgcctacaccctgctggggcgcaacgccggctatcagggggtgctctcggtggggcgggtgcagaccccggtacttggcctggtggtccgtcgcgatgaagagattgaaaatttcgtcgccaaagatttcttcgacgtgaaggcgcatatcgtcacgccgcaggaggagcgttttgtcgccacctgggtgccgagcgaagcctgcgaaccttaccaggatgaagaagggcgcctgctgcatcgtccgctggccgagcatgtggttaagcgcatcgaaggccagccggcaatcgtgaccggctataacgataagcgcgattccgaacccgcgccgctgccgttctcgctgtcggcgctgcagattgaggcggccaaacgtttcggcttcagcgcgcagaacgtgctggatatctgccagaagctgtacgaaacccacaaactcatcacctatccgcgttcggacagccgctatctgccggaagagcacttcgctggccgccatgcggtgttgaatgcgattgccgtccatgcggcggacctgctgccgcagcccgtagtggatccggagatccgcaaccgctgctgggatgataaaaaggtcgacgcgcaccatgcgattatcccaaccgcccgcagcagccaggtgaagctcaccgataacgaagcgaaggtgtacaccctgatcgcccgccagtatctgatgcagttctgccctgacgcagtgttccgcaaatgccagattgatcttgagatcgccaacggcaagtttgtcgccaaggcgcgttttctggccgaggcgggctggcggacgctgcttggcagcaaagagcgcgatgaagagaacgacggcacgccgctgccggtggtggccaaaggcgatgaactgctgtgcgagaggggtgaggtggtggagcgtcagacccagccgccgcgccactttaccgacgccacgctgctgtcggcgatgaccgggattgcccgcttcgtgcaggataaagatctgaagaagatcctccgcgccaccgacggcctcggcacggaagcgacccgcgcagggattatcgagctgctcttcaagcgtggtttcctgagcaaaaaggggcgctatatccactcttcggaggccggcagggcgctcattcattccctgccggagatggccgggcgaccggacatgaccgcccactgggagtcggtgttgacgcagatcagcgagaaacagtgccgctatcaggactttatgcagccgctggtggggacgctgtatcaactgatcgatcaggcgcgcagcacgccggtgcgtcagttccgcggcctggtggcgccgggcggggcgaagaagtcgttcagcaaaggtaaagggaagccgaaaggcaaaaaagcggcagacgataccgcgccgccgccgcag

SEQ ID NO: 23633 - DNA, 366 bp, Klebsiella pneumoniae; identical to SEQ ID NO: 7226

SEQ ID NO: 23634 - DNA, 1122 bp, Klebsiella pneumoniae
atgcgcggattacgcaatatttataatcttggcgtcaaagaactgcgcagcctgctcggtgataaagcgatgctggcgctgatcgtgtttgcgtttaccgtgtcggtgtactcctcggccacggtgatgcccggttcgctgcacctggcgccgatcgcggttgctgatatggataaatcccagctctcctcacgcattattaacgctttttaccgtccctggtttcttgagccggagctgatcaccgctgatgagatggacgccgggctggatgccgggcgctacacgttcgccatcaacatcccgcctaacttccagcgcgatgtactggccggtcggcagccggaaatccaggtcaacgtcgacgccacgcgcatgagtcaggcctttaccggcaacggttacatccagaatattatcaccggcgaagtaaacagttttatcgcccgctatcgggataacagcgtgctgccggtagagctggcggtcaggatgcgttttaatcctaaccttgagcaggagcgctttggcgcggtgatggcgatcatcaacaatatcaccatgctggccattgtcctcaccggttcggcgctgatccgcgagcgggaacatggcaccattgagcatctgctggtgatgccggtcacgccgtttgaaattatgctggccaagatctggtcgatgggcctggtggtgctggtggtctccgggctgtcgctggtgctgatggtacaggggattttgcaggtgcccattgaagggtcgattcccctgtttatgctgggggtggcgctcagcctgttcgccacgacctcaatcggcatttttatgggcaccctcgcccgctcaatgccgcagctggggctgctgatgatcctggtcttactgccgctgcagatgctctccggcggatccacgccgcgagaaagtatgccgcagctggtacaggatattatgttgaccatgccgaccacccacttcgtcagcctggcgcaggcgatattgtatcgaggcgccagcttcgccatcgtctggccgcagttcttaaccttgctggctatcggcggagtgttctttactatcgcgttgctgcgttttcgtaagactatcggtgagatggca

SEQ ID NO: 23635 - DNA, 417 bp, Klebsiella pneumoniae
atgctgagtggactgaatcacctgaccctggcagtcagccagctggcgccgagcgtggcgttttatcagcagctgctgggcatgacgctgcatgcccgctgggacagcggggcttatctctcctgcggcgatttgtggctgtgcctgtcgctggatccgcagcggcgcgttactccgccggaagagagcgactacacccattatgcgtttagtattagcgaagccgattttgctagcttcgccgcccgccttgaggctgccggcgtggcgatctggaagctgaaccgtagcgaaggcgcttcgcactatttcctcgatcccgatggccataagctggagctgcacgtcggcagtctcgcccagcgtctggccgcctgccgcgaacagccgtataaggggatggtgttttttgatcag

SEQ ID NO: 23636 - DNA, 186 bp, Klebsiella pneumoniae
atgccgggaaaagatggcggcggatttatcgtgaccgttattttggggatcatcggcgccgtggtcggcggctggatcagtaccctgtttggttttggtaaggtcgatgggtttaatttcggcagcttcgtggtagcggttatcggtgcgctggtggtactgtttatttaccggaaagtgcgtagc

SEQ ID NO: 23637 - DNA, 1110 bp, Klebsiella pneumoniae
atgattaatccccatcagcctcgggacattccgcaaatactgctgtcggtgctgttcctggccctgattatcatatcctgcctgtgggttgtgcagccgtttattctgtccttcgcctgggccggtacggtggtgatcgccacctggccggtgctgctgcgtctgcagcgtgtgctgttcggcaaacgactgctggcggtgctggcgatgaccctgttgctgtttctgctattcgttattcctatcgctctgctggtcaacagcctggtggataacagcgttccgctgatcaaactcatcagcagcggaaatgtgacgctgccggatttcgcctggctcaacagcgtaccgctggtcggcgataaactgtactccgcctggcacggtctgctggatatgggcggctcggcgattatggccaaggttcgtccctatattggcaccaccaccagctggtttgtcggtcaggcggcgcacatcggcaagctgctggtctactgcggtttgatgctgctgttcagcgcgctgctctactggcgcggcgagcaggtggcctatggtttccgctacttcgccacgcgcctcgcggccaaacgcggcgacgccgcggtgctgctggccggccaggccgtgcgcgccgtggcgctgggcgtggtggtcactgccctcactcaggcggtactgggcgggattggccttgccgtctccggcgtgccctacgccgctctgctgactgtggtgatgatctttacatgtctggtccagctcggccctttactggttttggtgccgtcgattatctggctttactggagcggggacaccacctggggcaccgtgctgctggtgtggagctgcgtagtcggcaccatggacaacgttattcgtccggtgctcatccgcatgggcgccgacctgccaatgatccttatcctcaccggcgtcattggcggcctgatcgccttcggcatgatcggcctgtttatcggtccggtgctgctggccgtctcctggcgactgtatgacgcctgggtgcatgaggtgccgccgccgccgaaagaccctgacgtcgtccttgaagagctcagtgagctggaggccggtcgcaag

SEQ ID NO: 23638 - DNA, 831 bp, Klebsiella pneumoniae
atggaaagtgctgtagatcgccacgtattttatatttctgacggtaccgccatcacggcggaggtgctggggcatgccgtgatgtcgcaattcccggtcgccatcagcagcgtaaccctgccgtttgtggaaaacatcagccgcgcgcgggcggtgaaggagcagatcgacgccatctatcagcaaacgggtattcgcccgctggtgttctactccatcgtcatcccggaaatacgcgacattattctgcaaagcgaaggcttttgtcaggatatcgtgcaggcgctggtggccccactgcagcaggagctcaacctcgacccgacgccggtggcccaccgtacccacggcctcaaccccggcaacctgattaaatacgatgcgcgtatcgccgctatcgattatacccttgcccatgacgatggcatctcgctgcgcaaccttgaccaggcgcaggtgatcctcctcggcgtctcgcgctgcggcaaaacacccaccagtctgtatctcgccatgcagtacggtattcgcgccgccaactatccgtttatcgccgacgatatggacaatctggttctgccggcctcgctgaaacccctgcagcataagatgttcggcctgaccatcaatccggagcgtctggcggcgatccgcgaggagcgccgggagaacagccgctacgcctccctgcgccagtgtcggatggaagtgaccgaagtggaggccctgtatcgcaagaataaaatcccctgcctgaacagcaccaactattccgttgaggaaatagcgacaaaaatcatggacatcatggggctgaatcgcagaatgtac

SEQ ID NO: 23639 - DNA, 1671 bp, Klebsiella pneumoniae
atgaaatatattagaacgatgacgcagcagaagcttagtttttggctggcgctgtacatcggctggtttatgaacgtcgccgtttttttccggcgtttcgatggttatgctcaagagttcactttctggaaagggctttccggtgttgttgaactggttgccacggtatttgtcaccttcttcctgttacgtcttctgtcgctgttcggccgccgtatctggcgcattctggcgacgctgattgtcctgttttccgccgcggcgagttactacatgacgttcctcaatgtggtgattggctacgggattatcgcttcggtgatgaccaccgatatcgacctgtcgaaagaggtcatcggctggcacctgatcctctggctggtggcggtgagcgcgccgccgttgctgttcatctggagcaaccgctgccgccatacgctgctgcgccagctgcgcaccccgggccagcgggttaaaaacgtgctgatcgtggtgctggccggactaattgtctggggacccatccgcctgctagagctgcgccagcatgatgtggagcgccattcggaagtggatatgccgagctatggcggggtgatcgccaactcttacctgccgtcgaactggttgtcggcgctgggtctgtacgcttgggcgcaggtggatgaatcctcagacaacaaatcgctgattaacccggcgaagaagttcacctacgtcgcgccggaaggtctggatgatacctacgtggtgtttatcattggcgaaacgacccgctgggaccatatgggcatcctcggctatagccgcaataccacgccagagctggagaaagagaagaatctcgtcgccttccgcggttactcgtgcgataccgctaccaaactgtcgttacgctgcatgtttgtgcgcgagggcggggcggaagataatccacagcggacgctcaaagagcagaatgtctttgccgtgctgcatcagctgggcttcagcggcaatctgtacgccatgcagagcgagatgtggttctacagcaacacgatggccaacaatatcgcctaccgcgagcagattggcgccgagccgcgcaaccgcggtaagagcgttgacgatatgctgctggtggatgagatgaagcgcggtatggcgcagggcaacgcctccggtaagcatctgatcattctccacaccaaaggctcccactttaactacacccaacgctacccgcgcagcttcgcccagtggaaaccggagtgcgtcggcgtcgacaacaagtgctcgaaagcggaactgatcaattcctacgacaatagcgtgacctatgtcgatcactttatcgtcagcgtcctcgaccagctgcgggataagaaagcgattgtgttctatgccgccgaccacggggagtcgattaacgagcgtgaacacctgcacggtacgccacgcaagatggcgccgccggagcagttccgcgtgccgatgatggtgtggatgtcggataagtacctggaaaatcccgatcacgccgccgcgtttgcccatctgcagcagcaggctgcgatgaaggtgccgcgccgtcacgtcgagctgtacgacaccattatgggctgcctcggctatacctcgccggatggcgggatcaatgagaacaacaactggtgccggtggaaaaag

SEQ ID NO: 23640 - DNA, 993 bp, Klebsiella pneumoniae
atgcaagaaaagatacactggatcaccaacctgcgcggcatcgcctgcatgatggtggtgatgatccacagcaccagctggtatatcactcacccccatgcgattaccctgctgcaatgggatatcgccaatctgctcaattccgcctcccgcgtcagcgtgccgctgttttttatgatctcgggctacctcttttttggggaacgcagcgcccagccgcgccatttctggcggattggcctgtgcattgcgttctatagcgcgctatctctgctgtatatcacgctgtttacccaaatcaacgtcgagctgtcgttaaagaatttgctgcagaagcccgtcttctaccacctgtggtttttctttgctatcaccgtcatctacctgctctcgccgctgcttcaggttaagtccaccagtagcacaatgctgctggcgctgatggcgatcctcggcattctggccaaccccaatatggtcagcgttaaagccgccgggattgagtggctgccagtcaacctctatatcaacggcgacaccttctactacgtgctctacggcgtgctgggcagagccattggcaccctggacaccgataaaaaatggctaacaccgctctgcgccgcgctgttcatcgccgccgtgtgggtcatttcccgcggcacgctgcatgagctgcgctggcgcggagacttcggcgacacctggtatctctactgcggaccggcggtgtttgtttgcgcggtcaccctgctgacgctggccaaaaactggcttaacgcgcgtcccctgcccggtatcgcctgcattgcgcgacattcgctggggatctacggctttcatgccctgatagtgcatgcgctgcgcgccagccatctggagctatcccgctggccgctgctggatattgtgtggatatttagcgccgccctgctcggcagcctgctgctgtcaggcctggtgcagcggattgatagccgccggctggtcagc

SEQ ID NO: 23641 - DNA, 210 bp, Klebsiella pneumoniae
atgtccggtaaaatgactggtatcgtaaaatggttcaacgctgacaaaggcttcggcttcatcactcctgacgatggctctaaagacgtgttcgtacacttctctgctatccagaacgatggctacaaatccctggacgaaggtcagaaagtatccttcaccatcgaaagcggcgctaaaggcccggcagctggcaacgtaacttctctg

SEQ ID NO: 23642 - DNA, 2067 bp, Klebsiella pneumoniae
atgtctgagaatacttttctggtggaaatcggcactgaagagctgccaccaaaagcgctgcgcagcctggcggaatcttttgctgcgaatgtgaccgcggagctggataacgctggccttgcgcacggtaaagtggaatggtttgccgccccgcgtcgtctggcgctgaaggtggccaacctggcggcggcgcaagccgatcgcgaagtggaaaaacgcggcccggctattgcccaggcgttcgatgccgaaggcaagccaagcaaagcggccgaaggctgggcgcgcggctgcggtatcaccgtcgatcaagccgaacgtctgaccacggacaaaggcgagtggttgctgtatcgcgcccatgtgaagggtgaaagcaccgaagcgctgctgccgaacatgattgccagctcgctggcgaagctaccgatcccgaaactgatgcgctggggcgcgtctgacgtccacttcgtgcgtccggtacacacggtgactttgctgctgggtgacaaagtgatcccggccactatcctcggtattccgtccgatcgcgtgattcgcgggcatcgctttatgggcgagccggagttcaccatcgaccatgccgaccagtacccgcagatcctgctggagcgcggtaaagtcatcgccgattacgaacagcgtaaagccaaaatcaaagctgatgcgcaagaggcggcacgtaagattggcggtcaagccgatctgagcgaaagcctgctggaagaggtcacctcgctggtggaatggccggtggtgctgacggcgaagttcgaagaaaaattcctcgcggtgccgtctgaagcgctggtttacaccatgaagggcgaccagaagtacttcccggtctacgacaacgccggcaaactgctgccgaactttatcttcgtggccaacatcgagtccaaagatccgcagcagatcatctccggtaacgagaaggtggtccgtccgcgtctggccgatgccgagttcttcttcaataccgaccgtaaaaaacgtctggaagataacctgccgcgtctggaaaccgtgctgttccaacagcaacttgggactctgcgcgacaagaccgatcgcatccaggcgctggcgggttggattgccgaacagattggcgctgacgtgaaccacgcaacccgcgcgggcctgctgtccaagtgcgacctgatgaccaacatggtcttcgagttcaccgacacccagggcgtgatggggatgcactacgcgcgccatgacggcgaagcggaagacgtggccgtggcgctgaacgagcagtatcagccgcgctttgccggcgacgcgctgccgtctaacccggtggcctgcgcggtggcgattgccgataagatggacaccctggcgggtatcttcggtatcggccagcacccgaaaggcgataaagacccgtttgcgctgcgccgcgccgcgctgggcgtcctgcgtattatcgtcgagaagaacctgaatctcgatctgcaaacgctgactgaagaggcggtgcgtctgtacggtgagaagctgaccaacgccaacgtggttgatgacgtgatcgactttatgctgggccgcttccgcgcctggtatcaggacgaaggctacggtgtcgacactatccaggcggtactggcgcgtcgtccaacccgcccggcggatttcgatgcgcgtatgaaggcggtatcgcacttccgtactctggaagagtcctccgcgctggcggcggcgaacaagcgtgtctccaacatcctggcgaaatccgacgaaacgctgaacgacatcgttcacgcttcggtgctgaaagaagcggcggaaattaagctggcgggcaatctggtggtgctgcgcgacaagctgcagccgtacttcgccgcaggccgctatcaggatgcactgattgagctggctgcgctgcgcgagccggtggatgagttcttcgagaacgtgatggttaacgctgaagacaaagatgttcgcatcaaccgtctgacgctgctgtccaaactgcgcgagctgttcctgcaggtagcggatatttctctgctgcag

SEQ ID NO: 23643 - DNA, 1152 bp, Klebsiella pneumoniae
atggcaaaacacctttttacgtctgagtccgtatcagaagggcatcctgacaaaattgctgaccaaatctccgatgccgtgctggatgcgatcctcgagcaggatccgaaagcgcgtgtcgcatgtgaaacctatgtcaaaaccggcatggtgctggtaggcggcgaaatcaccaccagcgcatgggttgatatcgaagagatcacccgcaacaccgtccgcgaaattggctacgtgcattccgatatgggctttgacgccaactcgtgcgccgtactgagcgccattggtaaacagtctccggacattaaccagggcgttgaccgtgccgatccgctggaacagggcgccggcgaccaggggctgatgtttggctacgccactaacgaaaccgacgtgctgatgccggcgccggtgacttacgctcaccgtctggtgcagcgtcaggctgaagtgcgtaaaaacggcaccctgccgtggctgcgcccggatgcgaaaagccaagtgaccttccagtatgacgacggcaaaatcgtcggcatcgacgcggtcgttctgtcgactcaacacgcggaagatatcgatcagaaatccctgcaggaagcagtgatggaagagatcatcaagccgattctgccgaccgaatggctcaacgcgtccaccaaattcttcatcaacccgaccggccgtttcgttattggcggcccgatgggcgactgcggtctgaccggtcgtaagatcatcgttgatacctacggcggcatggctcgccacggcggcggcgcgttctccggtaaagatccgtctaaagttgaccgttccgcagcctacgcggcgcgctatgtggcgaagaacatcgttgccgcaggcctggccgatcgttgcgaaattcaggtttcctacgctatcggcgttgcagaaccgacgtccatcatggtggaaacctttggcaccgagaaagtgccttctgaacagctgaccctgctggtgcgcgagttcttcgacctgcgtccatacggcctgattcagatgctggatctgctgcacccgatctacaaagaaaccgcagcctacggtcactttggtcgcgaacatttcccatgggaaaaaaccgacaaagcggcgctgctgcgggaagcggccggtctgaaa

SEQ ID NO: 23644 - DNA, 918 bp, Klebsiella pneumoniae
atgagcactttaggtcatcaatacgataactccctggtatccaatgcctttggctttctgcgtttgccaatgaactttatgccgtatgaaagcgatgcggactgggtcatcaccggcgtgccgttcgatatggcgacctccgggcgcgcgggcggccgtcatggcccggcggcgatccgtcaggtttccactaaccttgcctgggagcacaaccgtttcccgtggaacttcgatatgcgcgagcgcctgaacgtggtggactgcggggatctggtgtacgccttcggcgacgcgcgcgaaatgagcgagaagctgcaggctcacgccgagaagctgctggcggccggcaaacgtatgctctcctttggcggcgaccacttcgttaccctgccgctgctgcgcgcccatgccaagcactttggtaaaatggcgctggtgcacttcgatgctcacaccgatacctacgccaacggctgcgagttcgaccacggcaccatgttctataccgcgccgaacgaagggcttatcgatccgaaccactccgtacagatcgggatccgcaccgagttcgacaaagacaatggctttacggtgctcgacgccggccaggttaacgaccgcagcgttgatgacgtgattgcccaggtgaagcagatcgtcggcgacatgccggtgtacctgacctttgatatcgactgtctggatccggcgtttgcgccaggcaccggtaccccggttatcggtgggctgacctccgaccgcgcgatcaagctggtgcgcggcctgaaggacctgaacatcgtcgggatggacgtggtggaagtcgccccggcctacgatcagtccgaaattaccgctctggcggcggcgaccctggcgctggagatgctgtacatccaggcggcgaaaaagggcgaa

SEQ ID NO: 23645 - DNA, 321 bp, Klebsiella pneumoniae
atgagctggataggcgtatgtgacgcggagcaagtacaggaagatttcccatatagcggcaatatcgatggtaaggaaatcggtatttatctgattgatggcgaatattacgcgctggaagacgtttgccctcatgcctatgcgctcctgagccagggctttgtcgaagatggcaaggtggaatgcccgctgcatgaggcggtattcgacgtcaaaaccggccagtgcctgcatggacccggcggtcgcaaccttaatcgttacccggtgcgggtatacgacaatcagatccagattacctttatcgaggagaacgtggca

SEQ ID NO: 23646 - DNA, 1161 bp, Klebsiella pneumoniae
atgtctgtaattaagatgaccgatctggatctggctggtaaacgcgtttttatccgtgcggatctgaacgtaccagttaaagacgggaaagtaaccagcgacgcacgtatccgtgcatctctgccgaccattgaactggcgctgaagcagggcgcgaaagtcatggttacttctcacctgggtcgtccgaccgaaggcgagtacaacgaagaattctctctgctgccggttgttaattacctgaaagacaaactgtccaacccggtacgcctggttaaagactacctggacggcgtggaagtggctgccggtgaactggtggtgctggaaaacgttcgcttcaacaaaggcgagaaaaaagacgacgaagaactgtctaagaaatacgctgcgctgtgcgacgtgttcgtgatggacgctttcggtactgcgcaccgcgcgcaggcttccacccacggcatcggcaaatttgctgacgtggcgtgcgcaggcccgctgctggccgctgaactggacgcgctgggtaaagcgctgaaagagccagctcgtccgatggtcgctatcgttggtggttctaaagtgtccaccaaactgaccgttctggattccctgtctaaaatcgctgaccagctgatcgtgggcggcggtatcgctaacaccttcgttgccgctcagggccacaacgtcggtaaatccctgtacgaagcagatctggttgatgaagccaagcgcctgctgggcacctgcgatatcccggttccgaccgacgttcgcgtagcgaccgagttctccgaaaccgcaacggcaaccctgaaatctgttaacgacatcaaagatgacgagcagattctggaccttggcgacgtttccgcacagaaactggctgaaatcctgaagaacgccaaaaccatcctgtggaacggcccggttggcgtattcgaattccctaacttccgtaaagggactgaaatcgtggctaacgctatcgcggacagcgaaggtttctccatcgccggcggcggtgacaccctggcagcgatcgacctgttcggcatcgctgacaaaatttcctacatctccactggcggcggcgcattccttgaattcgtcgaaggcaaagtcctgccggcagtagcgatgctcgaagagcgcgctaagcag

SEQ ID NO: 23647 - DNA, 792 bp, Klebsiella pneumoniae
atgaatgcacaaattgaaggacgcgtcgcggtagtcaccggcggttcgtcaggaatcggctttgaaacgctgcgcctgctgctgggcgaaggggcgaaagtcgccttttgcggccgcaacccggatcggctggctagcgcccatgcggcgttgcaaaacgaatatccagaaggtgaggtgttctcctggcgctgtgacgtactgaacgaagctgaagttgaggcgttcgccgccgcggtcgccgcgcgtttcggcggcgtcgatatgctgattaataacgccggccagggctatgtcgcccacttcgccgatacgccacgtgaggcctggctgcacgaagccgaactgaaactgttcggcgtgattaacccggtaaaggcctttcagtccctgctagaggcgtcggatatcgcctcgattacctgtgtgaactcgctgctggctctgcagccggaagagcacatgatcgccacctctgccgcccgcgccgcgctgctcaatatgacgctgactctgtcgaaagagctggtggataaaggtattcgtgtgaattccattctgctggggatggtggagtccgggcagtggcagcgccgttttgagagccgaagcgataagagccagagttggcagcagtggaccgccgatatcgcccgtaagcgggggatcccgatggcgcgtctcggtaagccgcaggagccagcgcaagcgctgctattcctcgcttcgccgctggcctcctttaccaccggcgcggcgctggacgtttccggcggtttctgtcgccatctg

SEQ ID NO: 23648 - DNA, 924 bp, Klebsiella pneumoniae
atgagtattaccggaattgaaaagctggaatttggcgtagacgacctgaaccacagcgctaaattcatgcgcgattttggcctgaccggcgacgccagcggccgcgcgtttaccaccctcagcggcgcgcgggtcgaacttaacccgaccgatgccgccaacttaccgccagcctttgaggcgggcaacaccctgcgtcgcatgacctggggcgtggcggatcgggcggcgctggatgcgctgcgcccgaagctggaacgccagcccgctttccgtgaaatcgacggcgcgctggagtgccgcgatcccaacggtatgacgctgcgggtgcaggttagccagcaaacggcggttgaactgaacgttgaaccgatcaaccagtggggcgatgtgcgtcgcatcgacactccgagcccggtatacgaccgcgcgcagccgattaacgtcggccacgtggtgttcttcgtggaagaactggcggcggtggaaagtttctatcgcgaagtactcggctttcaggtgtcagaccgctacatcaatcgcgcggtgttcctgcgctgcggcgtgcgcggcggacaccataacctcttcttattgcagttgcccaaccgcaagcgcgggctaaaccacgtcgcgtttaccgtacgggatattcatgaagtgatcggcggcggcattgcgatgaataaaaacgcgtggagcacgtttatcggtcccggccgccatccggtctcctcggcctacttctggtatgtcaacagcccgaccggcggcgcttttgagtactacaccaacgatgattatctgacggaaaactggcagccgcgcgagctggagcattcactcgtgtcctttaccgaatgggcggtggaaggcggtatcgatcacgatacccgtcgccagcagaaaaaaccggaggcggta

SEQ ID NO: 23649 - DNA, 739 bp, Klebsiella pneumoniae
gtgaagttaaaagtcttagccctggctggcaacactcggattgaccacgatggcggcacaggccagcgaattgccggatggcccgcacattgtgacttcaggcacagcaagcgttgccgcggttccggacatcgccaccctggcgatcgaagtgaacgtgtcggcaaaagacgccgcgtcggcaaaaaaacaggctgacgatcgcgttgcgcaatatctctctttcctcgaaaagagcggtattgctaaaaaggacatcaactcggcgaatctgcgtacccagcctgattacgactatcagaacgggaaaagcattctgaaaggctatcgcgcggtgcgcacagtggaagtgaccttgcgccagctggataaactcaacggtctgctggatggcgccctgaaagcgggtctcaacgagattcgctccgtctcgctgggcgttgcgcaaccggacgcctacaaagataaagcgcgtaaagcggcgatcgacgacgccgtgcatcaggcgcaggagctggccgcaggcttccacagcaagctgggtccggtgtacagcgtgcgctaccatgtctccaactatcagccgagcccgatggttcgcatgatgaaggccgctgacgctgcgccggtttctgcccaggaaacctacgagcaggcgactatccagtttgacgaccaggtcgatgtagtctttgagctgcagccggcgcaagccgctgctccagccaccccggcgaaa

SEQ ID NO: 23650 - DNA, 893 bp, Klebsiella pneumoniae
atgaaacgaccggactacaggacactacaagcgctggatgcggtgattagggaacgaggatttgagcgcgccgcgcagaagctatgtattacccagtccgccgtctcacagcgtattaagcagttggaaaatatgttcggccagccgctgctggtgcgtaccgtgccgccgcgccccaccgagcaaggacagaaactgctggctctgttgcgccaggttgaactgctggaggaagaatggctgggcgatgaacaaccggctctacgccgctgctgctgtcgctggcggtgaacgccgacagtctggcgacctggctgctgccggcgctggccaacgttctgtcagactcccctattcgtctcaacctgcaggtggaagatgaaacccgcacccaggagcgcctgcgccgtggcgaagtagtgggcgcagtgagtatccagccgcaggcgctgccaagctgcctggtggatcagctgggggcgctcgattacctgtttgtcgcatcaaaagagtttgcgcaacgctatttcccgaatggcgtgacgcgttcggcgctgcttaaggcgccggtcgtcgccttcgaccatctggacgatatgcatcaggcgttcctgcagcaaaacttcgacctgccgccgggcagcgtcccctgccacatcgtcaactcgtcggaagctttcgtgcagctggcgcgccagggcaccacctgctgtatgatcccgcatctgcagatcgaaaaagagctcaacagcggcgaacttatcgatctcaccccgggcctgttccagcgccgcatgctctactggcaccgcttcgccccggaaagccgcatgatgcgccgggtgaccgatgcgctcattgactacggacacaaggtgctgcgtcaggattaa

SEQ ID NO: 23651 - DNA, 1989 bp, Klebsiella pneumoniae
atgtcctcacgtaaagagcttgctaacgctattcgtgcgctgagcatggacgctgtacagaaagccaaatccggccacccgggggccccgatgggtatggctgacattgccgaagtgctgtggcgtgatttcctgaaccataacccgaacaatccggcctgggctgaccgtgaccgttttgtgttgtcaaatggccatggttcgatgctgatttacagcctgctgcacctcactggctacgatctgccgattgaagagctgaaaaacttccgccagctgcactccaaaactccgggtcacccggaagtcggctacaccgcaggcgtggaaaccaccaccggtccgctgggccagggtatcgctaacgcggtcgggatggctatcgccgagaaaaccctggcggcgcagttcaaccgtccgggacacgatatcgtcgaccactacacctacgccttcatgggcgacggctgtatgatggaaggcatttctcacgaagtgtgctccctggccggtaccctgaaactgggtaaactggtggcgttctatgatgacaacggcatctccatcgacggccacgttgaaggctggttcaccgacgacaccgcgaaacgctttgaagcctacggctggcacgtggtgcgcggcgtggacggtcacgacgctgacgccatcaaacgcgcggtagaagaagcacgggcggtcaccgacaaaccgtccctgctgatgtgcaaaaccatcatcggtttcggttcgccgaacaaagccggtacccacgactcccacggcgcgccgctgggcgacgccgaaatcgccctgacccgcgaagcgctgggctggaaacacgcgccgtttgacatcccgtctgacatctatgcccagtgggatgccaaagaagccggccaggcgaaagaagcggcgtggaatgagaagttcgctgcctacgccaaagccttcccgcaggaagcagccgaattcacccgccgtatgaaaggcgagatgccgtctgacttcgacgcgaaagctaacgagttcatcgcgaagctgcaggccaacccggcgaaaatcgccagccgtaaagcctcgcagaacgccatcgaagccttcggcccgctgctgccggaattcctcggcggctccgcagatcttgcgccgtccaacctgaccctgtggtccggctctaagccgatcaacgaagacgctgccgggaactacatccactacggcgtgcgcgagttcggtatgaccgctatcgccaacggtatcgcgctgcacggcggcttcctgccgtacacctccaccttcctgatgttcgtggaatacgcgcgtaacgcggtacgtatggccgcgctgatgaaacagcgtcaggtgatggtctacacccacgactcgatcggtctgggcgaagacggcccgactcaccagccggtagagcaggtggcttccctgcgcgtgaccccgaacatgtccacctggcgtccgtgtgaccaggttgaatccgcgattgcgtggaaatatggcgtggagcgtcaggacggcccgaccgcgctgatcctctcccgtcagaacctggcgcagcaggagcgtaccgcagagcagctggcgaacgtggcccgcggcggttatgtgctgaaagattgcgccggccagccggagctgatcttcatcgccaccggttcagaagtggaactggcggttgccgcatgggacaaactgactgccgaaggcgtgaaggcgcgcgtggtttccatgccgtccaccgacgcgttcgacaagcaggatgcggcttatcgcgaatccgtactgccgaaagccgtgaccgcgcgcgttgccgtggaagcgggtatcgctgactactggttcaaatacgttggcctgaacggcgctatcgttggcatgaccaccttcggtgagtctgcgccggctgagcagctgttcgaggagttcggcttcaccgttgataacgtggtcgctaaagcgaaagcgctgctg

SEQ ID NO: 23652 - DNA, 594 bp, Klebsiella pneumoniae
atgactatacagcccgataccctgctctcccgtcagcatattcgccagcagatccgcgatcgtcgacgcgcactcagcccggagcaacagcgcctgtttgcccaacaggccgccgagcggatgatggcctggccgccgatagttctcgctcacaacgtggcgctgtttctctcctttgacggcgagctggacacccagccgctgatcgaccagctctggcgcgccggcaagcgggtatatctcccggtgctgcatccctttagccccggcaatctgctgtttttacactaccatccgcagagccaactgatcgtgaatcgcctgaagatccgcgaaccgaagctcgatgtgcgggatgtgctgccgctggctgaactcgatgtgctggtgaccccgctggtggccttcgatgtcagtggccaacggctgggaatgggcggcggtttttacgaccggacgctgcaaaactggcagcagtatcgcctgcagccggtgggctacgcgcacgactgccagcaggtggatagcctgccgagcgaagagtgggatatcccgctgccggcggtcatcaccccgggaaaaacctggtgttgg

SEQ ID NO: 23653 - DNA, 1335 bp, Klebsiella pneumoniae
atgaaaaccgtaattcgtactgcggaaacgcatccgctcacctggcgcctgcgcgacgacaagcagccggtgtggctggacgagtatcgcagtaaaaatggctatgaaggggcgcgtaaagccctgaccgggatggccccggatgagattgtcacggcggtaaaagacgctggcctgaaagggcgcggcggcgcgggcttctccactggtctgaagtggagcctgatgccgaaagacgaatccatgaacatccgttacctgctgtgtaacgccgatgaaatggagccgggcacctataaagaccgcctgctgatggagcagctgccgcacctgctggtggaaggcatgctgatctccgcgtttgcgctgaaagcgtaccgcggctacatcttcctgcgcggggaatatattgaagcggcccagcatctgcgtcgcgcgattgctgaagccaccgaagcgggtctgttggggaaaaacatcctcggcaccgggtttgacttcgagctgttcgtgcacaccggggcagggcgctatatctgcggcgaagaaacggcgctgatcaactctctggaaggccgccgcgccaacccgcgatccaagccgccgttcccggcgagctccggcgtctggggcaagccgacctgcgtcaacaacgtagaaaccctgtgcaacgtgccagcgatcctcgccaacggcgtcgagtggtaccagaacatttccaccagcaaagatgctggcaccaagctgatgggcttctccggccgggtgaagaatccgggcgtctgggagctgccgttcggcaccactgctcgcgagatcctcgaagattacgccggcggtatgcgcgatggcctgaagtttaaagcctggcaaccgggcggagcagggaccgacttcctcaccgaagcgcacctcgatctgccgatggaattcgaaagcattggtaaagcgggcagccgtctgggcacctcgctggcgatggccgttgaccacgagatcaacatggtctcgctggtgcgtaaccttgaagagttctttgcccgcgagtcctgcggctggtgtacgccgtgccgcgatggtctgccgtggagcgtgaagatcctgcgcgccctggagcgcggcgaaggccagcctggcgatatcgaaacccttgagcaactgtgtcgattcctgggcccgggtaaaaccttctgcgcgcacgcgccgggcgcggtcgagccgctacagagcgcgattaaatatttccgcgaagaattcgaggctggcattaagcagcagttcagcaatacccatgcaatcaacgggattcagccgaacctgcttaagacgcgctgg

SEQ ID NO: 23654 - DNA, 498 bp, Klebsiella pneumoniae
atgcacgagaatcaacaaccacaaaccgaggcttttgagctgagtgcggcagagcgtgaggctattgagcacgagaagcaccactacgaagacccgcgtgcggcgtccatcgaagcgctgaaaatcgttcagaaacagcgcggctgggtgccggatggcgcgatctacgccatcgccgatgtgctggggatcccggccagcgacgtggaaggcgtggcgacgttctacagccagattttccgccagccggttggccgtcacgtgatccgctactgcgacagcgtggtatgccacatcaccggctatcagggtattcaggccgccattgagaagaaactgaatatcaagccggggcagaccacctttgatggccgctttaccctgctgccgacctgctgcctgggtaactgcgacaagggaccgaccatgatgattgatgaggatactcacagccatctgacgccggaggcaattcctgacctgctggagcagtacaaa

SEQ ID NO: 23655 - DNA, 1839 bp, Klebsiella pneumoniae
atgaacatgcttgccttaaccattcttttgccattgattggctttgtgctgctggccttctcccgcgggcgctggtcggaaaatctttccgccgccgttggcatgggctcggtaggcctggcggcgctggtcaccgcgtacgttggcgtcgactttttcgctaacggcaaacaggcggtcagcgtgccgctgtggacctggatgtcggtcggtgatttcaacatcggcttcaacctggtgttggacggcctgtcgctgaccatgctctccgtagttaccggcgtcggcttcctgatccacatgttcgcctcctggtacatgcgcggtgaagagggatattcccgcttcttcgcctataccaacctgtttatcgccagcatggtggttctggtactggccgataacctgctgctgatgtacctcggttgggaaggcgtgggcctctgttcttacctgctgatcggtttctactacaccgatccgaagaacggcgccgcagcgatgaaagcgtttgtggtgacccgcgtcggcgacgtgttcctcgccttcgcgctgttcattctttataacgaactgggtaccctgaacttccgcgaaatggtggagctggcgccgcagcacttcgctaacggcagcaccacgctgcagtgggcgacgctgatgctgcttggcggcgcggtcggtaaatccgcccagctgccgctgcaaacgtggcttgccgatgcgatggcgggtccgacgccggtctctgcgctgatccacgccgcgaccatggtcaccgcgggcgtctatctgatcgcccgtacccacggcctgttcctgatgacgccggaagtgctgcatctggtcggtatcgtcggggcggtcaccctggtgttggcgggcttcgccgcgctggtgcagaccgatatcaaacgcgttctcgcctactctaccatgagccagattggctacatgttcctcgcgctgggcgtgcaggcatgggacgcggcgattttccacctgatgactcacgcgttctttaaagcgctgctgttcctgtcgtctggttcggtcattctggcctgccatcacgaacagaacatcttcaagatgggcggcctgcgcaaatcgattccgctggtatacgtctgcttcctggtggggggcgcggcgctgtccgcactgccgcttatcaccgcaggcttcttcagtaaggatgagattctggcaggcgcgatggccaatggccatatcaatctgatggtggcaggcctggtcggcgcctttatgacctcgctgtacaccttccggatgattttcatcgtattccacggtaaagagcaaattcacgcgcacgcagggaaggggattacccatcatctgccgctgattgtgctgctggtactatccaccttcgttggcgcgctgattgtgccgccgctggaaggcgtactgccgcagaccactgagctcgcccacggtagcgtgatgacgctggagattgcctccgggatcatcgccattgccgggattctgatcgctgcatggctgtggctgggcaaacgcacgctggtgacctccatcgccaacagtgcgcctggccgcttcttcggtacctggtggttccatgcctggggcttcgactggttatacgacaaggtgttcgtaaaaccattcctcggtattgcctggctgctgaaacgcgatccgctgaactcgttgatgaatatcccggcgatcctttcccgcttcgcaggcaaaggcctgctggtgagcgagaacggttatctgcgctggtatgtggcttcaatgagcatcggcgcggtggtggtgctggcgctgctgatggtattgcgt

SEQ ID NO: 23656 - DNA, 1170 bp, Klebsiella pneumoniae
atgattaacggtttaaaacctctcgaccgcaccctgcgctggggcatggtcggcggcggcggcggcagccagatcggctatattcaccgctctgcagcgctgcgtgataacaccttcacgctgctggccggcgcctttgatattgatgccgagcgcggacgccagttcggccaacggctgggggtggatcccgaccgctgttacgccgactatcaaagcctgttccgcggcgaggctgcccggcctgacggcattcaggcggtgtcagttgccacgccaaataacacccactatgccatctgccgggccgcgctggaggccgggctgcacgtggtgtgcgaaaagccgctgtgcttcagcagcgaggaagctgacgagctggtggcgctcagccagcggcggcgcaagatcatcggggtgacctacggctatgccggccaccagctgatcctgcaggcccggcagatgatcgccgacgggctgctgggcgatatccgtatcgttaatatgcagtttgcccacggttttcacgcccagccggtggaacaggaaaacgccagtacccgctggcgggtcgatccccgcttcgtcggccccagctatgtgctgggcgacctggccacccatccgctgtttctggtcgaaaccatggccccgcagctgaagatcacccggctgatgtgcgccagacaaagcttcgtcaaaagccgcgcgccgctggaagataacgcccatgtactgatggagtatgacaacggggccatcggctcaatgtggagctccgccgtcaactgcggttcgatgcacgggcaaaaggtgcgaatcatcggtgaaaaagccagtctcgaatggtgggatgaacagcccaaccagctacgctacgaaatccagggcgaacccgtgcgcatcctcgagcgcggtatggactatctcgatccgctggcgcgtcaggatgatcgcatcggcggcggccatcccgagggactgtttgaggcatggtcgaatctctatcgccgcttcgccatcgccatggatgccgccgaccgtcgcgacgaggcgctgctggccgacttctggtacccggacgcccgcgccggggcgttcggcgtccgctgggtggaaaactgcgtgcgttctgccgacaacggcgcctgctgggtcgacttccgc

SEQ ID NO: 23657 - DNA, 693 bp, Klebsiella pneumoniae
gtgatcgttcccgcttttagccaaggtctttacggccgtttacgccagctggccgccgctgactggcagcgctatgtggcgcatcctttcgtccagcaacttgcctctgggacgctggcggaaaacgcctttcgtcgctatctgacccaggattatctgtttctgattcactttgcccgcagctacgcgctgctggtgagtaaactgcgcacgctgccggagatgcgggccgcggccgcctcgatgaatgccatcctcaacgaactgccgctgcacgtcggctactgtgcccagtgggggattagcgaaccggagatggccgcccaacctgaagcccccgaaactctcaactatacccgctatgtgctggatattggccactcgggtgacgcgctggatctgctggtcgccctgatgccctgcgtcgcgggctacgccgaaatcggtctcggcctgctgcaacatcccgccacccgactggacgataacccctacgcctcatggatccgcaactatggcgatgaaggctatctgcagggcgtcagcgccgcgctggcgctgttggaaacggtgtggcagcagcgcgggagcgaggcgcgaatcactgagctgagcgagattttcaccaccgccacccgccttgaggcgcagttctggcagatgggcctcaacgccgcggcggagacccgggcg

SEQ ID NO: 23658 - DNA, 1134 bp, Klebsiella pneumoniae
gtgatacaaagtcgaagttggcaattgttgcgggcatgtgaatttatgcttgccccgggagataaatccgttaccgtggcaggcatttttcaccacttaagaacgcaggaacccgctatggcgatttttgatggtcacaatgacctgctgctgaatctctggcttcaccatcgcgaggatccggtgagcgccttctttgccgggatagagaacggccatctcgactatccgcgcatgctgcaaggcggatttgccggcgggctattcgcgctattcgtgccaccgcaggaatatattgcccgtatgacgccgcaatacgccagccaacgatgggatccgatcgatatcctctggcagcaactggccatcctgaagcaacttatcgcccactccgctggacgcttgagattgtgtctgagcgcggcggatatcgagcgctgccgcgaggataaggtactggcgatggtggcgcatattgagggtgccggaggttttgatggcgagggccgcgacctgcaggccttttatgccgccggggtccgcagcattggtccgttctggaatattgcgaaccgcttcggcagcggcgttaacggttcgtttcccggtagcccggacactgggcctggactgactgcgtcaggtatcgatctgattaagcaggccaatgccttgaagatgcagattgacgtgtctcatatgaatgaaaaagcgttctgggataccgcccatcacgcaacgtcaccgctggtggccacccactccaatgcccacgccctgtgcccgcagccgcgcaatctgaccgaccagcaactgcgggcgatccgcgacagcggcggcgtggtgggcgtcaatttcggcaatgctttcctgcgcgccgacggccggcgcgatagcgacacgcccttaaccaccattgtccggcatatcgactatcttattaacataatgggtgaggatcatgtggctcttggctcggattttgacggcatcaccctgccggacgagctgggcgatgtggccggcttaccgcggcttatcaatacgttgcgcgctagcggctatgatcaattggtgctggataagctgctgtggcgtaactggctacgggtattaaaaaatgtttggcaacaa

SEQ ID NO: 23659 - DNA, 924 bp, Klebsiella pneumoniae
atgttcattaaagtcctcggttccgccgccggcggcggtttcccgcaatggaactgcaactgcgccaactgtcagggtctgcgcgatgacaccattcaggctgccccccgcacccagtcgtcaattatcgtcagcgacaacggtaaagagtgggtgctgtgcaacgcctcgccggatatcagccagcagattgcccatacccccgagttaaataaagccggcgtactgcgcggaacgcatatcggcggcattattctcaccgacagccagatcgaccacaccaccgggttgctgagcctgcgggaaggctgcccacatcaggtctggtgcaccccggaggttcatgaggatctctccaccggcttcccggtgtttaccatgctgcagcactggaacggcggcctggtgcatcatcccatcgctccgcagcagccttttaccgttgacgcctgtcctgatttacagtttaccgcggtgcctatcgccagcaacgcgccgccctattcgccgtatcgcgaccggccgctgccgggtcataacgtggcgctgtttatcgaaaaccgccgcaacggacagacgctgttctatgccccggggctgggtgagccggatgaaacccttctgccgtggctgcaaaaagcggactgtctgctgatcgatggcaccgtctggcaggatgacgagctgcaggccgccggcgtcgggcgcaataccgggcgcgatatgggccacctggcgctcggcgatgagcacgggatgatggccctgctggcctccctgccggcaaaacgcaaaattctcattcatattaataacaccaacccgatccttaacgagcagtctccccagcgccaggcgctaacgcaacaggggatcgaagtgagctgggacgggatggcaatcacccttcaggataccgcatgc

SEQ ID NO: 23660 - DNA, 846 bp, Klebsiella pneumoniae
atgaactgtttaacgcgtattcgtcagcgctatcccaccctggcggcgagcgacaaaaagttggccgattatattctgagccagcccgatgagacccggcacctcagctcgcagcagctggcagcggaagccggtgtgagtcagtccagcgtggttaaatttgcccagaagctgggattcaaaggctttccggcgctgaagctggcccttagtgaagcgctggcgagtagcccggatccgcactccgtcccggtgcataaccacattcgcggtgacgatccgctgcgtctggtcggcgagaaactcattaaagacaatgtcgccgccatgcatgcctcgctggacgtcaacactgaagagacgctacgggaagccgtcacgctgctgcgcaacgcccggcgagtgatcgtcaccgggattggcgcctccggcctggtggcgcgtaactttagctggaagctgatgaagatcggcatcaacgctgtttctgagcaggatatgcatgccctgctggcgacggtgcaggccatgtccagcgacgatcttctgctggcgatctcttactccggcgagcgccgggaaatcaatatggcggccggtgaagcgctgcgcgtcggctgtaagatcctggcgatcaccgggtttagcccgaacgccctgcaacagcaggcgacccactgcctgtatactatcgccgaagagcaggcgacgcgcagcgcggccatctcctccaccagcgcgcaaatgatgctcaccgatctgctgtttatggggctggtgcagcaggatctggagcgggcgccggagcgcattcgccatagcgaagcgctggtgaaaaagctggtc

SEQ ID NO: 23661 - DNA, 1419 bp, Klebsiella pneumoniae
ttgaagcgactctctcttttcccccgttcgctgcgtcagctggtgacgctctcctttgtgctgatcctgctgccattgctggtgctggcctggcaggcctggcagagcctgaacgccctcagcgcccaggcggcgcatattaaccgtaccaccctggtcgacgcccgacgcagcgaggcgatgatcaatgccgcactggagatggagcgcagctatcgccagtactgcgtgctggacgatccgacgctggcgcgcgtctatcaaaaccagcggcagcgctacagccagatgctggacgcccacgccggcgtgctgccggacgagaagctctggcaggcgctgcgtcaggatgtcagcgatctggcgcagctgcagtgtaaaaatagcggccccgatgcccaggcagccgccagactggaagttttcgccagtaataacagcgatatggtgcaggcgacccgggcggtcgtctattctcgtggccaacagctgcagcaggagatagccgaacgcggccagttttttggctggcaggcgctggtgctgtttctgctgagcctggcgctggtgctactcttcacccgcatgattatcggcccggtgaaaggcatcgaaagaatgatcaatcagctgggggcagggaagtcgctggacgacgccgcattgtttaccggcccgcgcgagctgcgatcggtgggcaagcgcatcatctggctcagcgagcgcctggcgtggctggagtcgcagcggcatcaatttcttcgccatctgtcgcatgagctgaaaaccccgttggccagtatgcgtgaaggtaccgagctgttggccgaccgcgtcgcggggcccctgacccctgagcagcaggagatcgtcgagatcctcgacagcagtagccgtaacctgcaaaagctgattgaacagctgctggactataaccgaaaacaggccgacggcccggtggctcgcgaagcggtggacctggtggacctggtggaaaacgtcgtggcggcgcacagcctgcccgcgcgggctaaactgatgcataccgaactgacgctgcaggcgcggcgttgcctggcagagcctgcgctattgataagcgtaatggataatctctactccaatgcggtgcactatggcgctgaatccggtaacatccgtatccatagctaccggcacggagagcaggtgcgtattgatgtcgccaacagcggcgaaccgatcccggccgcggaaaaaaacatgatattcgagcctttttaccaggggagtcaccagcgtaaaggggccgttaagggcagtggactggggttgagtatcgcccgcgactgcgtccggcagatgcaaggggagctcagcttagttgatgcgcccgccgggcaggtctgttttcgcattacgcttccctcagcgccggaa

SEQ ID NO: 23662 - DNA, 258 bp, Klebsiella pneumoniae
atggcgctgttaattaccaaaaaatgcatcaactgcgatatgtgcgagccggagtgcccgaatgaggccatttcgatgggtgacagcatttatgagattaacagcgaccgctgcaccgagtgcgtgggtcattacgacacgccaacctgccagaaagtgtgcccgatcccgaatacgatcctgaaagatccggcacacgtcgagagtgaagaacagctgtgggataaattcgtgctgatgcaccacgcggataaaatt

SEQ ID NO: 23663 - DNA, 3885 bp, Klebsiella pneumoniae
atgatggaaattttgcgtggttcacctgcactgtcggcattccgtattaataaactgctggcacgatttcaggcggccaaccttccggtaagcgccatatatgccgaatatattcattttgccgatctgaatgccccgctgagcgctgacgatcgcgagcgcctggcgcgactgcttcagtatggcccgagcttaagcagccataccccgaccggtaaattactgctcgtgacccctcgccctggcaccatctctccctggtcttctaaagctaccgatatcgctcacaactgcggtctggcgcaggttgtgcgtcttgagcgcggcgtggcgtattacgttgaagcctcaaccctgaccgaagcgcagtgggccgcggtggcggcggagctgcacgaccgcatgatggagagcgtcttcgacgcgctggaagcgggcgaaaagctgttcgctcaccatcagccgacgccggtgaccagcgttgacctgctgggcgaagggcgtcaggcgctgattgacgccaacctccgtctgggtctggcgctggccgacgacgaaattgactacctgcaggatgcgtttacccgcctgggacgcaacccgaacgatatcgagctgtatatgttcgcccaggcgaactcagagcactgtcgccacaagattttcaacgccgactggatcatcgacggcgaacagcagccgaagtcgctgttcaaaatgatcaaaaacacctttgaaaaaacgccggactacgtgctgtcggcctataaagataatgccgcggtgatggaagggtctgaagtcgggcgctatttcgccgaccatcagaccgggcgctacgacttccatcaggagccggcgcacattctgatgaaggtggaaacccataaccacccgacggccatctctccatggccgggcgcggcaaccggctccggcggcgaaatccgcgatgaaggcgccaccggccgcggcgcgaagccgaaagcgggcctggtgggcttctcggtttccaacctgcgtatcccgggcttcgaacagccgtgggaagaagatttcggtaaaccggatcgcattgtcaccgccctggacatcatgaccgaaggcccgctgggcggcgcggcgtttaacaacgaatttggtcgtccggcgctgaacggctacttccgcacctatgaagagaaagtcaccagccacaatggcgaagagctgcgtggctaccacaaaccgatcatgctggccggcggtatcggcaacatccgcggtgagcacgtgcagaagggcgagattaccgtcggcgcgaagctgatcgtgctgggcggcccggcgatgaacattggcctcggcggcggcgcggcgtcttctatggcctccggccagtccgatgccgatctcgatttcgcctccgtacagcgtgacaacccggaaatggagcgccgctgtcaggaagtgatcgaccgctgctggcagttgggcgacgccaacccgatcctctttatccacgacgttggcgccggcggtctctccaacgctatgccggagctggtgagcgacggcggccgcggcggtaaattccagctgcgcgatattctcagcgatgagccagggatgagtccgctggagatctggtgtaacgaatcgcaggaacgttatgttctggcggtcgccccggagcagctgccgctgttcgacgaactgtgccgccgcgagcgcgcgccttatgccgttatcggcgaagccaccgctgagcagcatctgagcctgagcgacagccactttaacgatcagccgatcgacctgccgctggacgtcctgctcggcaaaacgccgaaaatgacccgcgacgtgcagactctgaaagctcagggtagtgcactggatcgccaaccgattacccttgccgatgcggttaaccgcgttctgcatctgccgacggtggccgagaaaaccttcctcgtcaccatcggcgaccgcaccgtgaccggtatggtcgcccgcgaccagatggttggcccgtggcagatcccggtggccaactgcgcggtgaccaccgccagcctcgacagctactatggcgaagcgatggcgatgggcgagcgcgccccggtcgccctgctggacttcgcggcctctggccgtctggcggtcggtgaagcgctgaccaacatcgccgccacgcagattggcgagctgaaccgcgtgaagctgtcggctaactggatggccgccgccggccacccgggtgaagacgctggcctgtatgaggcggtgaaagcggtaggcgaagagctgtgcccggcgctgggcctgaccattccggtcggtaaagactctatgtcgatgaaaacccgctggcaggaaggcagcgagcagcgcgagatgacctccccgctgtcgctggtcatctctgccttcgcccgtgtcgaagatgtccgtcataccgtcacgccgcagctttcgacggaagataacgccctgctgctgatcgacctcggtaaagggcacaacgcgctgggcgcgacggcgctggcgcaggtctatcgccagctcggcgacaagccggctgacgtgcgcgatgtcgcgcaactgaaaggcttctggaatgcgatgcaggccctggtggcgcagcgtaaactgctggcctaccacgaccgctccgacggcggtctgctggtcacgctggcggaaatggcctttaccggccactgcggcatggaagcggatatcgccgcgctgggcgacgaccatctggccgcgctgttcaacgaagagctgggggcggtgattcaggtccgcgccgcagaccgtgaggcggtggaagccattctggcggttaacggcctggcggactgcgtgcattacctcggtaaagcggttgagggcgatcgcttcgtgctgaccgccggcggtcagacggtgttcagcgaaagccgcaccacgctgcgcatgtggtgggcggaaaccacctggcagatgcagcgtctgcgcgacaacccggcctgcgccgatcaggagcatgaggcgaaagccaatgatgccgacccgggcctcaatgtgaagctctcgtttgatattaacgacgacgtcgccgccccgtacattgccaccggcgcgcggccgaaagtggccgtcctgcgcgagcagggggtgaactcccacgttgaaatggcggccgccttccatcgtgccggctttgacgccatcgacgtgcatatgagcgacctgctggccggccggaccggtctgggcgatttccatgccctggtagcctgcggcggcttctcctacggcgacgtgttgggcgcgggcgagggctgggcgaagtcgattctgttcaacgagcgcgtgcgcgatgagttcgcgaccttcttccatcgtccgcagacgctggcgctcggcgtgtgcaacggctgtcagatgatgtccaacctgcgcgagctgatcccgggcagcgacctgtggccgcgctttgtgcgcaaccagtctgaccgctttgaagcgcgctttagcctggtggaagtgacgcaaagcccatccctgctgctggaaggcatggttggctcacggatgccgattgcggtctcccacggcgaaggtcaggtggaagtgcgcgacagcgcgcatctggcccagctggagagcaaaggtctggtggcgctgcgcttcgtggataacttcggcaaagtgaccgaaacctatccggcgaacccgaacggttccccgaacggtatcaccgcggtgaccagcgaaagcgggcgcgcgaccatcatgatgccgcacccggaacgcgtcttccgcaccgtaagcaactcctggcacccggagaactggggcgaggatagcccgtggatgcgtatcttccgtaacgcgcgtaaacagctgggt

SEQ ID NO: 23664 - DNA, 378 bp, Klebsiella pneumoniae
atggccattctcgggttgggtaccgacatcgtcgagatcgcccgcatcgaagcggtgatcgcccgcagcggcgatcgccttgcccgccgggtgctgagcgaccatgaatggagcatctgggagcagcaccagcagccggtgcgtttcctggcgaaacgctttgcggtcaaggaagcggcggcgaaagcgctgggaaccgggatccgtaacgggctggcgtttaaccagttcgaggtttacaacgacgagctgggcaagccgaagctgcggctatggggtgaagcaaaccttttagctgaacgcatgggagtaagcgctattcacgttactctcgctgatgaacgccactacgcctgcgccacggtgattgtcgaaagc

SEQ ID NO: 23665 - DNA, 1662 bp, Klebsiella pneumoniae
gtgacgaccatcgcgaataagttgccaactggcgcattattaagcagaatgccgcacattcgacgacaaccttgcgttttttccggacatcgcctgctgaggaacctgaagctgcagaagattaactctctgaaaaaattaaagattaattatctgctgatcggcattgtcacccttttgctggcggcggccctgtggccgtcgatcccctggtctggtaaacccgagaaccgggtggcgggcattatcgctcgcggcgagctgcgcatcagcactatcaactcgccaatgaccttcgccaccatgaacaataaagcgttcggtctggattatgaactggcgaagcagtttgccgactaccttggcgtaacgcttaagataaccgtccggcaaaacatcagccagctgtttgacgacctcgacgacggtcaggccgatatgctggccgccggactggtctataaccaggagcgagtgaaaaactatcaggccggccccacctactattctgtttcgcaacagctggtctaccgcgtcggcaatacccggccgcgcaccctcgcggcgctgaccgccgagcagctcactatcgctccgggccacgtggcgatcaacgacctgcagaccttaaaagccgagaaatacccggatcttgcctggcgcgtggacgaaaaacgcggtaccacggcgctgatgcaggcggtgattgacggtaaacttgattacaccatcgccgactcggtggccgtcagcctgtttcagcgcgtccatccggagctggcggtggccctcgatatcaccgacgaacagccggtcacctggtttagcgcccgggacgacgataattcgctgtcggcggcaatgcttgatttcttcaacaacatcaatgaagacggcaccctggcgcgcctcgaggagaagtacctcggccacggcaacgatttcgattatgtcgatacccgcaccttcctgcgcgcggtggaaaatattcttccggaggtgcagccgctgtttgaaaaatacgcccgcgagattgactggcgcctgctggccgccatcgcctggcaggaatcccactgggatccgcaggccacctcccccaccggcgtgcgcggtatgatgatgctcacacgcaatacggcgcaaagcctgggtctaaccgaccgcaccgatgcggcgcagagtatcgacggcggcatgcgctacctgcaggatatgatggataaagtgccggattcgatcccgaaagatgaacgcatctggtttgcgctggccgcttataatatgggctatgcccatatgctggacgccatggcgctcacccgcaaacagaaaggcaatcctaacagctgggcggacgttaagctgcgtttaccgttgctgagccagaaaccctattacagcaaactaaaatacggctatgcccgcggccatgaggcctacgcctatgtggaaaacatccgcaaatatcagataagccttgtcggctatttgtcagagaaggagcgccagcagcagcaaacgctggccctggcggaggattacccggccgtgctgcccaatgagctcgaacagccgcaggagaccaccctgccctttttcaagtttcgcgccgataagcagatggataatgcccggatgaaactccccggccacttgtat

SEQ ID NO: 23666 - DNA, 907 bp, Klebsiella pneumoniae
atgagcgaagaaaaaagttattgtgggtttgtcgccatcgtgggtcgtccaaacgttggcaaatccacgctgttgaataagctgcttgggcagaagatctcgatcacctcccgtaaagctgcagaccacccgtcaccgcatcgtcggtatccataccgaagggccgtatcaggcgatttacgttgatactccgggcctgcatatggaagagaagcgtgccattaaccgcttaatgaacaaagcggccagcagttcgattggcgacgtggaactggtcatcttcgtggtggaaggcactcgctggacgcaggacgacgagatggtgctcaacaagctgcgcgacgcgaaagcgccggtgatcctcgcggtcaacaaggtggataacgtgcaggaaaaagcggatctgttaccgcacctgcagttcctcgccagccagatgaatttcctcgatatcgtaccgatctcagcggaaaccggcaccaacgttgataccatcgcggcgatcgtgcgtaagcatctgccggaagcgatccatcacttcccggaagattatattaccgatcgctcacaacgctttatggcctccgaaatcatccgtgaaaaactgatgcgttttctcggcgctgagctgccgtactccgtcaccgtggaaatcgaacgtttcgtcagcaacgagcgcggcggttacgatatcaatggcctgatcctcgtcgagcgcgaagggcagaaaaagatggtgattggcaacaaaggcgccaaaattaaaaccatcggtatcgaagcgcgtaaggacatgcaggagatgtttgaagcgccggtgcacctcgagctgtgggtgaaagtgaaatccggctgggccgatgacgagcgcgccctgcgcagtctcggttacgttgacgacctctga

SEQ ID NO: 23667 - DNA, 972 bp, Klebsiella pneumoniae
atggcgaacatgtttgccctgatcctggtgattgcaaccctggtgacgggcgttttatggtgcctggacaagttcatttttgcaccgaaacgtcgtgaacgtcaggccgctgctcaggcagcgaccggcgagcaactggacaagaagacgctgaagaaagtcggcccgaaaccgggctggctggaaaccggcgcatcggttttcccggtgctggcgatcgttctggtggtacgttcatttatttatgagcctttccagatcccttcaggttcgatgatgccaacgctgctcatcggcgattttattctggtggagaaatttgcctacggcattaaagatcctatctaccagaaaacgctgatcgagaccggccatccgaagcgcggcgacatcgtggtatttaaatatccggaagacccgcgtctggactacattaagcgcgcggtggggttaccgggtgataaggtcacctacgatccggttgccaaacaggtcactattcagccgggctgcagttccggacaggcctgcggcaacgcgctgccggtgacctattccaacgtggagccgagcgattttgttcagaccttctcccgcagcaacggcggcgaagcgagcagcggtttctggcagttgccgaagggcgaaaccaaagccgacggcattcgtcttaccgagcgtcaggagacattgggcgacgtgacgcaccgaattctgatggtgccgattgcccaggatcaggttgggatgtactaccatcagtccggtctgccgctggccacctggattgtgccgcccggtcagtacttcatgatgggcgacaaccgggataacagcgccgacagccggtactggggctttgtgccggaagccaacctggtcggaaaagcaaccgctatctggatgagttttgaaaagcaggaaggtgaatggccgaccggcgtgcggttatcgcgcattggtggaattcat

SEQ ID NO: 23668 - DNA, 399 bp, Klebsiella pneumoniae
atgaaagaaaagcccaccgaaaccgtcagactggacaaatggctttgggccgcccgcttttacaaaacccgcgcgctggcgcgggaaatgattgaaggcggcaaggtgcattacaacggacaacgtagcaaacccggaaaaatcgtcgaactcgacgccatgctgacgctgcgccagggcaacgacgagcggacggtgcgcattatcggcattaccgaacagcgccgcccggcaagcgaagccgtcaacctgtatgaagagacggcggagagtattgagaagcgtgaaaaaatggccctggcgcgcaaaatgaacgccctgaccatgccgcaccctgacagacgtccggacaagaaagagcgccgcgacctgatgagatttaaacacggcgagagtgaa

SEQ ID NO: 23669 - DNA, 225 bp, Klebsiella pneumoniae
atgcaattcacacctgatagtgcgtggaaaattaccggtttttctcgcgatattagcccagcataccgtcagaaactgctctccctcggcatgctgcccggttcctcttttcatgtggttcgcgtggcgccgctcggcgatcctgttcatattgaaacccgacgcgtcagtctggtattacgcaaaaaagatctcgccttaatcgaactggaagcggttgcacaa

SEQ ID NO: 23670 - DNA, 771 bp, Klebsiella pneumoniae
atgcatatccaacaggatagcattgccattgtcgcgctattgcatgaacgttcacactgggcgctgcgccgctggtggcgtatcccattgccgccggggctggtacgtcagggaatggtggcggacgtcagcgcactcggttcgcggctggccgcctggcggcgggagctaccggcgcagcatcaggttagtatcgcctttcccgcggtgcgcacactgcaaaagcgtcttccgtatccccagttcgccctgcgggagcgggaacaggcgacgtgggtagccagcgccatgagccagcagctggcaatgcctgcctccgcgctatgtattgattatgcgcctacctcgcgggatgacggctggcaggttacggcggcgcagcggctggatatcaatgttctgcgggagctggcagggcggctgcggctgcgggtggcggccatcgtaccggatgccagtgcgctcggcgcctttttcccctggatgactgcggcagaccagggcctggcgtggcgggatgaaaagcactggctgtgggcgacccgtgaggcctggggcagcgacgcctgcgctgatgtcgggtccttaagccagctggcggggcagcttcagattccgctgcgcctgtgtattgacgcgggcgatgaggccagtcgctttgatgtctggcaagtgattcaccgtcggcagcccccgctgccaggcgatggcgatcgttacgccattgcccttgggctggcgctgggaggcgggcggcatgacgcatgtcgt

SEQ ID NO: 23671 - DNA, 1353 bp, Klebsiella pneumoniae
atgaaacgcgtgcgcttttcgccgcgcagctcctttgctcgcacactgctcctgatcgtcaccttgctgttcgtcagcctggtgacgacctatctggtggtactgaatttcgcgatcctgccgagtctccagcagtttaataaagtgttagcctacgaagtgcgtatgctgatgaccgacaaactgcagctggaggatggcacccagctggtggtgcccccggcgtttcgtcgtgaaatttatcgcgagctggggatttcgctctattccaatgaagcggcggaagacgcaggcctgcgctgggcgcagcattatgaattcttaagtcagcagatggcccatcagcttggtggccccacagaggtgcgggtagaggtcaataaaagctcccctgtggtgtggctgaagacctggctgtcgcccaatatctgggtgcgggtgccgctgaccgagatccatcagggcgacttctcgccgctgttccgctataccctggcgatcatgctgctggcgataggcggcgcctggctgtttattcgtattcagaaccgcccgttggtggatctggagcacgcggcgctgcaggtcgggcgcggcattattccgccgccgctgcgcgagtatggcgcctccgaagtgcgttcggtgacgcgcgcctttaaccatatggcggcgggcgtgaagcagctggctgatgaccgtacgctgctgatggccggggtcagtcatgatttacgaaccccgctgacccgcattcgtctggccaccgagatgatgggcgagcaggacggctatctcgcggagtcgatcaacaaagatatcgaagagtgcaacgccatcatcgagcagtttatcgactatctgcgcaccgggcaggagatgccgatggagctggcggatctgaatgcggtgctgggggaagtgatcgctgcggagagcggctatgagcgggaaatcgccaccgccctgcaggccggcgaaattccggtacgtatgcacccgctgtctatcaagcgcgcgctggcgaatatggtggtcaacgcggcccgctatggcaatggctggatcaaggtcagcagcggcagcgaagcgagccgggcctggttccaggtagaagatgacggaccggggattaaacctgagcagcgggagcacctgtttcagccgtttgtacgcggcgacagcgcccgcagcaccagcggcaccgggctggggttggcgattgttcagcgtattatcgacaatcacaacggccggctggagattggctccagcgaacgcggcgggttactgatccgcgcctggctgccggtgcaccggatgctggcgccgatgaaacccgccagggagagc

SEQ ID NO: 23672 - DNA, 528 bp, Klebsiella pneumoniae
gtgactacaattgtaagtgttcgccgtaacggccatgttgttattgccggtgatggccaggccacgctgggcaacaccgtgatgaagggcaatgtgaagaaagtgcgtcgtctgtacaacgacaaagtgattgccggtttcgctggcggcaccgccgacgccttcacgctgttcgaactgtttgaacgtaaactggaaatgcaccagggccatctggtgaaggccgccgttgagctggccaaagactggcgaactgaccggatgttgcgcaaactggaagcgctgctggccgtcgcggacgaaaacgcgtcgcttatcatcaccggtaacggtgacgtggtacagccggaaaacgatttgattgctatcggctccggcggtccttacgcccaggccgcggcccgcgcgctgttggaaaataccgatatgggcgcgcgcgacatcgccgagaaagcgttggatattgcaggtgatatctgcatctataccaaccatttccacaccatcgaagaattaccttctaaagcg

SEQ ID NO: 23673 - DNA, 972 bp, Klebsiella pneumoniae
atgggactggtgaaacagggagcacgcgttgccgtcatcgagcgctaccataatgtcggcggcggttgcacccactggggcaccatcccgtcgaaagccctccgccatgccgtcagccgtattatcgagtttaaccaaaaccccctctacagcgaccactcccgccttcttcgctcttctttcgccgacatccttaaccatgccgacagcgtcatcaaccagcagactcatatgcgccagggattctatgagcgcaaccactgtgaaattctgcagggcaatgcccacttcgtggatgagcatactctggcgctggagtgccatgacggcacggtcgagactgtgaccgcggagaaattcgttatcgcctgcggatcgcgcccctaccatccggcggatgtcgatttccaccacccgcgcatctatgacagcgattcgattctcagcctgcagcatgagccgcgccatgtgatcatttacggcgccggggtgatcggttgtgaatatgcgtcgatcttccgcggcatggaggtgaaggtcgatctgatcaacacccgcgatcgtctgctggccttcctcgatcaggagatgtcagactcgctctcttatcacttctggaacagcggcgtggttattcgccacaacgaggagtatgagaaaattgaaggggtggatgacggggtgatcatgcacctgaagtccggcaaaaagctgaaggccgattgcctgctgtacgctaacggccgcaccggcaacaccgacaccctggcgctggaaaatatcggtctgcagaccgacagccgcggtcagctgaaggtcaacagcatgtatcagaccgccctcccgcacatctatgcggttggcgatgtcatcggctatccaagcctggcttctgccgcttacgatcaaggacgcattggcgcccaggcgctggtgaaaggcgaagcctcagcgcatctgattgaagatatt

SEQ ID NO: 23674 - DNA, 660 bp, Klebsiella pneumoniae
atggaactctatctggataccgccaacgtcgccgaagtggaatgcctggcccgcatctacccgctggccggggtaaccaccaacccgagcattatcgccgccggtaaagtcccggtctgggatgtgctgccgcgcctgcaaaaagccgtcggtccggagggcaccctcttcgcgcagaccatgagccgcgacgcgcagggcatggtggaagaggccaaacgtctgagcaatgccgtgccgggcattgtggtcaaaatcccggtcaccgccgaagggctcgccgctatcaaactgctgaagaaagaaggcatcccgacccttggcaccgccgtctacagcgcttcgcaaggcctgctggccgcgctggccggcgcaaagtacgtcgcgccttacgttaaccgcgtcgacgcccagggcggggacggcatccgcatggtgcaggagctgcaatccctgctggaaatgcatgcgcccgagagcaaagttctggcggcaagcttcaaaacgccacgccaggcgctggattgtctgctggctggctgcgaagcaatcacccttccactagatgtagcgcaacaaatgctcggcacccctgcggtagagtcagccatagagaagtttgaacaggactggaataacgcctttggcgcgctgaatctg

SEQ ID NO: 23675 - DNA, 315 bp, Klebsiella pneumoniae
atggctgaatggagcggcgaatatatcagcccatacgctgagcacggtaagaagagtgaacaagtaaagaaaattacggtttccattcctctgaaggtgttaaaaatcctcaccgatgaacgcacgcgtcgtcaggtgaataacctgcgtcacgcgaccaacagcgagctgctgtgcgaagcgtttctgcatgcctttaccggacaaccgttgcctaacgatgaagacctgcgtaaagagcgcagcgatgagatcccggaagcggcgaaagcgattatgcgtgaactgggaatcgacccagatacgtgggaatac

SEQ ID NO: 23676 - DNA, 2148 bp, Klebsiella pneumoniae
atgaaaaaaatcacgagcgtgtgcccctactgcggggcgggttgcaaacttaaactggttgtcgacaacaataaaatcattcgcgcggaagccgccgacggcgtcaccaaccagaaccagctgtgcctgaaaggctactacggctgggattttcttaacgatacgcagctcctgacgccccgtcttaaacaaccgatgatccgctaccagaaaggcggcgccttcacgccggtcagctggcaggaggcgattcgctataccgccagcaagctcagggagatcaaagagaagcatggcccgcgcgccatcatgaccaccggctcctcgcgcggcaccggcaacgaaaccaactatgtgatgcaaaagttcgcccgcgcggtactgaacaccaataacgtcgactgctgcgcccgcgtctgccacggcccctccgtcgccgggctacagcaggcgctgggcaacggggcgatgagcaactcgattagcgacatcgaaaactcgaagtgcctgctggtctttggctacaactgcgccgactcccatcccatcgtcgcccgccgggtaatcaaggcccgggacaacggcgccaaaatcatcgtctgcgatccgcggcgcattgaaaccgcgcgcattgccgatcgtcatctgcagctcaacaacggcagcaacatggcgctggtaaatgccttcggctatgtgctgctggaggaggagctgtacaacaaaacctatgtcgaacgctataccgaagggctggatgcttaccgcgaggcggtgaaggattacgccccggaagcggtggaagggattgtcggggtcagcgcgcgggaaatccgggaggcgatgcgcatgttcgccgccgccccatccgccaccattatgtggggcatgggggtcacccagtttggccaggcggtggacgtggtgcgcggcctggcaagcctggcgctgctcaccggcaacctgggacggcccaacgtcggcgtggggccggtccgcgggcaaaacaacgtacagggcgcctgcgatatgggcgtgctgccgaacctgtttcccggctatcaggaggtcaccgaccccgccgtgcgggcgaaattcgccgccgcctggggcatcgacccggcgctgatggacgaccaggtcggcacccgcatcaccgaggtgccgcataaagcgctgaccggcgagatcaaagcctattatattatgggcgaagatccgctgcagaccgaagccgacctcggcctggtgcgcaaaggcatcgaggcgctggacttcgtggtcgtgcaggacatcttcatgaccaaaacagcggaaatggccgatgtcctgctgccggccacctcctggggcgagcacggcggcgtcttcacctgcgccgaccgcgggttccagcggtttgaacaggcgatccctccggcggggaatgtgaagcgcgactgggagatcatcagcctgctggccagcgaattgggctatccgatgcactatgagaacaaccagcagatctgggacgagatgcgcgagctctgcccgctgttctacggcgtgacctgggagaaaatgggcgatatgggccatgtccagtggccgtgcccgaccctcgatcatcccggcacgccgtggctgtataaagacaaccgcttcgacaccccctcgggtaaagggcagctgttcgccaccgcctggcgcgcgccggcggagcgcccggatgacgagtggccgctggtgctctgcaccgtgcgggaagtcgggcattattcctgccgctcgatgaccggcaactgcgccgcgctgcagtcgctggccgacgagccgggacgggtgcagatgaatcccgcggatgcgcaacgactggggatcgccgacaaacagctggtgtgggtcagctcccggcgcgggaaggtgatctcccgcgccgacctcagcgatcgcatcaatccgggggtggtctatatgacctatcagtggtgggtgggcgcctgcaatgagctgacccaggataacctcgatccgatctccaaaacgccggaaaccaaatactgtgcggtgaaagtggaagcgattgccgaccagcaatgggcggagcgctatgcctggacggcctacagcgacatgaaagcgcgactgaaagccgctgccgacgtc

SEQ ID NO: 23677 - DNA, 516 bp, Klebsiella pneumoniae
atgttaatccgtagagcccgtccctctgatgcagaagagcttgccattttagccgaacgaaccttcagaaaaacgtttgcggcgggtaatactcagaaggatatggatcttcactgccaggcaagttattcaacagatattcagttgcacgaaatcctcagacaagactggattacattagtctgcgaatacgaaagcaaactgatagggtacgcccaactgagatgggaagaatttcctccctgtgtaaatagcattcacgccggagaaatcctgtgtctgtatgtcgatgaaccttatcatggcaaaggttttgcacaagcccttatgcagaagtgctttgctgaatttgcggcacagggatcggatattgtctggttaggtgtctgggaacataacccaagggcaatctctttttaccgtaagcttgggtttaccgaggtgggtgaacatatcttccaggtagggacagatccccagagagatatcattatgaaacgctcaatgggtgttagc

SEQ ID NO: 23678 - DNA, 1077 bp, Klebsiella pneumoniae
gtgcctacaggacaccgctttctggcgacggatctgcatcagtttgtcgtctcactgtttacccatctcggcagtaccccaggggaagccaccctcgtcgcggaccatctgatcgccgccaatcttgccgggcatgactcccacggcgtcgggatgatccccagctacgtcaaatcccacgccggtggttttctgcagctcaaccgccacgccacggtgaccaaagacgccggcgccgtggtcaccctcgacggcaacgccggcttcggccaggtggtcgcccacgaagcgatgcagttaggcattgaaaaggcgaagcagcatggtatggcggctatcgccctgcgcaatgcgcatcacgtcggtcgcatcggctactgggccgaacagtgcgccgccgccgggctgatctccattcacttcgtcagcgtcatcggcgacccgatggtcgccccgttccgcgggaaggacagccgcttcggcaccaacccgctgtgcgtggtgtttccccgcgcgggccatccgccgctgctgctggactacgccaccagcgccatcgcctttggtaaaacccgcgtcgcctggcataaaggcgaagccgtggcccccggctgcctgattgacgccgagggtcgacccactaccgacccggcggtgatgcagacctcgccgctgggcgccctgctcaccttcgcccagcacaaaggctatgccctggcgacgctgtgcgaagtgctcggcggcgcgctctccggcgggcaaaccacccatcaggagagcctgcagaccagcgtcgacgccatctttaactgcatgaccacggtgatcctgcgcccggacgcgttcgatgccccggacagccaggcgcagacggaggcctttatcgcatggtgtaagcagtcgccgcacgatgccgatgccccggtactggcgcccggcgaatgggaggccgccaaccgcgaagcgcggctggcgcaggggatcccgctggatgccggcagctggcaggctatctgcgccgccgcgcgcgacgtcggcctgagcgaatcgcacttcgaccgctgccgccctctcgcc

SEQ ID NO: 23679 - DNA, 657 bp, Klebsiella pneumoniae
atgatgcgtgcgctgttggcccgggaactgcgcctggcgtggcgcagcggggcggagatcctcaatccgctctggttctttctgatcgtcatcaccctgtttccgttcggcgtaggcgccgcgccgcagctgctggcgcagattgcgccgggcgtggtgtgggtcgccgcgctgctggcggcgctgctggtgatggatcggttgtttcgcgacgactggcaggacggttccctggagcaactgatgctcctgccgacgccgctggtggcggtggtgctggtgaaggtggttgcccactggatgatgagcggcctgccgctgctgatcgtctcgccgctggcggcgctgctgctggggatgagtctgcatgacgccggtgtgctggcgctgaccttgctgcttggcaccccgacgctcagttttctcggcgcggtgggggttggcctgacggtcggcctgaagcgcggcggcgtcctgctgagcctgctggtgctgccgctggcggtgccgctgctgattttcgccaccgcggcctgccaggcggcggccgccgggctcccggtcagcggctatctggcgatgctggcggcgttcttaaccgccagcgccaccctgtgtccgttcgccaccgccgctgcgctgcggctgaccgtgcga

SEQ ID NO: 23680 - DNA, 1653 bp, Klebsiella pneumoniae
atgagtaacgatcacctgacggatattgcctatcgccactttattgaaagcgttaaagattatgccatctatatgctgagcgccgacggcacggtcattagctggaatgagggcgcccgccgggcaaaagggtacctgagcgacgagatcatcggtcgctacttcggtctcttctatagcgaagctgagcaactatccggtgtacccgcaaaaaacctggaaatcgccctgcgtagcgggcagtttgaaggggaaggctggcggtatcgcaaagacgggtcccgattctgggcgcatgtcatgatcgataccatccgcgatgagcagaacaccctgctgggttttgccaaaattacccgcgacattagtgaacagaaggcgattaacgaccgcatcgcctggatggcgcgctacgatgcgttaaccggtttacccaatcgggtggagttttttgaacgggtggagaagctgatcactggaaatgatgcccgccgctttgccattttcacgatcgatttagacaaatttaaagagattaacgatctgcagggacatctgattggtgaccagctgctgcagcgcgtggcgggcgccgttctcaaaacgctgcagaaggaggagatggtcgcccgcttcggcggcgatgagtttgtggccgttaaacctttttccgatgagggggaagtggatgcctttgctgcgcgcctgtggcactgcttcagcggtaagcagacgtttgccgcgacggaagtggttctctccgccagcattggcatctcagtctacccggaggacggcacggatattaatacgatactgagcaattccgatctggctatgtatcgggcaaaaagcagcctcgaccataagatttgctggtatgaacgtgaaatggatgacaagacgcggcagcgcaatatgatggccgccgatatccggcgcggtattcacgccggggagttttcgctccactatcaggctatccgcaacatcaaagatcgtagcatcaccggttacgaggcgctgctgcgctggcagcatccgcagctggggacgatcccgccggacgtgtttattcccatcgccgaagagagcggcgccatcgtgcccttaggttactgggtgctcgagcaggtgtgtaacgaatcgctggaaaatggtttgaacagaaaagtttcggtcaatatctctccggtgcagttgcgccatcgtagctttatcgaaaaagtccgcgagatcctgatgcgtaccgcctacccggtcagtctgctggagtttgaggtcaccgaaacggcgtttgtgatcaataaacagctggcgttcagcgttctgcatcatctgcaaaaaatggggatcagtattgcgctggatgactttggcaccggttactcctccctgagcatgctgcgcgattttcatttcgacgtcatcaaactcgaccgcagctttatgacagatgtggagagcaaccctcaggtacgctcattcgtgcgagccattatttcgctgggcaattcgatcaatacgccgcttatcgccgagggggtggaaacggctggacaactgcagatcctcgaagaggagggatgtgacgagatgcagggatttctgttcggcgagccggtcgatatcaaacacctgcccgaccggcgc

SEQ ID NO: 23681 - DNA, 921 bp, Klebsiella pneumoniae
atgagtccattttcccgtttcgcgcactatttcatcgccgtggcccgctgcggcagtctgcgccgggccgccgagcagctgcatatctccgcctcggcaattaaccgccagatcctgcaggccgaggaggccttcggtaccccgctgttcgagcgcctgccggagggactgcggatgaccaccgccggtgaactgctgtatgacaatctgctgcgctggcagaaggaatttcgtcagacccgacagaaatttgatgagctgcaggggatgaagcgcgggagcgttagcgttggcatggtgcaggcgctggcggaagggggcttcgccgccgcgctggcggagatcatcgccagctggccgtggctggagctggatctgcaggtggctgacagccacaccgtcagccagaaagtgcgtcaggcggacctggacgtcggcctgatcctcgatccgcaggggcaggctggactcagcgtgctggcctttgccgaactggaggtggggattgtgatgcgtccggaccatcccctggcgggggcgaaggcgctgtctttgggcgagctcagcctggagcggcatatcgcgcccggcgcgccgctgatcgtccatgagcgggtggcgctcctctatcgccaccatgactttgcgccggagaataccatcagctgcaatgatatccggcttatcaagtcgttggtgctgcgcggcagcggcgtgacgctccttagcctgctcgacgtgctggacgaggtccagcgtggacagctggcctttgtcccgctgcgcagtacgctgctgcgaccgctgaccctggcgctgtgtactgcgccctcgcgtcagctttcgcggcccgcgcaaatggccattcagacgctgagtgcggtgatcgaatctatggcgacggtcagcccagcggcccgc

SEQ ID NO: 23682 - DNA, 1056 bp, Klebsiella pneumoniae
atgagcaacccgctgctttcgcttcttgatattgattatcccctgattcaggccccgatggcgggcgtctccacccccgcgctggctgccgcggtaagtaatgccggcgcgctgggctcgctggggctgggcgcttcaaccgttgcccagacggaagcgatgatagtcgccacccgccagctgacggaccgtccgttcaatgtcaatctgttctgccatgcgccgccccggcgcgacgcccggcgggaagccgactgggcaacaacattacgtccccattttgcccgctatggcagtacgccaccggattcgttaagcgagatctaccagacatttatcggtcatgcgccgatgctggagctgcttctcgacctgtcgccggcggtggtgagctttcattttggtcttcctgaaggtgagacgatccagcgtctgcggcggcaggggatcgttaccctggcgacagcgacttcgctgcaggaggcgctgctgattgaacagcaggggatcgacgtggtggtcgctcagggctatgaggcgggcgggcaccgggggatctttgctccgcaggcgcctgacgcgcagctgagcaccttcaccctggtgcaacttctgcggcgtcgactaaccatcccggtggtggccgccgggggcatcatggacggagcggggatcgccagcgtgatgcagttgggggcgcagggcgtacagctcggtacggcgtttttactgtgtccggaatcggccgccgacgccggctatcgcgcggcgatccacaacagccttgacgggcgtacggtgctgacctccgcgatatccgggcgtccggcacgctgtctggcgaatgccttctgtgcgctgggggaaggctatccggcgagcgccgtgccggattatccgctggcgtatgatatcggcaaagcgctggccgccgccgcgaaagcccagggcgtccatgagtatggcgcccactgggccgggcagggggtggggttgatccgcgagtgtgacgccgccagtctggtccgccagctggcggcagagagcggctggaac

SEQ ID NO: 23683 - DNA, 273 bp, Klebsiella pneumoniae; identical to SEQ ID NO: 19918

SEQ ID NO: 23684 - DNA, 501 bp, Klebsiella pneumoniae; identical to SEQ ID NO: 19919

SEQ ID NO: 23685 - DNA, 1359 bp, Klebsiella pneumoniae
ttgcccgttgacagcgaagtcacggtccgcggatgggtgcgtacccgccgagattctaaagctggcttttctttcctcgccgtctatgacggttcctgctttgatcctgtacaggccgttattaataattctctgcccaattacaatcaggaagtgctgcgtctgaccaccggctgctcggtgattgtcaccggtaaagtcgtggcttctcagggtcagggtcaaagctttgagatccaggcgaccagcgtggaagtgaccggctgggtggaagacccggacacctacccgatggcggccaagcgccacagcatcgagtatctgcgtgaagtagcgcacctgcgtccgcgcaccaacctgattggcgcggtagcccgcgtgcgtcacaccctggcgcaggcgctgcaccgcttcttcaacgaacagggcttcttctgggtttccaccccgctgatcaccgcctccgataccgaaggcgccggcgaaatgttccgcgtgtcgacgctggatctggaaaacctgccgcgtaacgatcagggcaaagtcgatttcgacaaagacttcttcggtaaagagtcgttcctgaccgtttccggccagctgaacggcgaaacctacgcctgtgcgctgtcgaagatttataccttcggcccgaccttccgcgccgagaactccaacaccagccgccacctggcggaattctggatgctggagccggaagtggccttcgccaacctgaacgacgttgccggactggcggaagcgatgctcaagtacgtcttcaaagcggtactggaagagcgtgcggacgacatgcagttcttcgccgagcgcgtggataaagacgctatcgaccgtctgcagcgctttatcaccgctgattttgcccaggtggattacaccgacgccgtcaccattctggaaaactgcggcaaacagttcgagaacccggtgtactggggcgtggatctctcctctgagcacgaacgttacctggctgaagagcacttcaaagcgccggtggtggtgaaaaactacccgaaagacattaaagcgttctatatgcgccttaacgaagacggtaaaaccgtcgcggcaatggacgttctggcgccgggcatcggcgagattatcggcggttcccagcgtgaagagcgtctcgacgtgcttgacgcgcgtatggcagagatgggtcttaacaaagaagactactggtggtatcgcgacctgcgtcgctacggcaccgtgccgcattccggcttcggtctgggcttcgaacgcctcatcgcttacgtcaccggcgtgcagaacgtccgcgatgttattccgttcccgcggacgccgcgcaacgcgacattc

SEQ ID NO: 23686 - DNA, 1515 bp, Klebsiella pneumoniae
atgtctgaacaacaagcacagggcgctgacgcggcaattgaccttaataatgaactgaaaacccgtcgcgagaagctggctgcgctgcgtgagcagggcgtcgctttcccgaacgatttccgtcgtgaccatacctctgaccaactgcacgctgacttcgatggcaaagaaaacgaagagctggaagcgctgaacgttgaagtggccgttgctggccgcatgatgacccgtcgtattatgggtaaagcgtccttcgtgaccctgcaggacgtaggcggccgcatccagctgtacgtggcgcgtgatgacctggcggaaggcgtttataacgaccagttcaaaaagtgggacctcggcgacatcatcgccgcccgcggtaagttgttcaagaccaaaaccggtgagctatccatccactgcaccgagctgcgtctgctgaccaaagctctgcgcccgctgccggacaaattccacggcctgcaggatcaggaagcgcgttaccgtcagcgttacctggacctgatctccaacgatgaatctcgtaagaccttcaaagtgcgttcgcagatcctggcgggcatccgtcagttcatggttggccgcggctttatggaagtagaaaccccgatgatgcaggtgatcccgggcggcgcttccgcgcgtccgttcatcacacatcataacgcgctggatctggacatgtacctgcgtatcgcgccggaactgtacctcaagcgtctggtggttggcggcttcgaacgcgtcttcgagatcaaccgtaacttccgtaacgaagggatctccgttcgtcataacccagagttcaccatgatggaactctacatggcttatgcggattacaaagatctgatcgagctgaccgaatctctgttccgcaccctggcgcaggacatcctcggcaataccgaagtgccttacggcgaccaggtgttcgacttcggcaagccgtttgaaaaactgaccatgcgcgaagcgatcaagaaataccgtccggaaaccgagatggcggatctggataactttgattccgcgaaagcgatcgctgaatctatcggcatcaaagtggagaagagctggggtctgggccgtatcgtgaccgagatcttcgaagaagtggcggaagcgcacctgatccagccgaccttcatcaccgaatacccggcggaagtttctccgctggcgcgccgtaacgacgtcaacccggaaatcaccgaccgctttgaattcttcattggcggccgtgagatcggtaacggctttagcgagctgaacgacgccgaagaccaggcgcagcgcttccaggatcaggttgatgcgaaagccgcaggcgacgacgaagcaatgttctatgacgaagactatgtcaccgcgctggaacacggcctgccgccgaccgctggtctgggtatcggtatcgaccgtatggtcatgctgttcaccaacagccacaccatccgcgacgttattctgttcccggcgatgcgtccgcagaaa

SEQ ID NO: 23687 - DNA, 960 bp, Klebsiella pneumoniae
gtgtggaacgaacccgaacgcgcccaggcgctgggtaaagagcgttcttccctggaagccatcgtagataccctggatcagatgtcccaggggctggaagacgttgccggcctgctggatctggccgtggaagcggacgacgaagagacctttaacgaagccgtcgccgagctggataccctggaagagaagctggcgcagcttgagttccgccgcatgttctccggcgaatacgacagcgccgattgctaccttgacattcaggccggttccggcggcaccgaagcccaggactgggccagcatgctgatgcgcatgtacctgcgctgggcggaagcgcgcggctttaagaccgaaatcatcgaagaatccgaaggtgaagtcgcggggattaaatccgtgaccattaagatcattggcgattacgcctacggctggctgcgtacggaaaccggcgttcatcgtctggtgcgtaagagcccgttcgattccggcggccgccgtcatacctccttcagctccgcgttcgtttacccggaagtggaagacgatatcgatatcgaaattaacccggccgacctgcgcattgacgtataccgcgcctccggcgccggcggtcagcacgttaaccgtacggaatccgcggtgcgtattacccatatcccgaccgggttggtgacgcagtgccagaacgaccgttcgcagcacaaaaataaagaccaggccatgaagcagatgaaagcaaagctttatgaactggagatgcagaagaaaaatgccgagaagcaggcgatggaagacaacaagtccgatatcggctggggcagccagatccgctcttacgtgctggatgactcgcgtattaaagatctgcgtaccggggtggaaacccgcaacactcaggcggtgctcgacggcagcctggaccaatttatcgaagcaagtttgaaagcagggtta

SEQ ID NO: 23688 - DNA, 1731 bp, Klebsiella pneumoniae
gtgaaacaacagatacaactacgccgccgcgaggcggttgacggcgtcgaactccccgccgacctgccgccgctgctgcagcggctatatgccagccgcggggtgcgcagcgcgcaggagctggagcgcagcgtcaaaggcatgctcccctggacgcagctcaccggcgttgaaaaagcggtcgagatgctgcatgacgcgttccagaaagggttgcacatcgtggtggtcggtgattttgacgccgacggcgccaccagcaccgcgctcagcgtgttggccctgcgcgcgctgggttacggcaacgtctcctatctggtgccgaaccgctttgaagacggttacggtttaagcccggaagtggtcgatcaggcccatgctcgcggcgcgcagatgatcatgaccgtcgacaacgggatctcgtcccatgccggcgtcgatcatgcccatgcgctggggatcccggtgctggtgaccgatcaccatctgccgggcgagacgctgccggcggcggaagctatcgttaatcccaacctgcgcgattgcgacttcccgtcaaaatcactggccggggtgggggtggcgttttatctgatgctggcgctgcgcacttttctgcgcgataaaggctggttcgacgctcgcggcatccccgcgccgaaccttgccgagctgctggatctggtggcgcttggcaccgtcgcggacgtcgtgccgctggatgctaacaaccgtatcctcacctggcaggggttaagccgcattcgcgccggcaaatgtcggcccggtattaaggcgctgctggaaattgccaaccgcgatccgcaaaagctggcggccagcgacctcggtttcgccctcgggccgcgcctgaacgcggcgggacggctggacgacatgtcggtcggcgtcgcgctgctgctgtgcgacaacatcggcgaagcgcgggtgctggccaacgagctcgatgcgcttaatcagacgcgcaaagagattgagcaggggatgcaggcggaagcgctaacgctctgtcagcagctggagcgcagcgccgataccctgcccggcgggctggcgatgtaccatccgcaatggcatcaaggggtagtcggcattctcgcctcgcggattaaggagcgcttccatcgcccggttatcgcttttgcgcctaccggcgacggcacgctgaaaggctccggtcgttccattcaggggttgcatatgcgcgatgcgctggagcgccttgatacgctttatcccgggctaatcctgaagttcggcggccacgcgatggcggcgggcttatcgctggaggaggcgcgttttgaagagtttcaacagcgcttcggcgagctggtgaccgaatggctggatcctgcgctgttgcagggcgaggtggtttccgatggcccgctggcggcggcggagatgagcatggaagtggcgcagatgctgcgcgacgccgggccgtgggggcagatgttcccggaaccgctgtttgacggtcgttttcgcctgctgcagcagcggctggtgggcgagcgtcacctgaaggtgatggtcgaaccggttgacggcgggccgctgctggacggtatcgccttcaacgttgatacttccatctggccggataacggcgtgcgtgaagtccagttagcctacaagctcgacatcaacgagttccgcggcaaccgtagcctgcagctgatcatcgatcacctctggccaaat

SEQ ID NO: 23689 - DNA, 711 bp, Klebsiella pneumoniae
atgaaaaaaggtttattgatgttcaccctgctggcggcctccctttcaggaacggcgcacgccgatagcgcggcaattaaacagtcgctggcgaagctgggtgtgcagagcaccgatattcaaccatcgccggtttccgggatgagcacggtgctgaccgacagcggcgtgctgtacgtgaccgacgacggcaaacatatcatccaggggccgatgtacgacgtgagcggcacgcagccggtcaacgtcaccaaccagctgctgctgggtaagctgaacgcgctgagcaatgagatgattgtctacaaagcgccgaaggagcagcacgtcatcaccgtcttcaccgatattacctgcggctactgtcataaactgcacgagcagatgagcgactacaacgcgctggggatcaccgtgcgttatctggccttcccgcgccagggtctgcaaagccaggcggagcaggacatgaaggccatctggtgcgcgaaagatcgcaacaaagcgctggatgacgccatgaatggtaaaggcgtgcagccggcgagctgcagcgtagatatcgccaaacattacaccctcggcgtgcagatgggcgtcaacggtacgccggcgatggtcctcagtaacggcatggtgctgccgggctatcaggggccgaaagagctgaaggcgttccttgatgagcacaaaaaacagacaagcggtaac

SEQ ID NO: 23690 - DNA, 2286 bp, Klebsiella pneumoniae
atgggtgtggataccggtcgggtgccgggcatggcgacgctggacagcacggcctgcgtgccgctgaccacgcttatcagcgaagctaccacgcgcttcgacgtcggacagcagcgcctgtacctcaccgtcccccaggcatttatgggtaaccatgcgcgcggctatattccgccggagctgtgggataacggtatcaccgccgggctgattaactataacttcacgggcaataacgcccataacaccacaggtggcagcagccgttacgcctatctgaatctacagagcggcctgaacattggcgcctggcgtctgcgcgataacagcacctggagctacagcagcggcggtagcacctcatccaacgagaatcgctggcagcacgttaacagctggcttgagcgggacatcacgcctctgcgttcgcgactcaccctaggggacagctacaccaacggcgatgtcttcgacgggatcaacttccgcggcgcccagctggcctccgacgacaatatgctaccggacagccagaaaggctttgcgccggtgatccacgggatcgcccgcggcacggcgcaggtgtcaatcaggcaaaacggctacgaaatctaccagagcacagtgccgccgggaccatttaccatcgacgatctctacgccgcgggcaatggcggcgatctgcaggtcacgatcaaagaagcggatggctcccgccaggtcttcagcgtgccctggtcaacggtgccggttctccagcgtgaaggccatacccgcttcgccctcaccgccggggagtaccgcagcggcaacagtcagcaggaaacgcccgattttttccagggcacggccatgcatggcctgccggcaggctggacgctctacggcggcacccagctggcagaccgctatcgcgcctttaaccttggggtggggaaaaacatgggctatttcggcgccctgtcgctggatatcactcaggccaacgccaccctggctgacgacagcgaacatcaggggcagtcggtgcgttttctctataacaaatccctggatgagaccggcaccaacctgcagctggtgggctaccgctactctacccgcggctattataactttgccgataccacttaccgccggatgagcggctacagtgtggaaacccaggacggcgttatccaggtaaaaccgaaatttaccgactactacaatctggcttacagcaagcgcggcaaggtgcagctgagcgtgactcagcagttggggcgcaccgccaccctctatctcagcggtagccaccagacctactggggcaccgacgatgccgatgagcagctgcaggccggcctcaacgccgccgtggacgatatcaactggtcgctaagctacagcctgacaaaaaacgcctggcagcaggggcgcgatcaaatgctggcgatcaatatcaatatccccttcagccactggctgcgttccgacagccgctcggtctggcggcacgccagcgccagctacagcctgtcgcacgatctcaatggccgcatgaccaatctggcgggcctgtacggcaccctgctggaagacaacaacctcagctatagcgtgcagaccggctatgccggcggcggcaacggcgacaacgggagcacaggctacaccgccctcaactaccgcggcggctacggcaacgccaacgtcggctacagccgcagcgatggctttaaacagctctattacggggtcagcggcggcgtgctggcgcacgccaacggcatcaccctgagccaaccgttaaacgataccgtggtgctggtgaaagcccccggcgccggcggcgtgaaagtggaaaaccagaccggggtacgcaccgactggcgcgggtatgccgtcctgccttatgccactgagtatcgcgaaaaccggatcgcgctggataccaacaccctggcggacaatgtcgaccttgacgatgcggtggtcagcgtggtgcccacccatggggcgattgtccgcgccaactttaacgcccaggtggggatgaagatcctgatgacgctgacccatcgcggcaaaccggtgccgtttggcgccctcgccaccggcgacagcaaccagagcggcagcatcgtcgcggacaacggccaggtctacctgagcgggatggcgctggcgggcaaagtgcgggtgaaatggggcgatggcccggacgctcagtgcgtggccgattaccgtctgccgccggagagccagcagcaggcgctcagtcagctttcggtcgcgtgccgc

SEQ ID NO: 23691 - DNA, 894 bp, Klebsiella pneumoniae
gtgaaacaggatctggcactaatcgaacagtttctcgatgccctttggctggagcgcaacctggcggagaatacgctcagcgcctaccgtcgcgatttgacgatgttagttgagtggctgcaccatcgcggcctgtcgctggcaagcgttggcagcgacgatctgcaggcgctgctggctgagcggcagtccggcggctacaaagccaccagcaccgcgcgcctgctgagcgccgtgcgccgttttttccagcatctgtaccgggaaaaaattcgcccggacgatcccagcgcgctgctggcctcgccgaagctaccgcagcggctgccaaaagatctcagtgaggcgcaggttgagcgcctgctgcaggcgccgctggtggagcagccgctggaattgcgcgataaagcgatgctggaggtgctgtatgccaccggcctgcgcgtctcggagctggtggggctgacgatgagcgacatcagcctgcggcagggcgtgctgcgggtggtgggaaaaggcaacaaagagcggctggtgccgctgggggaagaggcggtactgtgggtggaaaattacctcgagtatggtcgcccctggctgctgaacggcgtggcgtcggatgtcttatttcccagccagcgcgcccagcagatgacgcgccagaccttctggcaccggattaaacactatgccgtactggcggggatcgacagcgaaaagctttccccgcacgtgttacgccatgcgttcgccacgcatttgctcaatcatggcgccgatctgcgcgtggtgcagatgctgttaggacacagcgatctctccaccacgcagatatacacccacgtggcgaccgagcgtctgcgacaacttcatcaacagcaccacccgcgggcg

SEQ ID NO: 23692 - DNA, 327 bp, Klebsiella pneumoniae
atgtctttattgcccctgcaactgttcaaaaacctcgccgatgaaactcggctggggatcgtattgctgctcaaggcgcgtggagagctgtgcgtgtgcgatctctgtacggcgctcgcccagtcccagcccaagatctcccgccatctggcgatgctccgtgagagcggattgctgctggatcgtaaacagggtaagtgggtccattaccgcctctctccgcagatgccggcctgggcggcgcaggtgattgagcaggcctggctcagtcagcaggaggatgtgcggctgatgatcagcagactggctggcgggccgggttgccgg

SEQ ID NO: 23693 - DNA, 408 bp, Klebsiella pneumoniae
gtggtcctgtggcaatctgatctccgtatctcctggcgcgcgcagtggttttccctgctgcttcacggcgtggtggcggccctggtgctgttggttccctggccgctgagctataccccgatctggctgctgctgctgtcgctggtggtcttcgactgcgtgcgcagccagcggcggatccatgcccgtcgcggggagataaaactgctcaccgattcccgtcttcgctggcaaaacgccgaatgggagatcctcgggacgccgtgggttatcaatagcggtatgctgctgcgtttgcgccatgtcgatacccggcgcggacagcatctttggctggcggcggacagcatggacgccggagagtggcgcgatctgcgccggctggtgctgcaaaaaccggcgcaggag

SEQ ID NO: 23694 - DNA, 264 bp, Klebsiella pneumoniae
atggacattaacaataaagcacgtatccactgggcatgccgccgcgggatgcgcgaactcgacatctccatcatgccgttctttgagtatgagtacgataccctcagcgacgctgacaaacagctgttcattcgcctgctggaaaatgacgatccggatctgttcaactggctgatgaaccacggcaaaccggccgatgcggagctgcagcggatggtaaccttaattcagacacggaatcgggaacgtggtcctgtggcaatc

SEQ ID NO: 23695 - DNA, 981 bp, Klebsiella pneumoniae
atggcttttacaccttttcctccgcgtcagccttcctcttccgctcgtctgccgttaacgctgatgaccctggatgactgggcgctggcgacaattagcgggccggacagcgaaaaatatctgcaggggcagattaccgccgatgtgagtcatctcaccgatgcccagcatctgcttgccgcccactgtgatgccaaaggcaagatgtggagcaacctgcgcgtattccgtcgcgagggcggcttcgcgtggattgagcgccgcagcctgcgcgacgcgcagctgaccgagctgaaaaaatatgccgtcttctccaaagtcaccattgccgccaacgacgatctggttctgctgggagtagccggcttccaggcgcgcgccgcgctggcgccgctgttcgccgccttgcccgacgctgccaccccggtggtcagcgaaggcgccaccagcctgctgtggtttgaacacccgggcgagcgcttcctgctggtgaccgatgtcgacaccgccaaccgcgtcaccgacgcgttgcgcggcgaagcgcagtttaacaacagccaacagtggctggcgctgaatattgaagccggcctgccggttatcgacagcgctaacagcgggcagttcattccgcaggccaccaacctgcaggcgctgggcggcatcagcttcaaaaaaggctgctacaccggccaggaaatggtcgcgagggcgaaattccgcggcgccaataagcgcgcgctgtggacgctgtcagggaccgccagccgggtgccggaagccggggaagacctggagctgaagatgggcgacaactggcgccgcaccggtacggtgctggcagccgtacagctggatgacggaagcctgatggtccaggtagtgatgaataacgacatggaaccggacagcgtgttccgtgtacgcgacgatgccggcagcctgagcatcaaaccattgccgtattcgctggaagaaaat

SEQ ID NO: 23696 - DNA, 657 bp, Klebsiella pneumoniae
atggttcgcaaaccattaatcactcagggatattctctggcagaggaagttgccaacagcatcagccacgggatcgggctggtgttcggtatcgttggccttgtgttgctgctggtgcaggcggcggatacaaacgccagcgcgacggcgatcgccagctacagcctgtacggcggcagcatgattatgctgttcctcgcttccacgctctatcacgcgatcccgcatcagcgggcgaaacagtggctgaagaaattcgaccactgcgccatctatttgctgattgccgggacctacacgccgtttttgctggtggggttgaattcaccgctggcgaaggggctgatgatcgtcatctggagcctggcgctgctggggatcctgtttaagctgaccatcgcgcaccgctttaaaattttgtcgctggtgacctatctgaccatggggtggctgtcgcttatcgtggtctatcagctggcagtgaagctggcggtgggcggggtaacgctgctggcggttggcggggtggtgtactcgctgggggtcatcttctacgtctgcaaacgtattccttataaccacgctatctggcacggcttcgtgctcggcggcagcgtgtgtcacttcctggcgatttatctttacatcggccagtcc

SEQ ID NO: 23697 - DNA, 561 bp, Klebsiella pneumoniae
atgtccttaattaacaccaaaatcaaaccgttcaaaaaccaggcattcaaaaatggtgaattcatcgaagtcaccgagaaagacaccgaaggccgctggagcgtcttcttcttctatccggctgacttcaccttcgtctgcccgaccgaactgggcgacgtggctgaccattacgaagaactgcagaagctgggcgtagacgtttactctgtgtctaccgatacccacttcacccacaaagcgtggcacagcagctctgaaaccatcgccaaaatcaaatatgcgatgatcggcgacccgactggcgccctgacccgtaacttcgacaacatgcgtgaagatgaaggtctggctgaccgcgctaccttcgtcgttgacccgcagggtatcatccaggcgatcgaagttaccgctgaaggtatcggccgtgatgcgtctgacctgctgcgtaaaatcaaagcggcgcagtacgttgcgtctcacccaggcgaagtctgcccggcgaaatggaaagaaggcgaagcgacgctggctccttctttagatctggttggtaagatc

SEQ ID NO: 23698 - DNA, 606 bp, Klebsiella pneumoniae
atgtggcaagaaagactcgcgcaactggtcaccacctgtcattggatcggcgcgaaaggctgggcgccggcgaccggcggcaatatgtcggtgcgtcaggatgatacctggtgctggctaagcgagtcgggccgcgacaaaggcagcctgacaaccgagtattttctgcaggttgagatcgccaccaaccaggcgccttccggacggaagccgtcggccgagaccggtctgcacaccctggtgtatcgcctgttcccggaagccaacgtggtgctgcatgtgcataccgtcaacgccactgtgctgtcgcgcatcgaaaaaagcgacacgctggcgctgcaggggtatgaaatgcagaaaacccttagcgggcagcatagccatctcgatactgttccgatcgccatcttcgataatgaccaggatattgacgccctggcggcgcggattgccgattatgcgcaaacgcgcccgctgcgctacggctttctgctgcgcggccacggcctgacctgctgggggaaagatattcaggaggcccgccgtcaactggaggggctggagttcctgttcgagtgcgagctgatgcgccgccgctacgagccc

SEQ ID NO: 23699 - DNA, 540 bp, Klebsiella pneumoniae
atgagcgcattaactcttttttccgtgaccgatccgcaaacgccggtctggcacagcaccgacgccaaagcgattcaggcgcagcttaacgccaaaggcgtccgcttcgagcgctggcaggccgaccgcgacctcggcgcaaatcccagcccggaaacggtgattgccgcctatcagcatgcgattgataaactggtcgccgaaaagggctaccagagctgggacgtcatcagcctgcgcgccgataacccgcaaaaagaggcgctgcgggaaaagttcctgaacgagcacacccatggcgaagacgaggtccggttttttgtcgagggcgctggcctgttttgcctgcacattggcgacgaggtgttccaggtgctgtgcgaaaagaacgatctgatttcggttcccgcccacactccgcactggtttgatatgggatcagaaccgaacttcaccgccattcgcatttttgataacccggaaggctggatcgcccagtttaccggcgacgatatcgccagcgcctacccgcggctggcg

SEQ ID NO: 23700 - DNA, 599 bp, Klebsiella pneumoniae
tcactccgttcttatgataaggcggaaaaaaaatatcgtgcctggaaaggggagaaacgggcgagccgcggcccaatatcctgagccggaacttcggtgcgtcaaaagccaacgaaaaatgggtaacagatgtgacagagttcccggtacagggaaaaaagctttacctgtcgtcagttctcgatctgtttaaccgggaggttatcgcctacagcctgtcggaaaggccggtgatggagatggtgaatacgatgctggacggtgcgttcccgaagctcagaccgggagatgctccgctgctgcactcggatcagggctggcattacaggatgaggagctatcaggaacgtttaaaggcgcatgggatgacgcagagtatgtcgcgtaaaggaaactgcctggataatgcagtgatggaaaacttcttcgggaccctgaaatcggagtgtttttatctgagggagttcaggagtgtcagtgcgctaagaaaagccgtagaggactatatccattactacaacaacgagcggataagcctgaaattaaaaggcctgagtccggtagagtaccgaacccaggctctgagagccgcttaatat

SEQ ID NO: 23701 - DNA, 930 bp, Klebsiella pneumoniae
atggcaaatctttacgatctgaaaaagttcgatttgaatttattggttattttcgaatgtatctatcaacatttgagcatcagcaaagcggcggcgatgttatttatcaccccctcagcggtgagtcagtcgttgcagcgtctgcgccagcagttaaacgatccgctatttgttcgtgttggcaaaggaatgacgcccaccaccgcctgcgtcaatcttcattatcatctacagcaaaatctggagcagctggaaaaaaccatcaatctaaataatcgctcagaactgcgtaaacgtattgtgatatatggccccccgctgttctgttcagtcaatagccacgttatgattaaccagctctgtcatcaggcgaacttgcaaattgagcaccataacctgaccaccaccgaatcggctgaggagctgctggcgtatcgccaggcggacctggtgttcacccgcatgcccattaccaaccgcgccacgatctgtcagccctatcagacggtgcagacgctggcggtttgccgggcgggccatccgcgacgagaaacgcttacctcggtagagtcactggcgcaggagtttttcactcactatattaccaacgatcccgttattcagcgcgtgcagcaaagcagcatcgcctggctgaatccgcgcaatattgcctttcgcagcgactcttttatgaccattcttaacatgattaataaaaccgacttaattggctttttgccttcctatttatatgactttatctcacccactatgcagcttcacgccatcaacatagataatctttttccggatatcacgatctacattaattaccaccatgcatcttcgcaaaatcattttttaactgaattaatcaccatattaatgaatgatcgagaggcatcacagccccaatttaatcacagcgaa

SEQ ID NO: 23702 - DNA, 969 bp, Klebsiella pneumoniae
atgcgggtattgatcgttaaaacctcctccatgggcgacgtgctgcacacgctgcccgcgctaaccgacgccgcgcaggctatccccggcatccgcttcgactgggtggttgaagagggtttcgcgcagatcccctcctggcatgaaagcgtcgagcgggtgatcccggtggcgatccgccgctggcgcaaagcctggttttccgcgccgatcaaagccgagcgtcaaacctttcgcgaggccgttcaggcggtaaagtatgacgccatcatcgacgcccaggggctggtgaaaagcgccgcgctggttactcgcctggcgcacggcgtcaagcacggtatggactggcaatcggcccgcgagccgctggcgagcctgttttacaaccgccgccaccatatcgcgaaacagcagcacgcggtggagcgtacccgtgagctgttcgccaaaagccttggctacgcgaaaccccagacccagggggattacgccattgcgcgccatttcctgcagcacgaggctagcgctgccgcgccctatctggtgtttctgcacgccaccacccgcgacgataagcactggccggaaacccgctggcaggagcttctcgatctgctggccgacagcggcgtccacattaagctgccgtggggggccccgcacgaagaggcgcgggcgaagcggctggcggaaggccgggagtatgtcgaagtgctgccgcgcatgagccttgagcaggtggcgcaggttctggccggcgcccgggccgtcgtctcggtcgataccgggctgagccatctgaccgccgcgctggataaaccgaactttacgctctacggcccgaccgacccggggctgattggcggatacggtaaaaaccagcatatcgtgcggccggaaaacagcgccagcaccggcgatattgcggccagccggattcatcttctcctgcaaaatcaggggctgctc

SEQ ID NO: 23703 - DNA, 1191 bp, Klebsiella pneumoniae
atgcgtggtgatttctacaaacagttaactagcaatctggagaccgctcgggccgaagggttgttcaaagaagagcgcatcatcacctcggcgcagcaggcggacattaccgtcggcgacagccacgtgattaacttctgcgccaataactatctgggtctggcgaaccacccggaactgattgccgcggcgaaatccggcatggacagccacggtttcgggatggcctcggtacgcttcatctgcggcacccaggatacgcataagcagctggagaagaagctggccgatttcctcggtatggaagacgcgatcctctactcctcctgcttcgacgccaacggcggcctgtttgaaacgctgctcggcccggaagacgccattatctccgacgccctgaaccatgcctcgatcatcgacggcgtgcgtctgtgtaaagcgaagcgcttccgctatgccaacaacgatatgcaagagctggaggcgcgtctgaaagaagctcgcgaggccggcgcgcgtcacgtgctgatcgccaccgacggcgtgttctcgatggatggcgtgatcgccaacctgcaaggcgtttgcgacctggcggataaatacgatgcgctggtgatggtcgatgactcccacgccgtcggcttcgtcggcgaaaacggccgcggctcccacgaatactgcgatgtgatggggcgcgtcgatatcatcaccggcacgttgggtaaagcgctgggcggcgcctccggcggctacaccgccgcgcgcaaagaggtggttgagtggctgcgccagcgctcccgtccgtatctgttctccaactctctggcgccggccatcgtggccgcctccatcaaagtgctggagatggttgaagagggggcagacctgcgcgatcgcctgtgggctaacgcgcgtctgttccgcgaaaaaatgaccgcggcaggcttcacgctggccggcgccgaccacgccatcattccggtgatgctgggcgaggcggtggtggcgcagaactttgcccgcgagctgcagaaagaagggatctatgtcaccggcttcttctatccggtggtaccgaaaggccaggcgcgtattcgcacccagatgtcggcggcgcatacccctgaacaaattgagcgtgcggtggaagcctttacccgcatcggcaaacaactgggcgtcatcgcc

SEQ ID NO: 23704 - DNA, 429 bp, Klebsiella pneumoniae
atgcaagaaattatgcaattcatcggccgtcacccggtcctgagcatcgcgtggatcgcgctgctgggtgcggtagtgttcaccaccttcaaggggctgatgtcgaaagttaaagtcatcacccgtggtgaagcgacgcgtcttatcaataaagaagatgcggtggtggtcgacctgcgtcagcgtgacgatttccgtaaaggccatattgccggcgctattaacctgctgcccagcgatatcaaagccaataacgtcggcgagttggaaaaacacaaatcgcaacccattattgtggtagacggttccggcatgcaggcgcaagagcccgccagcgcgctgaacaaagccgggtttgaaaaagtctttgtactgaaagagggcattgctggctggagcggcgaaaacctccctctggtacgcggcaaa

SEQ ID NO: 23705 - DNA, 249 bp, Klebsiella pneumoniae
atggccaatattgagatctacaccaaagcgacctgcccgttctgcatccgcgcgaaagcgctgctgaacagcaaaggcgtaacgttccatgagttgccgatcgatggcgatgccgcgaagcgtgaggagatgatccagcgcagcggacggacgacggttccgcagatttttattgatgcgcagcacattggcggctgtgacgacttgtatgcgcttgattcacgtggtggacttgatcccctcttgcgc

SEQ ID NO: 23706 - DNA, 594 bp, Klebsiella pneumoniae
atgcacaacctggcgcggccgacgtcgcgcccattacgactcctgtcagatatgcaggcaatgatggaagaaacacaagcatttgaaaaccgtgtgcttgagcgtctgaatgctggcaaaaccgtacgaagcttcctgatcgccaccgtcgagctgttaacggaagcggtcaatattctggtgcttcaggtgttccgtaaagacgactacgcggtgaaatacgccgtcgagcccttgctggagggcagcgggccgctcggcgatctctctgtacgcctgaagctgatttatggccttggggtaataagtcgtgctgaatatgaagacgctgagctgctgatggccctgcgcgaagagcttaaccacgacggcaatgagtacagctttaccgacgacgaaattatcggtccgttcggcgagctgcactgcgtcgccgccctgccgccaacgccgcaatttgatgacagcgatgccgaactgctggcaatgcagaaactgcgttaccagcagatggtgcgctcaacgatggtgctgtccctgactgagctgatttcacgaatcagcttaaaaaaagcctttcagaaatcaacgctc

SEQ ID NO: 23707 - DNA, 945 bp, Klebsiella pneumoniae
ttgcttcaatttcgcgcaattgctcttgccgtagccggttcgctggctctggcggcgccagcgttcgctggcaaactctccatcgttattgacgattttggctaccgcccgcagaccgagaatcaggtgctggcgctgccggcaactatctccgtcgccgtgctgccgaacgcgccgcacgcccgggaaatggccactaaagcgcataatcagggccatgaagtgctcatccacctgccaatggcgccgctcagcaaacagccgctggaaaaagacaccctgcgtcccgaaatgagcagcgaggagatcgagcgcattattcgcgaggcttacggcaaagtcccttacgccgtcgggctgaataaccatatgggcagcgcgatgacctccaacctgtttggcatgcagaaggtgatgcaggccctggagcgctacaatctctattttctcgacagcgtcaccatcggcaacacccaggccatgcgcgccgcgcagggtaccggcgtgaaggtgattaagcgcaaggtgtttctcgacgatacgcagaatgaagccgatatccgcaaccagttcaatcgcgccatcgccctggcgcggcgcaacggttcggcgatagccattggccatccgcatccgacgacggtgcgggtgctgcagcagatggtctataacctgccgccggatatcacgctggtgcgcccgagcagcctgctgaacgagccgcaggtcgacaactcgacgccaaactacgcccagccgcccgcgcaacaaacgcagcagaagccgcgtaatccgttccatggcgtgaagtcttgcaaaccgaagcgcccgctggagcctgtgaacgccagtcgcttcttcactatcctcagcgatagcatcagccagagcgcgctgatccagtactatcgcctcaaatggcagggctgggacaaccccggcaac

SEQ ID NO: 23708 - DNA, 1017 bp, Klebsiella pneumoniae
atgaacgcacttaatgctgcaatgactgtgatcggtgccggctcttacggcaccgctcttgccatcaccctggcaagaaatggccaccacgttgtgctgtggggccatgacccgaaacatatcgcgacgctgcaacacgatcgctgcaacgccgcgttccttcccgatgtgcctttcccggatacgctgcatcttgagagcgacctggccaccgcgctggccgccagccgcgacatccttgtcgtggtgccgagccatgtattcggtcaggtgttacgccagattaaaccgctgatgcgttccgacgcgcggctggtgtgggccaccaaaggccttgaggccgaaaccggccgtctgctgcaggacgtggcgcgtgaagcgctgggcgatgatattccgctggcggtgatctcggggccaaccttcgccaaagagctggccgccggcctgccgacggcgatttcgctggcggccacggatccgcagtttgcggaggaccttcagcgcctactgcactgcggcaaaagcttccgcgtctacatcaacccggactttatcggcgtgcagctcggcggcgcggtgaaaaacgtcattgccatcggggcaggtatgtcggacggcatcggcttcggcgccaatgcgcgtacggcgctgattacccgtgggctggtggaaatgtcccgcctcggcgcggcgctgggcgccgatccggaaacctttatgggcatggccggcctcggtgacctggtgctcacctgcaccgacaaccagtcccgtaaccgtcgcttcggcatgatgctcggccagggtatggacgtgcagagcgcccaggacaagattggccaggtggttgaaggctaccgcaataccaaggaagttcgcgttctggcacagcgtttaggtgtcgaaatgccaataaccgaggaaatttatcaggtattgtattgcggaaaaattgcgcgcgaggcagcattgaccttattgggtcgcgcccgcaaggacgagcgcagcagcaat

SEQ ID NO: 23709 - DNA, 819 bp, Klebsiella pneumoniae
atgccgtgtgaagaactggatatcgtctggaataatattaaagccgaagcccgggctttggctgactgtgagccgatgctcgccagtttttaccacgcaacgctactcaagcatgaaaatctcggcagcgcgctgagctatatgctggccaacaagctggcttccccgattatgccggcgatcgccattcgcgaagtggtggaagaggcctacgccgccgatccggaaatgatcgcctccgccgcctgcgatattcaggcggtgcgcacgcgcgacccggcggtggataaatactccacgccgttgctctatctgaagggtttccatgccctgcaggcctatcgtatcggccactggctgtggactcaggggcgacgcgcgctggcgattttcctgcaaaatcaagtctccgtctctttccaggtggatatccacccggcggcgaaaatcggccgcgggatcatgctcgaccatgccaccggcattgtggtcggcgaaacggcggtgattgaagatgacgtctctattctgcagtcggtcaccctcggcgggaccggtaaaaccagcggcgaccgtcatccgaaaattcgcgaaggcgtaatgattggcgccggggcgaagatcctcggcaatattgaagtcgggcgtggcgcgaagattggcgccggttcggtggtattgcagccggttccgccgcacaccaccgcggcgggcgtaccggcgcgtatcgtcggcaagccggagagcgacaagccggcgatggatatggatcagcatttcaacggcatccaccacaccttcgagtacggcgacgggatt

SEQ ID NO: 23710 - DNA, 471 bp, Klebsiella pneumoniae
atgctgaacatcgtgttattcgaaccagagatcccgccgaacaccgggaatattatccgcctgtgcgccaacacgggcttcagtctgcatatcattgagccgatgggcttcacctgggacgataaacgcctgagacgcgccggactggactatcacgagttcactgccgtgcagcgccatgcggattacgcggcgtttgtcgccagcgcgcagccgcagcgtctgttcgccctgaccaccaaaggcacgcctgctcacagcgcagtgagctatcaggacggcgatttcttgatgtttggcccggaaacccgcggtctgccggccagcatcctcgatgccctgccgccggagcagaaaatccgtattccgatgatgccggacagccgcagtatgaacctgtcaaacgcggtgtcggtggtggtgtatgaagcctggcgccagctggggtatcctggcgcggtcttgcgcagc

SEQ ID NO: 23711 - DNA, 606 bp, Klebsiella pneumoniae
atgaaactgatcggcagctacaccagtccctttgtgcgcaaaatatcggtgatcttgctggaaaagcgcatcccttttgaatttgtcaacgaatccccctacagcgaaagcaacggcgtgtcgcgctataacccgctgggcaaagtgccggcgctggtgacagatgacggcgaatgctggtttgattctccggttatcgcgcagtatctcgagctgctgggcgtggcgccgccgatgattcccgccgatcccagagccgctctcaggatgcgccagcttgaggcgctggcagatggggtgatggaggccgcccaggcgctggtgcgcgaaaaagctcgccctgcggcccaacagtcagagcaagagctgctccgccagcgggagaaagtggcgcgcggcctcgacaggctggaagcctgcgcggcggacggaacgctacgcggtgacgaggtcaatctggcgaccatctctacggcctgcgccattgcctacctgaactttcgccgggtggcgccgggctggtgcgccacccggccgcagttggtgaagttggtggatgcgctgttccagcgcgccagctttgcgcgcaccgaaccgccgcggact

SEQ ID NO: 23712 - DNA, 450 bp, Klebsiella pneumoniae
gtgacctctaactcggtgatgaactcgttctttattccgcgcttaggtagccagatttatgcaatggccggtatgcagactcagctgcacctcattgctgacgaagctggtacttatgacggtatctccgctagctacagtggcccgggcttctcaggtatgaagttcaaagcgattgccaccccggatcgggcgactttcgatcagtgggttgcaaaagccaaacagtctccgaactccatggactccatggccgcgttcgagaaagtggctgtgcctagcgaatacaacaaagtggaatatttctctaacgtgaaaccggatctgttcaaagatgttgtgaacaaattcatgtctcacgagagcatgaacatgtctaaacctgaaggcgagcacgctgctcacgacgggatggaaggcatggacatgagccacgcggaaaccgctcac

SEQ ID NO: 23713 - DNA, 1989 bp, Klebsiella pneumoniae
atgttcggaaaacttacactggatgcagtgccctaccacgaacctattatcgtggtaacggtggctgcgattatcattgggggactggcgcttctggcagccatcacttacttcggtaagtggtcctacctatggaacgagtggctgacttctgtcgaccacaaacgtctcggtatcatgtacgttatcgtggcaatcgtcatgctgctgcgtggctttgctgacgccatcatgatgcgtagccagcaggtgctggcttcggccggggaagccggcttcctgccgcctcatcactacgatcagatctttaccgcccacggcgttatcatgatcttcttcgtggcgatgccgtttgttatcggtctgatgaacctggtggttccgcttcagctcggcgcgcgcgacgtagccttcccgttcctcaacaacctgagcttctggttcaccgttgtgggcgtgattctggttaacctgtctctgggcgttggtgagttcgcgcagaccggttggctggcctatccgccgctgtcgggaattgagtacagtcctggcgtaggggttgattactggatttgggcgctgcagctctccggtatcggtactaccctgaccggtattaacttcttcgtgaccattatcaagatgcgcgccccgggcatgaccatgttcaagatgccggtattctcctgggcatctctgtgcgctaacatcctgattatcgcctcgttcccaattctgaccgtcactatcgcgctgctgaccctggatcgttacctgggcacccatttctttaccaacgatatgggtggcaacatgatgatgtacatcaacctgatttgggcctggggtcacccggaagtgtacatcctggttctgccggtgttcggggtcttctccgaaatcgccgcgaccttctcgcgtaagcgtctgttcggttacacctctctggtatgggcaaccgtctgtattaccgttctgtcgttcatcgtttggctgcaccacttcttcaccatgggtgctggcgcgaacgtaaacgccttcttcggtattactaccatgattatcgcgatcccgaccggggttaagatcttcaactggctgttcaccatgtatcagggtcgcatcgtcttcaactcggcgatgatgtggactatcggctttatcgtgaccttctccgtaggtgggatgaccggcgtgctgctggcggtaccgggcgcggacttcgttctgcacaacagcctgttcctgattgcgcacttccataacgttatcatcggcggcgtagtgttcggttgcttcgcaggtctgacctactggtggccgaaagcctttggcttcaccctgaacgaaacctggggcaaacgcgctttctggttctggatcatcggcttcttcgtggcgtttatgccgctgtacgtgctgggcttcatgggtatgacccgtcgtctgagccagcagatcgatccgcagttccacccgatgctggttattgcagcttgcggtgcggcgctgatcgcctgcggtattctgtgccagctgattcagttctacgtgtctattcgcgaccgcgatcagaaccgtgacctgactggtgacccgtggggtggccgtacgctggagtgggcaacctcttctccaccgccgttctacaacttcgctatcgttcctcaggttcacgaacgtgatgccttctgggaaatgaaagagaaaggtgaagcgtacaaacagcctgctcactatgaagaaattcatatgccgaaaaacagcggcgccggcatcgtgattgccgccttcgctacggtatttggtttcgccatgatctggcatatctggtggatggcgatcgccagcttcatcggcatcgtagcgacctggattattaagagctttgacgaggacgtggattactacgtaccggttgcagaagtcgaaaaactggaaaaacagcatttcgatgagattaacaaagcagggctgaaaaatggcaac

SEQ ID NO: 23714 - DNA, 1176 bp, Klebsiella pneumoniae
atgttaaacggcctgaaacccttatcccgttccctgcgctggggcatggtcggcggcgggggaaccagtcagatcggctacagccaccgctgtgcggcgctgcgtgacaatgtttataccctgctggccggcgcgcttgacgtcgatgccgagcgcgggcgcgcgttcggtgagcaactgggcatcgcgccggagcgctgctacgccgactaccagaccctgtttcgcgaagaggcgcagcgccctgacgggatcgaggtcgtctcggtcaccaccccgaacaatacccatttcgccattaccaaagcggcgctggaggcgggactccacgttatctgcgaaaagcccctctgctttaccgccgaagaggcgcgcgagctggtggagctgagcaaaaaacagaacaaaatcgtcggcgtcacctacggctatgccggctatcagatgatccagcaggcgcggcagatgattgccgatggactgctcggcgagatccgcatcgttaacatgcaattcgcccacggcttccataaccaggccgtcgagctgcaggcagaatccacccgctggcgagtaacgccgaagtttgccgggcccagctatgtgcttggggatctggccacccatccgctgtttgtcgccgagaccatggcgccgcagctcaatatcaaacggctgatgtgctcccgtcagagctttgttccctcccgcgcgccgctggaagataacgcctttgtcctgatggaatatgacaatggcgcggttggctcgatgtggaccagcgcggtcaacagcggcgccatgcactcgcaaaaagtgcgcatcgtcggcgaaaaagcaagcatcgaatggtgggatgagcatcctaaccagctcagctatgaggtgcagggcgagccggcgcgcattctggaacgtgggatgccctacctgtcgccgaacgcgctggcggatgaccgcattggcggcggccatccggaagggctgttcgaagcctgggccaacctctatcgccgctatgcgcaggcgattgacgccacggatcgcgacgatcgcgccttcctgcaagacttctggtatccggacgtcgaagccgggctgcacggcgtctattgggtagagcagtgcgtcaaatcggctgacgctggcagccagtgggttgactttactttacct

SEQ ID NO: 23715 - DNA, 1674 bp, Klebsiella pneumoniae
atgaagagctgggatgtgatcgtcatcggcagcggcgcggccggttttgccgccgcggtcaccgcctgctgtaaagggctgtcggtgctgatgctggagaaagccggccagttcggcggcacctcggccatctccggcggcgccgtgtggctgcacgataccgaccaggcgcgcgccgagggcaaaagcggtagcgccgaggcgatgaaaacctacctgcgaaccattatcggcgagggccagtaccgagaagatcttgccgaagcgtttgtcagcgccgggcgggaggcgctggcctttctcgagcgtgagggggcagtaaagtacagcctgcgtccgctctcgcccgattactatccggatgaacccggcgcagtcgacgtcggtcgtgcgctggaggtggtggagtatgacggccgtgaactgggggacgcgtttcgcgacctgcgttcaccgccgccggggatgctgctgtttggcgggatgatggtcaaccgcgtcgatattcaacattttctcgacatgcgccgctcgctgcgctccctggcccattgcacccggctactgctgcgctatgcccgcgaccgggtgaagtaccctcgcggcacccgcctggcgatgggcaatgcgctgatagcccgcatggcgacaacggcgctgcgtaaaggcatgaacctgcggctgaatgtcaatgttctggcgctgtgcgaagcgcaaggcgcggtccacggggtggagattgagtatcaggggcaaagagagacgctgcacgcccgacgcggggtggtgctggccgcaggcggcttcgccgcgggcgcgctggcggcgcgctatcggccgcacacccgcgagcatttcaccatgtcgccgccggccaacgatggcgccgcgctgcatctcgcggcggcgcttaacgctcgcgagggagccgatcgggcctccaactttttctgggcgccggtatcggtgctgacccgggccgacggcagcgaggagcgcttcccccatctggtaaccgatcgcgcaaaaccgggcgtgattgccgtcaatcagcgggcggtacgcttcgtcaacgagtccagttcctatcaccatttcgccagcgcaatgcaggatgcagcggaaaatgccccctgttttttactctgcgacgcccaggcgatgaagcgttatggcctcggactggcgcgcccggcgccggtcaataatgacgccctggtcgccgctggctatctgcacaaagccgatactctggccgcgctggcgcaacagcttggtctggatgcccaaaccctgagcgagacggtagcccgctacaaccgcgacgccgcgcagggcgtggatcgggaatttgctaaaggcggcaacagctataaccgggcgatgggcgatccgggccatcagcctgacgcctgtaatgcccccctgctcagcgcgccgttctatgccatcaaactttataccggcgatctggggacctcacggggcctggtcaccaccgccgatgcccaggtcgtcaataccgaaggacaccccatcccggggctgtacgcggtgggaaacgacatggattcgctgatggccggcacctatccgggccccggcatcaccctcggcccggggctgacgtttggctatctcgccgcctgccatctggcacaacactccacccac

SEQ ID NO: 23716 - DNA, 969 bp, Klebsiella pneumoniae
atggcatgcggcgaattctccctgattgcccgttattttgatcgcgttaaaagcgcccgccttgatgttgaaaccggcatcggcgatgactgcgcgctcctgcatattcccgagaaaaaaacgctggcaatcagcaccgacaccctggtggcgggcaatcacttcttacccgatatcgaccctgccgacctcgcttataaagcgctggcggtgaacctgagcgacctcgcggcgatgggcgcggagccggcgtggctcacgctggcgctgaccttgccggaggtggatgaagtctggctggaagccttcagcgacagcctgtttgtccagctggactattacgatatgcaactgattggcggcgacactacccgtggcccgctctccatgacgctgggtatccacggctttgtgccgccgggacgcgccatgaaacgcgctggcgcgaagccgggggactggatctatgttaccggcactccgggagatagcgccgccggtctggctgtactgcagaatcgtctaacggtggatgaaccgtctgacgccgactacctgctggcccgtcatctgcggccgatgccgcgcgtgctgcagggccaggcgctgcgtgacctggcgacatcggctatcgatctctccgacggcctgatctccgatctgggccatattctcaaagccagcggctgcggcgcgcgcatcgatctcgatgccatgccgtactccgatgcgatgctgcgccaggttgattctgagcaggcgctgcgctgggcgctcgccggcggggaagattacgagctgtgctttaccgtaccggagctgaaccgcggggcgctggacgtggctcttggccatcttggcgcgcgttttacctgtatcggacagattgcgccggagagcgaagggctgcagtttatccgcgacggtaagccggtcgcgcttgatttaaagggatacgatcactttgcg

SEQ ID NO: 23717 - DNA, 1125 bp, Klebsiella pneumoniae
atgaaatttgaactggataccaccgacggtcgcgcccgccgcggtcgcctggtgtttgagcgcggcgtggtggaaacaccggcctttatgcccgttggcacctacggcaccgtcaaagggatgacgccggaagaggtggaagccaccggcgcgcagattattctcggcaacaccttccacctgtggctgcgcccgggtcaggagatcatgaagctgcacggcgatctgcacgattttatgcagtggaaaggaccgatcctgaccgactccggcggtttccaggtgttcagccttggcgatatccgtaagatcaccgagcagggcgtccacttccgcaatccgatcaacggcgatccgattttcctcgatccggaaaaatcgatggagattcagtacgatctcggctctgacatcgtgatgatcttcgacgaatgtacgccgtacccggcggactgggattacgccaagcgctcaatggagatgtctctgcgttgggcgaagcgcagccgcgaccgtttcgatagccttggcaataaaaatgcgctgttcggcattattcagggtagcgtttacgaagatttacgcgatatctcggtgaaaggtctggtagagattggctttgatggctacgctgtcggcggtttggcggttggtgagccgaaggaagacatgcaccgtattctggagcacgtctgcccgcagatcccggccgataaaccacgatacctgatgggcgtcgggaagccggaagatctggtggaaggggtacgtcgcggtatcgatatgttcgactgcgtcatgccgacgcgcaacgcgcgtaacggccacctgttcgtcaccgacggcgtggtgaaaatccgcaacgcgaagcacaaaagcgataccgcgccgctggacgccgagtgtgattgctatacatgtcgcaattattcacgcgcttacttgcatcacctcgaccgttgcaacgaaatattgggcgcgcgtctcaataccattcataacctgcgctactatcagcgtttaatggctggtttacgcaaggctatcgaagagggtaaattagagagcttcgtgaccgatttttaccaacgtcaggggcgcaccgtgcctcctttgaacgttgat

SEQ ID NO: 23718 - DNA, 1101 bp, Klebsiella pneumoniae
atgcaggacgaaatgtacatggcgcgtgcgctgaagcttgccgcgcgcggtcgctttactacccatcctaaccctaacgtcggctgcgtcattgtgaaagacggcgagatcgtcggcgaggggtttcactatcgcgccggcgagccgcatgctgaagtgcacgccctgcgcatggctggcgaaaaggcgcgcggcgccaccgcctacgtcactcttgagccctgcagccaccatggccgtacgccgccatgctgcgatgcgctgattgccgccggcgtcagccgcgtggtcgccgcgatgcaggatccgaacccgcaggtggcggggcgcggtttgtatcgcctgcagcaggccggcattgaggtcagccatgggctgatgatgaacgaagcggaagcgctgaataagggctttctgaagcggatgcgcaccggttttccctgggtgcagctgaagctgggcgcctcgctggacggccgcacggcgatggccagcggcgaaagccagtggatcacctccccgcaggcgcgacgcgacgtgcagcgtctgcgcgcccagagccatgccatcctgaccagcagcgccaccgtgctggcggacgatccggcgctgaccgtgcgctggcaggagctgagcgccgatacccaggcgctttatcccgaagagaatttgcgccagccgctgcgcgtcgttatcgacagccagaaccgcgtcacgcctgagcatcgtattgtgcagcaggcgggggaaacgctgtttgcccgcctgcgcgccgatgaacggcagtggccggaaagcgcccgcacgctgctggttccggagcataacggccatctcgatctggtgctgctgatgatgctgctcggcaaacagcagatcaacagcgtctgggttgaggcaggggccacgcttgccggggcgctgctgcaggcgggcctggtcgacgagcttatcgtctatattgcgcctaaactgttaggcaatgcggcgcgtggattatgcgcgctgccggggcttgaagagctgagccaggccccccattttaaattcaatgagatacgtcaggttggcccggatgtctgcctgcatttaaccactgcg

SEQ ID NO: 23719 - DNA, 897 bp, Klebsiella pneumoniae
atggatttcccgcaacaattgcaggcctgtgtggaacaggcaaacgaagcgctgcgccgtttcatcgccccgcagccctttcagaacactccgctggtggaagcgatgcattatggcgcattgttaggcggtaaacgcctgcgtcccttccttgtctacgccaccggcgagatgttcggcgtgtgccgtaccacactggatgctcctgccgcggcggtcgaatgcattcatgcctactccctgatgcatgatgatttgccggcgatggatgatgacgatctgcgccgcggcctgccgacctgccatattaaatttggcgaagccaacgcaattcttgcgggagatgccctgcaaacgctggcgttctctatactgagtgatgcgccgatggtcgacgttcctgaccgggaccggctggcgatggtttccgaactggcgcaggccagcggcgtggcgggcatgtgcggcggccaggcgctggatctgcaggccgagggacagcaggttgatttacaggcgctggagcgtatccatcgccataaaacgggcgccctgatccgcgccgccgtccggatgggagccctgagcgccggcgaacgcggccgcgccgccctgcccgcgctggatcgctatgcggaaaatatcggtcttgccttccaggtccaggatgacattctcgacgtggtaggggatactgcgacccttggcaaacgtcagggtgccgaccagcaattgggtaaaagcacctatcccgccctcctgggtcttgagcaagcccggaagaaagcgcacgacctgatcgctgatgcccgccggtcgttagatgagctggccgcacaatctctggatacttcggcactggaagcgctcgcgaattacattattcagcgcgataaa

SEQ ID NO: 23720 - DNA, 537 bp, Klebsiella pneumoniae
atgacaagacgttacctgaagctcgccatcgcgggctgcctgttcaccctgaccgcctgcgcccagcaaagcgaaatccgccagatgcaccagagcgtgagtacgctgagccaggagatgacccagctcaaccagcaaacgatcaaaatcacccagcaaaacgcgctgaacgccaaatccacccgcggcgtctatctgctgccggaggccaagaccccggcgcggctggagagccagatcggcaccctgcgcatgtcggtgggcagtattaccccggatggcgatgggtcacgcctgaccttacgcattcagggcgaatccaacgatccgctgccggcctttaccgccaccgtcgcttccggacagatcaccggcaccacccacagctatcaggaagtcaatgttcaggatcagctgattagcgcgccggccagcaccctcgcccccagcgatgtcgatatcccgttgcgcctcaatgtaacgccagataaagtcggttttattcgcgtacacgatatccagcccgccgccgcccag

SEQ ID NO: 23721 - DNA, 852 bp, Klebsiella pneumoniae
atgaaacaaaaagtggttagcattggtgatatcaacgtagcgaacgacctgccgttcgtgctgttcggcgggatgaacgtgctggagtcgcgcgacctggcgatgcgtatctgcgaacattatgtcaccgttacgcagaagcttggtattccctacgtcttcaaagcctcctttgataaagccaaccgttcctccatccactcctatcgtgggccgggtctggaagaagggatgaagattttccaggagctgaagcagacctttggcgtgaaaatcatcaccgacgttcatgaagccagccaggcgcagccggtagctgacgtggtggacgtgatccagcttccggctttcctcgcgcgccagactgacctggtggaagcgatggcgaagaccggggcggtgatcaacgtcaagaagccgcagttcgtcagcccgggtcagatgggcaacatcgtcgataagtttatcgaagggggtaacgacaaagtaatcctctgcgaccgcggcgctaacttcggttacgacaacctggtcgtggatatgctcggcttcggcgtgatgaagaaagcctccaacaactcgccggtcattttcgacgtcacccacgcgctgcagtgccgcgacccgtttggcgcagcctccggcggtcgtcgtgcgcaggtgagcgagctggcccgcgccggtatggcggtaggtatcgccggtctgtttattgaagcgcatccggatccggaccacgcgaaatgcgacggcccgtccgcgctgccgctggataaactggagccgttcctcaaacagatgaaagcgattgacgatctggtgaaaagcttcgacgagctggataccagcaag

SEQ ID NO: 23722 - DNA, 1089 bp, Klebsiella pneumoniae
atgggattcaaatgcggtatcgtcggtttgcccaacgtcggcaaatccaccctgttcaatgcgctcaccaaagcgggtattgaagcggccaacttccccttctgtaccattgagccgaacaccggtgtcgtaccgatgcccgatccgcgtctggacaagctggctgaaatcgtcaaaccgcagcgcatcctgccgaccaccatggagttcgtggatatcgcgggcctggtgaaaggcgcgtccaaaggtgaaggtcttggcaaccagtttctgaccaacatccgtgaaaccgaagccatcggccatgtggttcgctgctttgaaaacgataatattattcacgtcgcggggaaagtgaacccggcggaagatatcgacgttatcaacaccgaactggcgctgtctgaccttgatacctgcgaacgcgcgattcaccgcgtctccaaaaaagccaaaggcggcgataaagacgcgaaggttgagctggccgcgctggaaaaatgcctgccgcagctggaaaacgccggtatgctgcgcgcgctggatctgaccaaagaagagaaagaggccatccgctatctgagcttcctgaccctgaagccgaccatgtacatcgcgaacgtcaatgaagacggtttcgagaacaacccatacctcgatcaggttcgcgccatcgccgagcaggaagggtctgtggtggtgccggtgtgcgccgccgtcgaagcggacatcgccgagctggacgatgaagagcgtgacgagttcatggctgagctgggcctcgaagagccgggcctgaaccgcgtgatccgcgccggttacgctctgctgaacctgcagacctacttcaccgcgggcgtgaaagaagttcgcgcatggaccatcccggtgggagcgaccgcgccgcaggcagccggtaagatccacaccgacttcgaaaaaggctttatccgcgcgcagaccatcgcttatgaagacttcattgcctacaaaggcgaacagggcgcgaaagaagccggtaaaatgcgtgctgaaggtaaagactacatcgtgaaagatggcgatgtgatgaacttcctgttcaacgtc

SEQ ID NO: 23723 - DNA, 945 bp, Klebsiella pneumoniae
gtgcctgatatgaagctttttgctggtaacgccaccccggaactagcacaacgtattgccaaccgcctgtacacttctcttggcgacgccgctgtaggtcgttttagcgacggcgaagtcagcgtacaaatcaatgaaaacgtacgcggtggtgatattttcatcatccagtccacttgtgctcccaccaatgacaacctgatggaactggttgttatggttgatgctctgcgtcgtgcttcggcaggtcgtatcaccgccgttatcccttacttcggttatgctcgtcaggaccgtcgtgttcgttctgctcgtgtgccaatcaccgcgaaagtggtggcggattttctgtccagcgtcggcgttgaccgcgtgctgaccgttgacctgcacgcagaacagatccagggcttcttcgatgtgccagtcgataacgtgttcggcagcccaatcctgctggaagatatgctgcagctgaacctggacaacccgattgtggtttctccggacatcggcggcgtcgtgcgtgcccgcgctatcgctaaactgctgaatgataccgatatggctatcatcgacaagcgccgtccgcgcgccaacgtctcccaggtgatgcacatcatcggcgacgttgccggtcgtgactgcgtgatggtcgacgatatgatcgacaccggcggcaccctgtgtaaagcggcagaagcgctgaaagagcgtggcgcgaaacgcgtattcgcttacgcgacgcacccaatcttctccggcaacgctatccagaacatcaaaaactctgtcattgatgaatttgtcgtctgcgataccattccgctggcaccagaaattaaagcgctggataaagtgcgtactctgacgctctccggtatgctggctgaagctattcgccgtatcagcaatgaagaatctatctctgctatgttcgaacat

SEQ ID NO: 23724 - DNA, 2487 bp, Klebsiella pneumoniae
atgacgaaacctgtattagtgctggtgggacatggcatggtcggccaccattttctcgaacaatgcgtgagccgcaatctgcatcagcaatatcgaatcgtggtgtttggcgaagagcgttaccccgcctacgaccgggtacatctctccgagtattttgccggacgcagcgccgagtcgctgtcgctggcggccggggatttctttattgaacatggtattgaactccgcctcggcgaggcggtggcgaccatcgaccgcgacgcacggctggtacgggacgccgaggggcatgaaatccactgggataaactggtgctggcgaccggctcgtatccctttgttccgccaatccccggtaacgatctcgcggggtgctttgtctaccgcactcttgacgatctcgaccgtatcgccgcccatgccgccgcggcgaagagcggggtggttatcggcggcgggctgctcgggctggaggcggccaacgccctgaaacagctggggctggagacgcaggtggtggagtttgccccgaacctgatggccgtccagctggataacggcggggcggcgatgctccgggagaagatcgtcgccctcggcgtgggggtgcataccagcaaagcgaccaccgccatcgtgcgcgaggccgacggcctgcggctgaactttgccgacggcggcgcgttgcggaccgacatggtggtcttctcggcggggatccgcccgcaggacgcgctggcccgcggctgcgcgctgcaggtgggcgaacgcgggggaattcacatcgacgaccagtgccgcacctctgacccgaacgtgctggcgataggcgaatgcgccctgtgggacaataaaatttacggtctggtggcgccgggctatcagatggcgcgcatcgccgcggccactctcgcaggagaggacgcctgctttagcggcgccgacatgagcaccaaactgaagctgctgggggtcgacgtggcctcgtttggcgatgcgcaggggcgcacgccgggctgtcagagctatcaatggaccgacggtccgcagcagatttacaaaaaaatcgtcgtcagtcaggacggcaaagccctgcttggcggcgtgctggtgggggatgccagcgactatgccacgctgctgcagatgatgctgaacggcatggcgctgccgccgcgtccggagagtctgatcctgcccgcgctggagggagccgcgccgaaggcgctcggcgtcgcggcgctgccggacagcgcgccgatctgctcctgccataacgtcagcaaaggcgatatctgccaggcggtgaacaatggggcgggggatatgtcggcgataaaaagttgcaccagagcggctaccggctgcggcggctgcagcgcgctggtgaaacaggtgatggagtatcagctggcggagcagggcgtcgaagtgaaaaaagacgtttgcgaacatttcccgtggtcgcgccaggagatctaccacctggtgcgggttaaccatatccataccttcgagcagttgattagccgctacggccaggggcacggctgcgatgtctgcaaaccgctggtggcctcggtgctggcctcctgctggaacgagtacctgctgaagccggcgcacctgccgctgcaggataccaacgaccgctatttcgccaatatccagaaggacgggagctattcggtggtgccgcggatggcggcaggggaagtgacgccggacggactgatcgccatcgggcagatcgccaaacgttaccagctctacagcaaagtgaccggcggccagcgcatcgacctgtttggcgcgcggctggaacagctgccggctatctggcgcgagctggccgacgccgggtttgaaaccggccacgcctacggcaagtcgctgcgcacggtgaaatcctgcgtcggctcaacctggtgtcgctacggcgtgcaagactccaccgggctcgcggtacggctcgagcatcgctataaagggctacgcgccccgcacaaaatcaagatggcggtctccggctgcacccgcgaatgcgctgaagcccaggggaaagatatcggggtgattgccaccgacaaaggctggaatctgtacgtctgcggcaacggcgggatgaaaccgcgtcacgccgacctgtttgccagcgatctcgacgaagcgacgttgatccgcagcatcgatcgtctgctgatgttctatatccgtaccgccgatcgcctgcagcgaaccagcacctggatggataacctggagggcggcgtcacctatctgcggcaggtggtgctggaggatagtcttggcattggcgaggagctggagcaggagatggcccggatcgtcgacagctaccagtgcgagtggcagaccaccctcaacgatccgcagcgtctggcgctgttccgctccttcgttaatagcgaccagcccgacgaggctgtgcagcgccgcgatctgcgcggtcagccgcagccg

SEQ ID NO: 23725 - DNA, 1256 bp, Klebsiella pneumoniae
atgacccttttagctctggcatcaatcacaaaacagctccggtcgccctgcgagaacgcgtcacgttttcgccggaaacgctcgataaggcgctggagagcttgctggctcagccgatggtgcagggtggggtggtgctgtcgacctgcaaccgcacggaactctatctcagcgtcgaagagcaggataacctgcaggaagcgctgatccgctggctgtgcaactaccacggcctcaacgaagaagacctgcgaaaaagcctttactggcatcaggataatgacgccgtcagccatctgatgcgcgtcgccagcggcctcgattcgctggtgctgggcgagccgcagatcctcggccaggtgaaaaaagcctttgccgactccagccgcggccatcttaacgtcagcgagctggagcggatgttccagaaatccttttcagtggctaagcgcgtgcgtaccgaaaccgatatcggcgccagcgcggtctctgtggctttcgccgcctgtaccctggcgcggcaaatctttgaatcgctctccagcgtcaccgtgttactggtcggcgccggggaaaccattgagctggtagcgcgccatcttcgcgaacatcacgtgcgcaaaatggtgatcgccaaccgcacccgtgaacgcgcccaggcgctggcggaggaagtgggcgccgaggtgatagccctcagcgatatcgacgaacggctgaaagaggccgacatcattatcagctccaccgccagcccgctgccgatcatcggcaaaggcatggtggagcgtgcgcttaaggcgcggcgtaaccagccgatgctgctggtggatatcgccgtcccgcgcgacgttgaaccagaggtcggcaaactggctaacgcctacctctacagcgtcgacgatttgcaaaacattattcagcataacctggcgcagcgtaaggctgccgcggtgcaggccgaatcgatcgtcgagcaggaaaccagcgaatttatggcctggctgcgcgcgcagagcgccagcgagaccattcgcgaataccgttctcagtctgagcaggtccgtgaggagctgacggcgaaagcgctggccgcgctggagcagggcggtgatgcccaggaaattatgcaggatctggcgcgcaagctcactaaccgcctgatccacgcgccaaccaaatctcttcagcaggccgcccgtgacggggacgacgaacgtctgcatattctgcgcaacagcctcgggctggaatag

SEQ ID NO: 23726 - DNA, 1080 bp, Klebsiella pneumoniae
atgaagtcttctattgttgccaaactggaagcgttgtacgagcgccatgaagaagtgcaggcgctgctcggcgatgccgcgacgattgccgatcaggataaattccgcgcgctgtcgcgggagtatgctcaactgagcgatgtggcgcgctgctataccgactggcgtcaggtgcaggaggatattgaaaccgcgcagatgatgcttgacgatccggaaatgcgcgaaatggcgcaggaagagctgcgtgacgccaaagaaaaaggcgaccagctggagcaacagctgcaggttctcctcctgccgaaagatcctgatgacgagcgtaacgccttcgtggaagtgcgcgccgggaccggcggcgacgaagcagcgctgtttgccggcgatctattccgcatgtacacccgttacgcagaatcgcgccgctggcaggtagagatcctcagcgccaacgaaggtgagcacggcggctttaaagaggtgatcgccaagatcagcggcgacggcgtttacggtcggctgaaatttgaatccggcggccatcgcgtgcagcgtgtgccggccaccgaatcgcaggggcggatccacacctccgcctgtacggtggcggtgatgccggagctgccggaagccgaaatgccggacattaacccggcggatctgcgcatcgataccttccgttcctccggggcaggcggtcagcacgttaacaccaccgactcggctatccgcattacccacctgcccaccggcatcgtggtggagtgccaggacgagcgttctcagcataaaaacaaagccaaggcgctgtcggtgctgggcgcgcgcatccgcgccgccgaagtggccaaacgtcagcaggcggaagcctccacgcgccgcaacctgctgggcagcggcgaccgcagcgaccgcaatcgcacctataacttcccgcagggccgcgtgaccgaccaccgcatcaacctgacgctctaccgtctggatgaggcgatggagggcaaactcgacatgctgattgagccgattgtccaggaacatcaggccgatcagctggcggcgctgtccgagcaggaa

SEQ ID NO: 23727 - DNA, 846 bp, Klebsiella pneumoniae
atgacctttcaggcctggctgcagcaggcgatcgcccgtctggcggagagcgacagcccgagacgcgacgccgagatcctgctgggacacgttaccggccgggcgcgaacctggattttggccttcggtgaaacgacgctctctgctgacgaggcggcgaagctggaggcgctcctggtgcgacgccagcgcggggaacctattgctcatctggtcgggcagcgcgagttttggtcgctgccgctgttcgtctccccggcgacgctgatcccccgcccggataccgaatgtctggtagagcaggcgctggcgcgtctgccaaccgcgccgtgccgtattctcgacctcggcaccgggaccggcgccattgccctggcgctggccagcgaacgtccggactgtgaggtcaccgcagtggacgtgatgccggacgccgtggcgctggcgttgcgcaatgccgaacatctgggcatcgctaacgtgacgataagtcaaagcgactggtttagcgcgctggccgggcagcgcttcgccacgatcgtcagcaatcccccctatatcgacgccgccgacccgcatctcgccgaaggcgatgtgcgctttgagccgttgacggcgctggtcgcaggcgaccaggggctggccgatctggcgcatatcatccgcgagggacggcagtatctgcagcccggcggttggatgctgctggagcatggctggactcagggcgaggcggttcgcgcgctgttccgcgaagcgggctatctggacgtcgcgacctgtcgcgactatggcgacaatgagcgtctgaccctcggacgtttacccgacatggagaatgttggc

SEQ ID NO: 23728 - DNA, 390 bp, Klebsiella pneumoniae
atgaacttattcacggctgtcctctacctgcacattgccacagtggcggtgtcggtaggattgttcgttttacgttactggtggatgtatcaccagagcccgctgctgaaccagcggtgggtgcgaattgcgccgcactgcagcgatacgctgctgtttctcagcggcgcagggttaatggcgataacgcactacctgccgttcacagaagacggcgcatggctgactgaaaagctgtttggcgttatcatttacatcgcattaggttttatcgcgttgggccgtcgtcgtccgcgcagccagcagagccgctttatcgcgttcctgctggcgctggtggtgttgtttatcatcattcaactcgccatcacaagaataccgatactgggg

SEQ ID NO: 23729 - DNA, 1386 bp, Klebsiella pneumoniae
atgagtcaatcttccctcccggagaaggctaaccgctcggtcataaccgactggcggcctgaagatcctgaattctggcaacagcgcggccatcgtgtggcaagccgcaatttatggatctccgttccctgtctgttactggcgttctgcgtttggatgttgttcagcgcggttgccgttaacctcaacaaagtaggctttcagtttacaaccgatcagctgtttatgctgaccgcgctgccggcgctgtcaggcgccttattacgcgtgccttacgcctttatggtgccgctgttcggcggccgtcgctggacggcgttcagcaccgggatcatgattgtgccatgcgtctggctgggcttcgcggtccaggatacctctacgccgtttagcatcttcgtgattatctctctgctgtgcggcttcgccggagccaactttgcctccagtatggccaacatcagcttcttcttcccgaaagcgaagcagggcggggcgctcggcgttaacggcggacttggcaatatgggcgtcagcgtgatgcagctggtcgcgccgctggtggtctcgatctctatctttgccgtttttggcggtaacggtagcgagcaaccggacggctcgatgctgtatctggaaaacgccgcgtggatctgggtacctttcctgattattttcactctggcggcgtggttctttatgaacgacctgtcggcttcgaaagcgtcgctgagcgagcagttgccggtacttaagcgcctgcatctgtggattatggcgctgctctatctcgcgaccttcggctcctttatcggcttttccgccgggttcgcgatgctgtcaaaaactcagttcccggatgtgcagatcctgcattacgccttcttcggcccgttcattggcgcgctggcgcgttcgatgggcggggcgatctccgaccgcctcggtgggacccgcgtaacgctggtcaactttgtggtgatggctgtcttctgcgcgctgctgttcctgaccctgccgaccaacggccagggcggtaactttatcgccttcttcgcggtgtttatggtgctgttcctgaccgccgggctggggagcgcctccaccttccagatgatctccgtgatcttccgtaagctgactatggaccgcgtgaaggcccagggcggcagcgaagcgcaggcgatgcgcgaggcggcgaccgataccgcggcggcgctgggctttatctccgccattggcgctatcggcggcttctttattccgaaagcgttcggtatctcgctggatctgaccggctcgccggccggggcgatgaaagtgttcctcgtgttctatattgcctgcgtggtgatcacctgggcggtatacggtcgtaagcgtcag

SEQ ID NO: 23730 - DNA, 691 bp, Klebsiella pneumoniae
gaagcccgcaagccggaaaacctgccgctgctgctgaccgaccatatggtgtgcgagctgaaagcggcgcagaacgccatgctgctggtgcgtcgctacgtcgcggataaagctgacgccgacgaactgtggcctgcctgaagccgtacgaagacttcacctaccgccgggggccggagccggatttgtcgccctgcataaacggatcaacaaaagcgccatgccgcagaccgacgacccgtggggccgccagctgctggacagcatgattttgttgattaaagaggaactgcatcacttctggcaggtgcgggagatgatgctggcgcgagatatcccctacgtcaaaatcaccgccagcaactatgcccgcggcctgcggcgcgaagtgcgctcgcatgagccggtgatgctgatcgataagctgatctgcggcgcctatatcgaggcccgctcctgcgaacgctttgccgccctggcgccgtggctggacgacgatctgcagaagttctacctgtcgctgctgcgctccgaggcgcgtcactatcaggactatctggatctggcgcagaagattgccggagaagatatcagcgagcgggtgcgccagctcggcgaggcggaagcggcgctgatcctccgtcccgaggccgagttccgctttcacagcggtgtgccggtagcggcgtaa

SEQ ID NO: 23731 - DNA, 1467 bp, Klebsiella pneumoniae
gtgaatataaaatcagcacattttttgccagggacgaataaacgccttggtgacaaatacctgttacttgaatgccttggtgatggcagccatggttgggtatggcgggcggagcgcctgcaagatggaaaaattgtcgcagtaaaaatccctaaggatattactcgggaagaccgccagcttgccgaaggtaaagagcttttagacgtcgagccgcacgaaaatattgtacaaatttttgatatgggccgtatagataatgaatggttctatattgaaatggaatatttcccaagccaaaccctggcgcaaaagctcgatgacaggcagcgtaattttggccagacctatgaacgtttattcagaatatatcgtcaagtgctctgtgctgtacattatttgaccgagctgccagtgccaatatcccatggagatattaagccacataacattttggttggcgaacgggatctggtgaagttgacggactttggcagctcagctttaccagaagaaatttacgttcgtacccgagaaaatggcgggactgtgttgtattcggccccagagttctccaacgtcgatagccgtagaggtagtctggaagagctactattgggcgacatctacagcttaggtgttttgctataccagctgctgacaggaaagctgccccatgatacgccagcacaagttcagcgccacgcacctttcaagcttccaacagagattaatagctctattcatacggacctggagcaagtggttcttacctgcttacaaaaacgagcggaggatcgcttttcaactatttccgacttaatttatgcatttgatgcagctaccactaagcaactaaaagctggtgctattgctcccgtttttcagactaaacttgatcaggactggtcaagtgcggtacttgaagcaatgtccaatcaatcttaccaaaaagctgctcagttagcgtcgcaggagtatggccgcagtaaagatctacaagctttacatcagcaacttattgctttgtaccgcgccaatcgcttattcgactttgaaaaagttgtagaagataataaagcgatcttgctcgaggataaattgactcaacctgcggctttgttcgagctgatagttaagacaaacctacagttgcgcaatatcagtcaagcaaaattctggctgttgcaacgaaagcaggttgaagcagaaaacgcgactaccatgtatttagaatcatctatccttggccttgaagcaaaatacactgaagcgagagcactattggagaaagtaaaccaaacaactccaatgaagttccatgtgttaagccaactcattttagtttgcgagcaaatgcgtgattactctggtgctgcagcttatttgaaagcggcattacgagtagcaccattggataacagcatgaaagagaaaaaagaattgtatgcaaagcttggggttatt

SEQ ID NO: 23732 - DNA, 1177 bp, Klebsiella pneumoniae
atggttttgctggttcatcctaacggctcgaaatactggcgtttacgctatcgcttcggtggtaaagaaaagatgctggcattggggaaatatcctgaagtgtcgttggctgatgccagaaatcgtcgggatgaagcccgtaagttgttagctaacggcgtcgatcctagtgagaacaagaaagctgttaaggtagagcatgagcaagaggcgattacgtttgaagtggtagccagagagtggcacgccagcaatcagaagtggtctgcatcgcatagcgctcgtgtattaaagcctcgaagataatctctttgctgccatcggtaagcggaacattgctgacctgaagactcgggatctgcttgtccccatcaaagcggtggagtcgtccgggcgtctcgaagtcgctgctcgtttgcagcagcgtactaccgcaattatgcgttttgctgtgcagagcggcttaattgattacaaccctgcgcaaaagattgctggtgcggttgttacggcgaaaagacagcatcgtgctgcgctagaactcaattgcattcctgaattacttcatcgcattgatcactactctggcaggccgttaacccggcttgctgtcgaacttaccttgttagtctttatccgttcaagtgaactgcgatttgcccgctggtcagaagtcgattttgaaacggccatgtggacgattccgggagagcgtgaaccactggaagtagttaagcattctcagcgtggttcgaagatgcggacgccccatcttgtttccttatcgcgtcaggccttatctattctggaaaagatcaaaagcatgaacgggaaccgagagctgattttcgtgggcgatcacgatccgcgtaagaacacggttaacaaggccttgcgtgtgatgggctacgatacgaaggttgaggtttgcgggcatggtttcaggactatggcatgtagttcattgattgaatcagggttgtggtcgaaggatgcggtagaaaggcagatgagtcaccaggagcgtaacactgtgcgtgcggcttatattcataaggcagagcatttgggggagaggaggctgatgctgcagtggtgggcggattatcttgatgcgaataaaatggctgctatcactccatttgactatgcaaagattaatagtccttttcgataa

SEQ ID NO: 23733 - DNA, 1509 bp, Klebsiella pneumoniae
atggagttcagtgtaaaaagcggtagcccggagaagcagcggagcgcctgtatcgtggtcggcgtctttgaaccacgtcgcctctcccccatcgccgaacaactcgataaaatcagcgacggctacatcagcgccctgctgcgtcgcggcgagctggaaggcaaacctggccagacgttattgctgcaccatgtgccaaacattctgtctgagcgcattctgctgattggctgcggcaaagagcgcgagctggatgagcgtcagtataagcaggtcatccagaaaaccatcaataccctgaatgataccggctcaatggaagccgtctgcttcctgaccgagctgcacgtcaaaggccgtaacaactactggaaagttcgccaggcggttgaaaccgccaaagagacgctgtacagcttcgaccagctgaagaccaacaaaagcgagccgcgtcgcccgctgcgtaaaatggtctttaacgtgccgacccgtcgcgagctgaccagcggcgaacgcgccattcagcatggcctggcgattgccgccggcatcaaagcggcgaaagatcttggcaatatgccgccgaacatctgtaacgccgcctatctggcttcccaggcgcgtcagctggccgatacctacagcaaaaacgtcatcacccgggtgatcggcgaacagcagatgcgcgagctggggatgaacgcctacctcgccgtcggcaatgggtcgcagaacgagtcgctgatgtcggtcatcgaatataaaggcaacccggctgaggacgcgcgccctatcgtgctggtcggtaaaggcctgaccttcgactccggcggtatctccatcaagcctgccgaaggcatggacgagatgaagtacgacatgtgcggcgcggcggcggtgtacggcgtgatgcggatggttgccgaactgcagctgccgctgaacgtcatcggcgtgctggcgggctgtgaaaacatgcctggcggccgcgcctatcgtccgggtgacgtcctgaccactatgtccggccagacggtggaagtgctgaacaccgacgccgaaggccgcctggtgctgtgcgacgtcctgacctacgttgagcgcttcgagccggaagcggttatcgacgtggcgacgctgaccggggcctgcgtgattgccctcggccatcacatcaccggcctgatgtcgaaccataacccgctggcccatgagctgatcggcgcctccgaactggcgggcgaccgcgcatggcgtttgccgctggccgacgagttccaggatcagctggagtccaattttgccgatatggcgaacattggcggccgtcctggcggcgcgatcaccgccggctgtttcctgtcgcgcttcacccgcaagtacaactgggcgcacctcgacatcgccggtactgcctggcgttccggtaaggccaaaggcgcgaccggtcgtccggtggcgctgctgtcgcagttcctgctcaatcgtgcgggttttaacggcgaagag

SEQ ID NO: 23734 - DNA, 441 bp, Klebsiella pneumoniae
atgaaaaacgcaacgttctatcttctggacaatgacgccaccgtcgacggcctgagcgccgtcgagcagctggtgtgtgacattgccgcagaacgttggcgcaacggcaagcgcgtcctgatcgcctgcgaagatgaacagcaggcgattcgcctcgacgaggcgctgtggtcgcggccgccggaaagctttgtgccgcataatctggcgggcgaaggcccgagaggcggcgcgccggtagagattgcctggccgcaaaagcgcaacagcagcccgcgggatattcttatcagcctgcggctaaactttgcagattttgccaccgctttcacagaagtgatagactttgtcccttacgaagacaatctgaaacaactggcgcgcgaacgctataaggcgtaccgcatggctggtttcaacctgaacacggcaacctggaaa

SEQ ID NO: 23735 - DNA, 2797 bp, Klebsiella pneumoniae
aacctggaaataatggaaaagacatacaacccacaagatatcgaacagccgctttacgagcactgggaaaagcagggctatttcaaaccgaatggtgatgaaagccaggagagcttctgcatcatgatcccgccgccgaacgtcaccggcagtttgcatatgggtcatgccttccagcaaaccatcatggataccatgattcgctaccagcgcatgcagggcaaaaacaccctgtggcaggccggtaccgaccacgcaggtatcgctacccagatggtggttgagcgtaagattgccgctgaagaagggaaaacccgccacgactacggccgcgatgcctttatcgacaaaatctggcagtggaaagcggaatccggcggcaccattacccgtcagatgcgccgtctcggcaactccgtggactgggagcgcgagcgcttcaccatggacgaggggctttccaatgccgtgaaagaagtctttgttcgcctgtacaaagaagacctgatctaccgcggcaaacgcctggttaactgggacccgaaactgcgcaccgccatttccgacctcgaagtggaaaaccgcgaatcgaaaggttccatgtggcacatccgctacccgctggccgatggcgcgaaaaccgctgacggtaaagattacctggtggtcgccaccacccgtccggaaaccctgctgggcgataccggcgtggccgttaacccggaagatccgcgctacaaagatctgattggcaaattcgtggtgctgccgctggttaaccgccgcatcccgatcgtgggcgacgagcacgccgacatggaaaaaggcaccggctgcgtgaagatcaccccggcgcacgactttaacgactacgaagtgggtcgtcgtcaccagctgccgatgatcaacatcctcacctttgacggcgacatccgcgaaagcgcggaagtctacgacaccaaaggcaatgaatccgacgtctactccagcgagatcccggcggagttccagaaactggaacgcttcgcggcgcgtaaagccgttgttgcggcagttgacgccctcggcctgctggaagagatcaaaccgcacgacctgaccgtcccttacggcgatcgcggcggcgtggtgatcgagccgatgctgacggaccagtggtacgtgcgcgcggacgtgctggccaagccagcagtcgaagccgttgaaaacggcgatattcagttcgtgccgaagcagtacgaaaatatgtacttctcctggatgcgcgatattcaggactggtgtatctcccgtcagctgtggtggggtcaccgcatcccggcatggtatgacaacgacggcaacgtctacgtaggccgtagcgaagacgaagtgcgtcaggaaaacaacctgagcgccgacgttgccctgcgtcaggatgaagacgttctcgatacctggttctcctccgcgctgtggaccttctccaccctcggctggccggaaaacaccgacgccctgcgtcagttccacccgaccagcgtaatggtgtccggcttcgacattatcttcttctggattgcccgcatgatcatgatgaccatgcacttcatcaaagatgaaaacggcaagccgcaggttccgtttaagaccgtctacatgaccggccttatccgcgacgacgaaggccagaagatgtccaaatccaagggtaacgtcattgacccgctggatatggttgacggtatcaccctgccggagctgctggagaaacgtaccggcaacatgatgcagccgcagctggcggaaaaaatccgcaagcgcaccgagaaacagttcccgaacggcatcgagccgcacggcaccgacgccctgcgcttcaccctggcggcgctggcctctaccggccgcgacatcaactgggatatgaagcgtctggaaggttaccgtaacttctgtaataagctgtggaacgccagccgcttcgtgctgatgaacaccgaagatcaggattgcggcttcaacggcggcgaaatggtgctctccctggccgaccgctggatcatcgcggaattcaaccacaccgtgaaagcgtatcgcgaagcgctggataacttccgcttcgatatcgccgccggtatcctgtatgaattcacctggaaccagttctgcgactggtacctggagctgaccaagccggttatgaacggtggcagcgaagcggagctgcgcgggactcgccatacgctggtaaccgtgctggaaggtctgctgcgcctggcgcatccgatcattccgttcattaccgaaaccatctggcagcgcgtgaaagcgatctgcgggatcaccgccgacaccatcatgctgcagccgttcccgcagtacgatgcttctcaggtggatgacgcggcgctggccgacaccgaatggctgaagcaggcgatcgtcgccgtgcgtaacatccgtgcggaaatgaacatcgctccgggcaaaccgctggaactgctgctgcgcggctgcagcaaagaggccgagcgtcgtgtgaacgacaaccgcagcttcctgctgaacctggcgcgtctggaaagcattaccgtgctgcctgccgatgataaaggtccggtctcggtgaccaagattgtcgacggcgccgagctgctgatcccgatggcgggcctcatcaataaagaagatgagctggcgcgtctggcgaaagaagtggccaaaatcgaaggtgaaattggccgcatcgagagcaagctggccaagcgaaggctttgtcgcccgcgcgccggaagcagtgatcgctaaagagcgc

SEQ ID NO: 23736 - DNA, 1464 bp, Klebsiella pneumoniae
aacttcaaactcgcgccttgccctgactctggtttgtggttcctggggtggtaactccatctctgaaaacgttggtccgaaacacctgatcaacaagaaaaccgttgctaagcgagctgaaaacatgttgtggcacaacttccgaaatctatctacttccgtcgtggctccctgccaatcgcactggatgaagtgattaccgatggtcacaaacgcgcgctgatcgtgactgaccgcttcctgttcaacaacggctatgccgatcagatcacttccgtactgaaagctgcgggtgttgagacggaagtcttcttcgaagttgaagctgacccgacgctgaccatcgtacgtaaaggtgccgacctggcgaactcctttaaaccagacgtgatcatcgccctgggcggcggttccccgatggatgcggcgaaaatcatgtgggtcatgtacgaacatccggaaacccacttcgaagaactggcgctgcgctttatggatatccgtaaacgtatctacaagttcccgaaaatgggagtcaaagccaagatggtggcgatcactaccacttccggtaccggttctgaagtgacgccgttcgccgtggtgaccgatgacgcgaccggtcagaaatacccgctggcagactacgcgctgaccccggatatggccattgtcgatgccaacctggtgatggatatgccgaaatcgctgtgtgcgttcggtggtctggatgcggtgactcacgccctggaagcttacgtttccgtactggcttctgaattctctgacggccaggcgctgcaggcgctgaaactgctgaaagagtacctgccggcttcctatcacgaaggttccaagaacccggttgcccgtgagcgcgtacacagtgccgcgactatcgccggtatcgcgttcgctaacgccttcctcggcgtgtgtcactcgatggcgcacaaactgggttcccagttccatattccgcacggtctggccaacgccctgctgatctgcaacgttatccgctataacgcgaatgacaacccgaccaagcagaccgcgttcagccagtacgaccgtccgcaggctcgtcgtcgttacgctgaaatcgccgatcacctgggcctctccgcaccaggcgaccgcaccgcagcgaaaatcgagaaactgctggcatggctggaaagcattaaagctgagctgggtattccgaaatctatccgcgaagctggcgttcaggaagctgacttcctggcccacgttgataaactgtctgaagatgcattcgatgaccagtgcaccggcgctaacccgcgctacccgctgatctccgaactgaaacagatcctgctggatacctactacggccgcgaattcgtcgaaggcgaagccggtgcgaaagccgaagttgctccggtaaaggctgagaaaaaagcgaaaaaatccgcttaaccaacagcgatagca

SEQ ID NO: 23737 - DNA, 699 bp, Klebsiella pneumoniae
atgacaaccttaagctgtaaagtgacctcggtggaggcgattaccgataccgtatatcgtgttcgattagtgccggaagcggcattttccttccgtgccggccagtatctgatggtggtaatggatgagcgcgacaagcgcccgttctccatggcttccacgccggcggaacaggaatttatcgagctgcatatcggcgcctcggagctcaatctgtacgcgatggcggtcatggatcgcattctgaaagagcgtgaaattgaggttgatattccgcatggcgaagcgtggctgcgcgatgacgaagatcgcccactgattctgatcgccggcggtaccggattctcttatgtgcgttctattctgttaagcgcgctggcgcgtaacccggatcgcgatatcgccatttattggggcggccgcgaggctaagcatctgtacgatctggccgagctggaagcgttaagcatcaagcatccgaatctgcgcatcgagccggtggtcgaacagccggaagaagggtggcgtggtcgctccggtacggtactcaccgccgtgctgcaggattacggtacgctggccgagcatgacatctacattgccggtcgttttgagatggccaagatcgctcgcgacctgttctgtaatgagcgcggcgcgcgtgaagatcgcctgtttggcgatgcgtttgcgtttatc

SEQ ID NO: 23738 - DNA, 990 bp, Klebsiella pneumoniae
atgtttgggcagaaaaaggactgggaaacacgagaaaacgcgtttgcggcctttagcatggggccgctgacggatttctggcgacagcgcgaagaagctgaatttaaaggcgtcgacgatgtaccggtacgctttgtccgcttttgcgcgcaacataacgatcgtctggtgttgatttgccccgggcgcattgaaagctacgtgaagtatgctgaagtggcctacgatctctttcactgcggctttgacgtgatgatcattgaccatcgcgggcagggacgctcgggccgcctgctctcagatacccaccgcggacacgtggttaacttcagcgactatgttgatgacctggccgcgctctggcagcagcaggtggttcctggacactggcgaaaacggtttatccttgcccattctatgggcggagcgattgccacgctttttctgcaacgttaccgggcgcattgcgatgcaatagcgctctgcgcgccgatgttcgggattatcattcggctgccggactggatggtgcgccatattctcgactgggctgagggccatcagcgcattcgcgaagagtatgccatcggcaccgggcgctggcgggcgctgccttttgccgttaacgtgctgacgcacagtcggcaacgctatcgtcgcaacctgcgcttctatgccgatgagccgcggctgcaggtcggcggtccgacctggcactgggtgcgtgagggcatgctggccggcgacgaagtgctggcgaatgtggaaaaagataccgccccgacgctgcttttacaggcggaggaggagcgggtggtcgataatctgatgcacgaccgctattgcgaattacgggccgctgccggccatccttgtgagggcggtaaaccgctcgtcattgaaggggcatatcatgagatcctttttgaaaaggacgctatgcgctcagtcgcgctcaatgccatcgtcgagtttttcaatcgacatact

SEQ ID NO: 23739 - DNA, 798 bp, Klebsiella pneumoniae
atgtaccaggttgttgcgtctgatttagacggcacgctgctttcccccgatcatttcctgaccccgtatgccaaagagacgctgaagctgcttaccgcccgtgggatcaatttcgtcttcgccaccggccgtcactacatcgacgtcgggcaaatccgcgataatctcggcatccggtcgtacatgatcacctctaacggcgcccgcgttcacgatagcgatggtcagcaaatctttgcccataacctcgatcgcgatattgccgccgacctgtttgagatcgtgcgtaacgacccgaaaatcgtcactaacgtttatcgggaagacgagtggtatatgaaccgccatcgtccggaagagatgcgcttcttcaaggaggcggtgtttaactacaagctgtatgagccgggcgaactggatccgcaggggatcagcaaagtattctttacctgcgaggatcatgagcatctgctgccgctggagcaggcgatgaacgcccgctggggcgatcgggtgaacgtcagcttctccaccttaacctgcctggaagttatggcgggtggggtatcgaaggggcatgcgctggaggcggtggcgaagatgctcggctacactctttccgattgcatcgccttcggcgacggtatgaacgacgctgagatgctgtcgatggctggcaaaggctgcatcatggccaacgcccaccagcggctgaaggatctgcatccggaactggaagtgatcggcagtaacgccgatgatgctgtcccgcactacctgcgtaagctatacctcgac

SEQ ID NO: 23740 - DNA, 1361 bp, Klebsiella pneumoniae
accaaagcgcgtgccgatcaaattcgggccgatctcatcgaggaacggcgagagttggatattgagctgagcgccgcccgccagcaactggcgcaggaggcccactggcgtgaggagtgtgagctgctgaacaacgagctgcgcagcctacgggatatcaatacctcgctcgaggccgatctccgtgaggtcaccacccggctcgaatccacccagctgcatgcggaagataagatccgccagatgatgaacagcgagcagcgccttagcgagcagtttgaaaacctcgccaaccgtattttcgaacacagcaaccggcgggtcgatgagcaaaaccgccagagcctgcatggcctgctgacgccgctacgcgaacagctggacgggttccgccgccaggtgcaggagagctttggccaggaggcgcgtgaaagacataccctggcgcatgagatccgcaatctgcagcagttgaacgcgcagatggcacaggaggcgctgaacctgaccaaagcgctgaagggggataacaaaactcagggcaactggggggaagtggtcttaacccgcgtgctggaggcctccggcctgcgcgaaggctatgagtaccagactcaggtcagtattgagaccgacaaccgctcgcggatgcagccggacgttatcgtgcgcctgccgcagggtaaggacgtggtgatcgacgccaaaatgaccctggtcgcctatgagcgctatttcaacgccgaagacgactacacccgcgaagtcgcgctgcaggaacaccttgcctcggtgcgtaaccatattcgcctgctgggacgcaaggattatcaacagctgcctggcctgcgctcgctcgactatgtgctgatgtttattcccgttgagccggcgttcctgctggccatcgatcgccagcctgagctcatcagcgaggcgttgcaaaataatattatgctggttagcccgacgacgctgctggtagccctgcgcactatcgccaatctgtggcgctatgagcaccagagtcgtaacgcgcaaaagattgccgagcgggcggggcgcctttacgacaaaatgcgcctgtttgtggatgatatgtccgccatcggccagagcctggataaggcgcaagagagctatcgccaggcgatgaaaaagctcgcttccgggcgtggcaatctgctggcccaggcggaggcctttcgcggcctgggcgtggaggtcaagcgcgggattaatcctgatttagtcgaacaagctacggctcaggacgagcaatatcgtctcgaagatgaggataacctgccggaaaatgacgcattttcacccgactctgccgagacggtgcgtagccggga

SEQ ID NO: 23741 - DNA, 753 bp, Klebsiella pneumoniae
atggttgaggattcacaagaaacgacgcactttggctttcagacggtcgctaaagagcagaaagcagatatggtggcgcatgtattccattctgtcgccgcaaaatatgatgtgatgaacgacctgatgtcgtttgggatccatcgtttgtggaagcgtttcaccatcgactgcagcggcgtacgtcgcgggcagaccgtgctggatctggctggtggtaccggtgatttgacggccaagttctcccgcctggtaggggaaaccggccgcgtcatgcttgctgatatcaatgattctatgctcaaaatgggccgcgaaaagctgcgcaatatcggcatcgtaggcaacgttgagtatgttcaggccaacgcggaagccctgccttttgctgataatacctttgactgcatcaccatctctttcggtctgcgtaacgtgaccgacaaagagaaagcgctgcgttcgatgtatcgcgtgctgaagccgggcggacgtctgctggtgctggagttttctaaacccattatcgaaccgctgagcaaagcctacgacgcttactccttccatatcctgccgaaggtgggcgagctggtggcaaaagatggcgacagctatcgctacctggcggaatctattcgtatgcatccggaccaggaaaccctgaaagggatgatgcaggatgcgggcttcgaaaacgtggattactacaacctgacggcgggtatcgttgctttgcatcgcggttacaagttc

SEQ ID NO: 23742 - DNA, 900 bp, Klebsiella pneumoniae
atgaccgattctcctctcttctccgccgtcgcccgctttcttcgccatcttggcgttgaacgccagctcagcccgatcacgttactgaattaccagcgacagctggacgcgctgatcgccctggcggatgaggcgggcctgaaaagctggtcgcagtgcgatgccgctcaggtgcgaagctttgcggtgcgtagtcgccgcgcggggttaggcccggcaagcctggcgcttcgcctgtcggcgctgcgcagtttcttcgactggctggtcggccagggcgagctcagcgccaatccggcgaaggggattgccgcgccgaaaattccccgccacctgccaaaaaatattgacgtcgatgacgtcaatcgactgctggatatcgatctcaacgatccgctggcggtgcgcgatcgggcgatgctggaggtgatgtacggcgcgggattgcgtttgtccgaactggtcaacctggatatcaaacacctcgatctcgaaagcggtgaggtctgggtgatgggcaaaggcagcaaggagcgtcgtttgccgatcggtcgcaacgcggtggtatggattgagcactggctggatttgcgcggcctgttcggtaccgatgacgacgcgctgtttttgtcgaagctgggcaaacgtatttcggcgcgcaacgtacagaagcgattcgccgagtggggcattaagcaggggctgaacagccatgtgcacccgcacaagctgcgccactcctttgccacccatatgctggagtcgagcggcgatctgcgcggcgtgcaggagctgctggggcatgctaacctctccaccacccaaatctatacccatcttgattttcaacaccttgcctcggtgtacgatgccgcgcatccgcgcgctaaacgggggaaa

SEQ ID NO: 23743 - DNA, 714 bp, Klebsiella pneumoniae
atgcgtttttaccgacctctgggccagatttccgcgctgacgtttgacctggacgataccctttacgataaccgcccggtgattgaccggacgatgcacgagtcgctggcctttgtgcgcagctaccatccttcgctcagccagttcgacgcccatgagcttaatcagctgcgtcagacgctgctggctgctgaacctgagatttatcatgacgtgaccgtctggcgccaccgtgcgctggagttaggtatgcgtaatgccgggctctccgccgaagcggcgaaagcgggggccgatgcggcgatggaacacttcgcccactggcgcagccgcgtcgatgtcccgcaggaaacgcacgatacgctggcgaagctggcgaagaagtggccgctggtggcgattaccaatggcaacgcccgcccggaactgttcggtctgagcgactatttccgcttcgtgctgcgcgccgggccggatggccgctccaagccgtttgccgacatgtaccaccttgcggcggagcgtctgaatgtgccgctcgggcagattctgcacgtcggcgatgatctgaccaccgacgtggccggcgctattcgctgtgggatgcaggcctgctggatcaaaccgcaaggcgcggacctgatgcacaccgcggacagccgcctgctgccgcatattgaaatttcacggttggcatctctgacctcgctgata

SEQ ID NO: 23744 - DNA, 2166 bp, Klebsiella pneumoniae
gtgccaatggacgtttcttacctgctcgacagccttaatgacaaacagcgtgaagccgtagcggcctcgcgcaccaatatgctggttctggcaggggcgggcagtggtaagacgcgcgttctggtgcaccgtatcgcctggctgctgagcgtggagaactgttccccgtattccattatggcggtgacctttaccaacaaagcggcggcggagatgcgtcaccgtatcggccagctgatgggcaccacccagggcggcatgtgggtgggcaccttccacggcctggcgcaccgtttgctgcgcgcgcaccatctggatgccaacctgccgcaggacttccaaatcctcgacagcgaagaccagctgcgtctgctgaagcgtctgattaaggcgatgaacctcgatgagaaacagtggccgccgcgccaggcaatgtggtacatcaacagccagaaagatgaaggactgcgcccgcatcatattcagagctacggcaatccggtcgagcagacctggcagaaggtctatcaggcctatcaggaagcctgcgaccgcgccgggctggtggacttcgccgagctgctgctgcgcgcccacgagctgtggctgaacaaaccgcatatcctgcagcactaccgcgagcgcttcaccaatattctcgtcgatgaattccaggataccaacaacattcagtacgcctggatccgcctgctggcgggcgataccggcaaggtgatgatcgtcggcgatgacgatcagtctatctatggctggcgcggcgcgcaggtcgagaacattcagcgcttccttaacgacttccccggcgcggaaaccatccgcctggagcagaactatcgctcgaccagcaatattctcagcgctgccaacgccctgattgaaaacaacaacggtcggctgggcaaaaagctgtggaccgacggcgccgacggcgagccgatttcgctgtactgcgccttcaacgatctcgacgaagcgcgctttgtggtgaaccgaattaaaacctggcaggagaacggcggcgcgctggagcaatgcgccattctctatcgcagtaacgcccagtcgcgcgtgctggaagaggccctcctgcaggccagtatgccgtaccgtatctacggcggcatgcgcttcttcgagcgtcaggaaatcaaagacgcgctctcttacctgcgccttatcgccaaccgcaacgacgacgcggcctttgagcgcgtagtcaatacgccgacccgcggcattggcgaccgcacgctggacgtggtgcgccagacgtcgcgcgatcgccagctgacgctatggcaggccagtcgcgagctattgaaagaaaaagcgctggccggtcgcgccgccagcgccctgcagcgctttatggagctgattgacgcgctggcgcaggagaccaccgatatgccgctgcacgttcagaccgatcgggtgattaaagactccggcctgcgcgcgatgtacgagcaggagaaaggcgagaagggccagacccgtattgaaaacttagaggagttggtgacggcgacgcgccagttcagctacaacgaagaagatgaagatctgatgccgctgcaggcgttcctctcccacgccgcgctggaagcgggcgaggggcaggcggacacctggcaggacgcggttcagctgatgaccctgcactcggcgaaagggctggagttcccgcaggtgttcatcgtcggcgtcgaagaagggatgttcccgagccagatggcccttgatgaaggcggccgcctggaagaggagcgtcgcctggcctacgtcggcgtaacgcgcgccatgcagaagctgacgctgacctatgcggaaacccgccgtctgtacgggaaagaggtttatcaccgcccgtcgcgctttatcggcgagctgccgcaggagtgcgtagaagaagtgcgtctgcgagccacggtgagccgcccggtaaaccatcagcgactgggcgcgccgattgccgagagcgataccggctacaagttaggccagcgcgtacggcatccgaagtttggcgaaggcactattgtcaacctcgaaggcagcggcgagcacagccgactgcaggtggcttttcagggccagggaatcaaatggctggtggcggcttacgcccggctggaggcagtg

SEQ ID NO: 23745 - DNA, 1824 bp, Klebsiella pneumoniae
gtggcacaggcggaagtattaaatcaggaatcgctggctaagcaggttttacaagagaccttcggctaccagcagttccgtcctggccaggaaacgattatcgagacggcgcttgaaggccgggactgcctggtggtcatgccgaccggtggcggcaagtcgctgtgctatcaggtgccggcgctggtcatgggcggtctgacggtcgtggtctcaccgctgatctcgctgatgaaggaccaggtcgatcagctgctggccaacggcgtggcggcggcttgtctgaactcgacgcaaagccgcgagcagcagcaggaggtgatggccggctgccgcagcgggcaggttcgtctgctgtatatcgcgccggaacggctgatgctggataactttcttgagcatctggcgaactggaacctggcgatgctggcggtagacgaggcgcactgtatctcgcagtggggccatgacttccgtccggaatatgccgcgctgggccagctgcgtcagcggatgccgcagatcccgtttatggcgttgaccgccaccgccgatgataccacccgccgcgatatcgtccgcctgctggggcttaacgatccgctgattcaggtcagcagcttcgaccggccaaacatccgctatatgctgatggagaaattcaagccgctcgatcagctgatgcgctacgttcaggaccagcgcggcaaatcgggcattatctactgcaacagccgttcgaaagtggaagacaccgccgccaggctgcaaagccgcggtattagcgcggcggcttaccatgccggtctggaaaacgacgtgcgcgccgaggtgcaggagaaattccagcgcgacgatctgcagatcgtggtggcgacggtggccttcgggatgggcattaacaagccgaacgtccgctttgtggtgcattttgatattccgcgcaatatagaatcctactatcaggagaccggccgcgccgggcgtgatggtctgccggcggaagcgatgctgttttacgatccggcggatatggcgtggctgcgccgctgtctggaagaaaaacccgccgggccgctacaggatatcgaacggcataagctgaatgcgatgggggcgtttgccgaagcgcagacctgtcgccgtctggtgctgctgaactattttggcgaagggcgtcaggagccgtgcggcaactgcgatatctgtcttgacccgccaaagcagtacgatggcttaatggacgcccgcaaggcgctttcaacgatttaccgggtcaatcaacgcttcggaatgggttacgtggtggaggtcctgcgcggggccaacaaccagcgcatccgagagatgggccacgataagctgccggtttacggtatcggccgggagcaaagtcacgagcactgggtgagcgtgatccgccagctgatccaccttgggctggtgacgcagaatatcgcccagcactccgcgctgcagctgaccgaagccgcgcgaccggtgctgcgtggcgaagttccgctgcagctcgccgtgccgcgtatcgtggcgctgaagccaaaggcgatgcagaaatcctttggcggcaattacgaccgtaaactgttcgccaagctgcgcaaattacgtaaagcgatcgccgacgaagagaacatcccgccatatgtggtcttcaacgacgcgacgcttatcgagatggccgaacaatcgccgctgaccgccggcgaaatgctcagcgtcaacggcgtggggacacgcaagctcgagcgtttcgggaagccgtttatggcgctgatccgggcgcatgttgatggcgacgatgag

SEQ ID NO: 23746 - DNA, 501 bp, Klebsiella pneumoniae
atgagtaccgcaaaactggttaaatcaaaagcgtctaatctggtctatacccgcaacgatgtcgctgacagcgaaaagaaagcgaccattgagctgttgaatcgccaggtgatccagttcattgacctgtcacttatcaccaagcaggcacactggaatatgcgcggtgcgaactttatcgccgtgcacgaaatgctggatggcttccgtaccgcgctgaccgaacatctggacaccatggccgagcgcgcggtgcagctgggcggcgtcgccctgggtaccactcaggtcattaacagcaaaaccccgctgcagagctacccgctggacatccatcacgttcaggatcacctgaaagccctggctgaccgctacgcggtagtggcgaacgatgtgcgtaaggcgatcgacgaagcaaaagacgaagacactgcagatatcttcaccgcggcttcccgcgatctggataaattcctgtggttcattgaagccaacatcgag

SEQ ID NO: 23747 - DNA, 462 bp, Klebsiella pneumoniae
gtggcgcaggtcgatttaaccggcgcgctgttcgccctcggcgccggggcgtgctgggcggtctatattctgaccggacagcgtgccggtgaagagcatggtccagccacggtagcgatggggtcgctcatcgcctcgctggtgtttgtgccgttaggtatggcgcaggccaccgatacgctgtggcagtggtcgctgctgccgctgggtttggggatcgcgattctctccaccgcgctgccctactccctcgagatgatggccctgacgcgcttgccgacgcgcaccttcggcacgctgatgagccttgagccagcgttagcagccctctccggtatgatcttcctcggtgaaacgctgaagctctcccagaccctggcgctcggcgcgatcattatcgcctcgatgggcgccacgctgactatgcaacggcagagtaaagtcgagcaggtcgatatcaat

SEQ ID NO: 23748 - DNA, 990 bp, Klebsiella pneumoniae
atgagccagagtcaaccccgtttaaaaacgtcggcgatgatcgcctcgattgctgatgaaggccaggcgaccgtccctgcgcccttcggcgtcgcgctgtcaaaactggcggcgcagcgcccggacatcgtcggcatgactgcggatctgtcaaaatataccgacctgcatattttcgcccaggccttcccggatcgctttttccagatgggcatggccgaacaactgctgatggcggcggcaggggggatggcgaaggagggatttattcctttcgccaccacctatgccgcctttgcaacccgtcgcgcctatgattttattcaccaggtcatcgccgaagagcatctgaacgtgaagatctgcgcggcgctgccgggcctgacgaccggctatggccccagccatcaggccaccgaagatctggcgatcatgcgcggtatccccgggatggttatcgtcgatccttgcgatgcgctggagatagagcaggcggtaccggccattgccgatcaccaggggccggtgtatatgcgtctgctgcgcggtaaggtgccgctggtgctggataaatatgactatcagttcgaactgggtaaggctaagctgctggaggacggcaacgatgtgctgattatctcctccgggctgatgaccatgcgcgcgctggaggcggttgaaaagctgcgggccgataatatcggcgtggcggtcctgcacgtgccgaccatcaaaccgctggatgagaaagcgattattgaacaggcgtcgaagccgggccgcctggtggtaactgcggagaaccacaccgcggtcggcggcctgggggaagcggtggctgcgctgctgatgcgtaagggcgtacgctgtgagctggatagcgtggggctgcccgacgcgttcctgttagccggcgccctgccgaccctccacgatcgctacggcatctccaccgcgaagattgtcgaaaaaattaagtatcgtctgcgt

SEQ ID NO: 23749 - DNA, 903 bp, Klebsiella pneumoniae
atgcgcaatcgtacattcgctgacctcgatcgggtggtagcgctcggcggcgggcatggtttgggccgggtgatgtcctccctctcctcgctcggttcacggctgaccggcattgtcaccaccaccgataacgggggttccaccgggcggatccgtcgttcggaaggtggcattgcctggggcgatatgcgcaattgcatcaaccagttaattgccgagccgagcgtagcgtcggcgatgtttgagtatcgttttggcggtaacggcgagctttccggacataacctcggaaatttgatgttaaaggcgctggatcacctgagcgtgcggccgttagaggcgatcaatttgatcagaaacctgctgaaagtggacgctttcctgatcccgatgtcagaacaaccggtggatttgatggcgctcgatcatgaaggccatgaagtttatggcgaagtgaatattgatcagcttgataagatgccgcaggagctgatgctcaccccgccggtaccggccacccgcgaggcggtggaggctatcgccgaagccgatttgatcctcattgggccgggcagtttttacaccagcctgctgccgatcctgttgctcgacgagatggcccaggcgttgcgccgcaccccggcgccgatggtttttatcgataacctcggcaaagagcatagcccggccgcgaggctgtcgctggcggagcgcatcgcgattatggagcgctatgtaggcaagcgggtggtggatgcggtgatcgccggtccaaaagccgatatcagcggcatcgacgaccggttggtgatccagaggccgctggaggccagcgacgttccttatcgtcatgaccgggcgctgctccgcggggcgctggagaaagcgatccagctgccgggc

SEQ ID NO: 23750 - DNA, 987 bp, Klebsiella pneumoniae
atggcctcacagcttaccgatgcatacgcgcgtaagttttattacctgcgtctgtcgattaccgatgtgtgcaacttccgttgcacctactgcctgccgaacggttacaaacccggcgccgtcaataacaatggctttctcagcgtagacgaagtacgccgggttacgcgcgctttctccgcgctgggcaccgaaaaagttcgcctcaccggtggggaaccctccctgcgccgcgacttcaccgagattattgccgccgtgcgtgaaaacccggcgatccgtcagattgcggtcactaccaacggttaccgcctggcgcgcgatgtcgaacgctggcgcgatgccggcctgacggcgattaacgtcagcgttgatagcctcgacgcccgccagttccatgccatcaccggccaggataagttccaccaggtgatggacggcattgacgccgccttcgccgccggctttgacaaggtaaaggtgaataccgtgctgatgcgtgatgttaaccatcaccagctcgataccttcctcgcgtggatccaaccccgccgtatccagctgcgctttattgagctgatggaaaccggtgaaggcagcgacctgttccgccgtcaccatctctccggcatggtgctgcgcgatgaactgctgcgccgcggctggatccatcagatccgccagcgcagcgatggcccggcgcaggtcttttgtcacccggactacgccggcgagatcggcctcatcatgccgtatgaaaaagacttctgcgccacctgcaatcggctgcgcgtctcgtccgttggcaaactgcacctgtgcctgtttggcgaaggcggcgtcgacctgcgcgacctgatggccgaagaccagcagcaggccgcgctggaggcgcggatcgccgaagccttaacccataaaaagcagacccatttcctgcatcagggcaacaccggtattacgcagaacctgtcctatattggcggt

SEQ ID NO: 23751 - DNA, 510 bp, Klebsiella pneumoniae
atgagccaggctagcgctgagtttatcccgacccgtattgctattcttaccgtttccagccgtcgcggcgaagaggacgacacttccggtcactggctgcgcgaggcggcgcaggaggcggggcaccaagtcgtcgagaaggcgatcgtcaaagagaatcgctacgccatccgcgctcaggtatcggcgtggatagccagcgataacgtgcaggtggtgctgatcaccggcggcaccggttttaccgacggcgatcaggcgccggaagcgctgctgccgctgtttgatcgtgaggtcgaaggctttggcgaagtgttccgcatgctgtcgttcgaagagatcggcacctcgacgctgcagtcccgggccgtggccggcgtcgccaaccgcacgctgattttcgccatgccgggctcaaccaaagcctgccgtacggcgtgggacaacatcatcgccccgcagcttgatgcccgcacccgtccgtgtaacttcattccacacctgaagaaa

SEQ ID NO: 23752 - DNA, 612 bp, Klebsiella pneumoniae
atgtacttttatcaaccttcgcagggccacggcctgccgcatgacccgctgaacgcgataatcgggcctcgcccgataggctggatcgcctcccaggacgccgagggccagcgtaatctggcgccatacagcttttttaactgctttaactatcggccgccaatcattggtttcgccagcagcggctggaaagacagcgtgcgaaatatcgtcgaaacaaaggagtttgtctggaacctggcgacgcgaccgctggccatggcgatgaatgaaacgtcagcctcgattccgcaccatgaggacgaattcgtgcgcgccggcctcaacgccgccgccagccgccttgtcagcgctccacgggtcgcggagagtccggtgaactttgagtgccgtctgtcgcagtgtattcaactcaccaccgccgacggcaaccctgtcgatacgtggctggtgctcggtgaagtggtcgccgtgcatatcgatgaatcactgctggacaacggtatctatcaaaccgcccgggcccagccgatcctgcgcgccggtggcccgagcgcctattacggtattgatgacagcctgcgctttgacatgatccgccctgacgcccgc

SEQ ID NO: 23753 - DNA, 1737 bp, Klebsiella pneumoniae
atgagtgagaccgtcatcgccttaaacggcctgagccgccgttttcccggtatggacaggccagcggtagcgccgctcacctgtacgatccgcgccggctacgtcaccgggctggtggggcccgacggcgcggggaaaaccaccctgatgcgaatgctcgccggattgctcaagcctgatgagggtcgcgccagcgtgataggcttcgacccgctaaaagacgacagcgccctgcacgcggtgctcggctatatgccacagaagttcggcctgtatgaagatctgacggtgatggaaaacctgaccctgtacgccgacctgcgcagcgtcaccggcgaggcgcggaagaaaattttcgaccgcctgctggagttcacctcccttggtccattcaccgaacggctggcaggcaagctttccggcgggatgaagcaaaagctgggcctcgcctgtaccctggtgggcgatccgaaagtactgctgctcgatgagcccggcgtcggcgtcgaccctatctcgcgccgcgagctatggcagatggtgcacgagctggccggcgacggcatgctgatcctgtggagcacctcctatctcgatgaagccgagcagtgtcgcgatgtgctgctgatgaacgaaggcaaactgctctatcaaggggagccgacggcgctgacgcaaaccatggccgggcgcagctttctggtctccagcccgcaggagaacaaccgccgcctgctgcagcgggcgctgaagctgccgcaggttagcgacggggtgatccagggcaaatcggtgcgtctgatcctgaaaaaggacgcgcgcattgaggaagtccagcagcatggcgacatgccgccgctgcaggtggccgacaccgcgccgcgctttgaagatgcgtttatcgacctgctcggcggcgccgggaccgctgaatcgccgttgggggcgattatccatcgcgttgacggcagcaaagaggaaacggtcattgaagcccagtcgttaacgaaaaagtttggtgatttcgccgctaccgaccatgtcgatttccaggttaagcgcggtgaaattttcggcctgctcggccccaacggcgccgggaaatccaccaccttcaaaatgatgtgcggcctgctggtgcccacctccggcaaagcgctggtgctgggaatggatctcaagatcagctctggcaaggcgcgccagcatctgggctatatggcgcaaaaattttcgctgtacggcaacctcagcgtcgagcaaaacctgcgctttttctccggcgtctatggcctgcgcggccgggggcaaaatgaaaaaatcgcccggatgagcgatgcctttggcctgaaaagtatcgcccgccacgccgccgacgagctgccgctcggctacaagcagcggctggcgctggcctgctccctgatgcatgaacccgatattctgtttctcgatgaacccacctccggcgtcgatccccttacccgccgcgagttctggctacatatcaatagcatggttgataaaggcgtgacggtaatggtcaccacccactttatggatgaggcggaatactgcgaccgcatcgggctggtctatcacggcaagcttatcgccagcgggaccccggacgcgctgaaggcccaggcggcggacgacagccagacggacccaaccatggagcaggcgtttattaccctgattaaccgctgggacaaggagaatagccatgggcaa

SEQ ID NO: 23754 - DNA, 720 bp, Klebsiella pneumoniae
gtgattgaatttaaaaacgtctccaagcactttggtccgacccaggtgctacacgatatctctctgaaaattaatcagggtgaagtggtggtcattatcggcccttccggttccggtaaatcaacgatgctgcgctgcatcaataagctggaagagatcaccagcggcgatctgattgtcgatggtctgaaggtcaacgacccgaaggtggacgaacgtctgattcgtcaggaagccgggatggttttccagcagttttatctgttcccgcacctcacggcgctggaaaacgtgatgtttggcccgctgcgggtacgcggcgccagcaagcaggcggcagagaagcaggcgaaagagctgctggcgaaagtcggtctggctgagcgcgcgcatcactatccgtccgaactctccggcggccagcaacagcgtgtggccatcgcccgcgcgctggcggtgaagccgaagatgatgctgtttgatgaaccgacctccgcgctcgacccggagctgcgccatgaagtgctcaaggtgatgcaggacctggcggaagagggcatgacgatggtgattgtgacccacgaaatcggctttgccgaaaaagtggcctcgcgactaatctttatcgacaaaggacgaattgctgaagacggcaatccccaggagctggtgaagaacccgcccagcccgcgcctgcgtgaattcctgcaacacgtcgcc

SEQ ID NO: 23755 - DNA, 657 bp, Klebsiella pneumoniae
atgcagtttgactggagtgccatctggcctgccattccgattttgctggaaggcgccaaaatgacgctgtggatttccgtcctcggcctggccggcggtctgataattggtctggtggccggtttcgcccgctgcttcggcggctggatcgccaaccacatcgcgctggtctttattgaaatcattcgcggcaccccgattgtggtgcaggttatgttcatctactttgcgctgccgatggcctttagcgatctgcgcatcgaccccttctccgcggcggtagtgaccatcatgataaactcgggcgcctatatcgcggaaatcacccgcggcgcggtgctctccatacataaaggcttccgcgaagcgggcctggcgcttggcctgtcgcgtcgcgaaaccattcgccacgtgatcctgccgctggcgctgcgccgcatgctgccgccgctgggcaaccagtggatcatcagcatcaaggatacctcgctgttcatcgtcatcggcgtcgccgaactgacccgtcagggacaggagatcatcgcgggcaacttccgcgcgctggaaatctggagcgccgtagccgtgatctacctgattatcaccctggtcctgagctttattctgcgtcgtcttgaaagaaggatgaaaatcctg

SEQ ID NO: 23756 - DNA, 708 bp, Klebsiella pneumoniae
atgattacccttcccgctcgcccggaatccctgaccttcgcgccgcagcagagcgcgctgattgtggtcgatatgcagaacgcctacgccagccagggcggttatctggatctcgccggctttgacgtctccgctacccggccggttatcgacaatattaataccgccgtcgccgccgctcgcgccgcgggtatgttgattatctggttccagaatggctgggatgatcagtatgttgaagccggcggcccgggctcgccgaactatcacaaatccaacgcgctgaaaacgatgcgtcagcgtccggagctgcagggcaagctgctggcgaaaggcggctgggattatcagctggtggacgagctgacgccgcaggaaggcgatatcgtgttgccgaaaccgcgctacagcggcttctttaacaccccgctcgacagcattttgcgcagccgcggcatacgccacctggtgttcaccgggatcgccaccaacgtctgcgtcgaatcgacgctgcgcgatggcttctttctcgaatacttcggcatcgtgctggaggatgccacccatcaggccggcccggccttcgcccagcaggcggcgctgttcaatattgaaacctttttcggctgggtcagcgacgtcgagagcttctgccacgcgctgtcccccgccaccccgctggctttagccaaggagaaacgttatgcc

SEQ ID NO: 23757 - DNA, 1320 bp, Klebsiella pneumoniae
atggcactcttcgattttcctcgctggaagctgacctcccccgccgccgaatccggcgttgtcgcccccgatgaacgcttgtcggccgggcaaacgctggtgatgggcgtgcagcacgccgttgcgatgttcggcgcgacggtgctgatgccgttgttgatggggctcgacccgaacctgtctattctgatgtcgggcgtcggcaccctgctgttctttgtcgtcaccggcggacgggtgccgagctatctcggctccagcgccgcttttgtcggggtggtgatcgccattaccggctttaacggccaggggctgaaccctcatctgagcgtcgcccttggcgggatcatcgcctgcgggctggtctacaccctgattggtctggtggtgatgaagatcggcacccgctggatcgagcgcctgatgccgccggtggtgaccggcgcggtggtgatggctatcggcctgaacctggcgccgattgccgtgcgcagcgtctccgccagcgccttcgacagctggatggcggtgttaactgtgctctgcatcggcatagtggcggtatttacccgcgggatgctgcagcgactgctgatcctggtcggcctgatcgtcgcctgcgcgctgtacgccctgctggctaacggcctgggccttggcaaaccgctggacttctcccccctcgcccaggcggcgtggttcgggctgccgcactttacccccccatcctttaacggccaggcgatgatgttgattgcgccggtcgcggtgatcctggtggccgagaacctcgggcacctgaaggccgtcgccgggatgaccgggcgcaatatggacccgtacatggggcgcgccttcgtcggcgacgggctggcgaccatgctctccggttcggtgggcggcagcggggtcaccacctatgcggagaacatcggcgtcatggcggtgaccaaggtctactcaacgctggtgtttgtcgccgcggcgctgattgccatgctgttgggtttctcgccgaagttcggcgcattaatccacaccattcccgggccggtgatcggcggcgcctcgatcgtggtatttggcttaattgccgtcgccggggcgcggatctgggtgcaaaaccgggtggatctgagtcaaaacagcaatttgatcatggtgtcggtgaccctggtgctgggcgccggcgatttcgcgctgtcgctgggcggctttacgctgggcgggattggcacggccaccttcggggcgatcctgctgcacgcgctgcttcatcgcgggacgcgcgaggcgaaggaggccagggtaacgccggtg

SEQ ID NO: 23758 - DNA, 330 bp, Klebsiella pneumoniae
atgcagcgaatcattattcccacccattacgttcacacccgcagcacgccgctgtggaccaaagagaccgccccggcctctatctggcgccgccatctggatgccggcacccggcagggcgtctaccctcgtctctcagtgatgcagggggcgatccgctatctcggctatgccgatgaaaccagccccgagcccgttgaaaccctgactattgaagccggccagtttggcgtctttccgccggagaagtggcactgtattgaggccctctcagaggacacggtttttaatgtcgacttttatgttgatccaaaaattcttatcgaggga

SEQ ID NO: 23759 - DNA, 249 bp, Klebsiella pneumoniae
atggtgttgtatattccacagcaggcggtggaggccgttaatgacctgctgagcaagttaccggacgacagggaagagggggagtttctgttgacggtcaccaataacaataacggcgtctcggttgataaaaccttttcctcgctggcggcgctgcgcgacccactcaccgcggctgatgcggtgaaggatctgatcaatatcgttcgcggctacgagtccgatgaagagaccaacgtctgcggctgg

SEQ ID NO: 23760 - DNA, 2100 bp, Klebsiella pneumoniae
atgccccgacccatccctctcgaacgttatcgcaacatcggtatctccgcgcatatcgatgccggtaaaaccaccaccaccgagcgcatcctgttttataccgggatgagccataagctgggtgaagtacacgatggcgcggcaaccaccgactggatggcccaggagcaagagcgcgggatcaccattacctcggcggcggtaagctgcttctggccggggatggaccgcagcttcgagccgcaccggatcaatatcatcgacaccccggggcacgtggatttcaccattgaggtggagcgttccatgcgcgtgctcgacggcgcggtgatggtgtatgactccgtcggcggggtgcagccccagtcggagaccgtctggcgccaggcgaataaataccacgttccgcggctggccttcgtcaacaagatggaccgccccggcgcggacttcttccgcgtggtgcagatgatgatcgaccgtctgaaggctaacccggtgccgattgtgatacctattggcgccgaagagcatttcaccggcgtcgtcgacctggtgaaaatgcgcgccatcctgtgggatgacgccacccagggcatgacctttagctatggtccagtcccagacgatctgctggcgacggcgcagcagtggcgggagaaaatggtctcggcggcggcggaagccagcgatgagctgatggataaatacctggaaaccggtgagctggacgaggcggagatcgtcgccggtctgcgccaacgcacggtgaagggggagatccaggcggtgctctgcgggagcgcctttaaaaacaaaggcgtgcagcgcatgctcgatgcggtggtggagctgatgccgtcgccgctggatattccggcgatacagggcgttgatgagcaaggccagccggcggaacgccatccgagcgacgatgagccgctgtcggcgctggcgttcaaactgatgaccgacccctacgtcggccagttgacctttatccgcgtctactccgggacgctgaagaaaggcgatgcggtgtggaacccggtgaagggcaagaaagagcgcatcgggcgtatcgtgctgatgcaggccaacgaccgtcacgaagttgacgaactgcacgccggggatatcgcggcctgcgtcggtctgaaggatgtgaccaccggcgatacgttatgcgatccggatgcggtgattaccctcgaacggatggagtttccggagccggtgatttcgctggcgattgagccgaagaccaaagcggaccaggagaaaatgggcatcgcgctgcagcggctggcggcggaagatccgtcgttccgtctgcataccgatgaagagtccggccagacgattatctccggcatgggtgagctgcatctggagatcattgtcgaccggatgaagcgcgagtttggcgtcgaggccaacattggccgtccgcaggtcacctaccgcgaaaccctgcgcaagaaagtgacggacgtggaaggcaaatttgtgcgccagtccggcggcaaagggcagtatggccacgtcgtactgaccctggagccgctggagccgggcagcggtttcgtcttcgaggacgccaccaaaggcggcgtggtgccgcgcgagtacatcccttccgtggagaaagggctgcgcgaagcgatgggcaccggcgtgctggcgggttatccggtggttgacgtgaaagcgaccctgacctttgggtcgtaccacgacgtggactcctcggagatggcgttccgcatggcggcgatctttggcttccgggaaggcgcgcgcaaagcggatccggtgatccttgagccggtgatgcacgtcgaggtggagacgccggaagagtacgccgggaatattatgggcgatctctcttcccgtcgcgggatggtgcaggggatggaagagcgcttcggcagccagatcatccgcgccgacgtgccgctggcggagatgtttggttattccaccacgctgcgctcgatgtcgcagggacgggcaacctacagcatggagttccaccattacgcggaagcgccgcgtaatgtggcggatgaaatcatcgccagccgcgcgaaaagc

SEQ ID NO: 23761 - DNA, 1182 bp, Klebsiella pneumoniae
atgaaacggcataagaacttcaatttgttgttgatgctggtactgctggtggccgtcggccagatggcgcagaccatttatattccggccatcgccgacatggcggtcgcgctgaacgtccgcgaaggggcggtacaaagcgtgatggcggcctatctgctgacctacggtatttcacagctattctacggcccgctctctgaccgcgtcggtcgccgcccggtgatcctcgtcgggatgtcgatttttatgctggcgacgctggtagctattaccacccatagcctgccggtgctgatcgtcgccagcgccatgcaggggatgggcaccggggtcggcggcgtgatggcgcgcaccctgccccgcgacctgtacgaaggcgctcagctgcgtcatgccaatagcctgttaaatatgggtattctggtcagcccgctgattgccccgctgctcggcggcatcctcgacaccctgtggagctggcgcgcctgctacgctttcctgctggtcctgtgcgccggggtgaccttcagcatggcgaagtggatgccggaaacgcgcccggaaggggcgccgcgcaccaaacttctggccagctacaaaacgctgttcggcaccggcgcctttaactgctatctgctgatgctgatcggcggcctggcggggattgcggtattcgaagcctgctccggggtgctgatgggcgcggtgctcggcctgagcagcatggcggtgagtattctgtttattctgccgatcccggcggcgttcttcggggcgtggtttgccggccggccgaacaagcgtttcccgaccctgatgtggcagtcggtgatatgctgcctgctggcgggtctgatgatgtggatcccagggctgctgggcatcatgaccgtctggaccctgctggtgcctgcggcgctgttcttcttcggcgccgggatgttgttcccgctggccaccagcggcgcgatggagccgttcccgttcctcgccggaaccgccggggcgctggtgggcggcttgcagaatatcggctccggcgtgctggcctggctgtcggcgatgatgccgcaaaccggtcagggcagcctcggcctgctgatgatgctgatgggcctgttgattctgctgtgctggctgccgctggcctcgcgcttcacccaccatcagcagccggta

SEQ ID NO: 23762 - DNA, 1500 bp, Klebsiella pneumoniae
atgaaggccgtcgtctcacgattgctgtcggtcatcggctgcgcctttatcttcgcggccgcctggttctgcctgtggagcatcagtctgcatctggtggaacgcgcggatttagcggtgctgctgtttccctttggcctgcggctggggttaatgctgcaatgcccccgcggctactggccagtgctgctgggaaccgagtggctgcttatcttatggctggcgcaggaggtggcgctggcgcacccgataattttgatgaccggtagcctgctgactctgctgccggtggcgttgatctcgcgctaccggcagcagcgcgactggctgacgctgctgcgtcagggcggggcgttaatggccgccgcgctgctgcaatcgctgccgtggctggcggagggggacgaggggcttaacgccctgctgttgacgctgaccggcggcctgacgctggcgccgacctgcctggttttctggcactatcttaccagcaccgtctggcggccgctggggccggcgctggtggcgcagccggttaactggcgcgggcggcatctgatctggtatctgctgttattcaccattagcctgtggctgcagcttggcctgcccgccgagctctcccgctttaccccgttttgtctggcgctgccgattatcgccctcgcctggcactacggctggcagggcgcgctgatcgccaccctgatgaacgctatcgccttgattgccagccagacctggcacgatcacccggtcgatttattgctttccctgcttgcacagagcctcaccgggctgctgttgggggcggggatccagcggctacgcgagctgaaccagtcattacaaagcgagctggcgcgtaatcgtcggctggcggaacgcctgctggagaccgaagagagcgtgcggcgagacgtcgcccgcgagctccatgatgatatcggccagaccatcaccgcgatccgcacccaggccgggatcgtacagcggctggcgccggacaacgccagcgtgcgccagagcggtcagctgatagaacagctgtcgctgggagtttacgactcggtgcgtagactgctaggccgtctgcgtccgcgtcagctcgacgacctgccgctggagcaggcggtacgttcgttgatgcgcgagatggagctggaggaccgcggcattgtcagccatctcgactggcggattaacgaggcgggactgagcgagaaccagcgcgtgacgctgtttcgcgtttgccaggaggggctgaataatatcgtcaagcacgccagcgccagcgctgtcactctgcagggctggcagcaggatgagcgactaatgctggtgctggaagatgacggttgcggcctgccgccggggtcgaatctgcaggggttcggcctgaccggcatgcgcgagcgcgtgaccgccctgggcggcacactgacgatctcctgcacccacggtacccgggtgtgcgtcaatctaccgctgcgttacgcc

SEQ ID NO: 23763 - DNA, 1561 bp, Klebsiella pneumoniae
agttacctgttagcgttagatgccgggaccggcagcattcgggcggtcattttcgatcttaatggccgccagctggcggtaggccaggccgaatggaaacacctgagcgtcgataacgtccccggctcgatggagttcgaccttaccaccaactggcagctggcctgccagtgcattcgccaggcgctcgacgccgcccggctctctgccgccgacattcaatccgtcgcctgctgttcgatgcgcgaagggatcgtcctctatgaccgcgacggcgaagccatctgggcctgcgccaacgttgatgcccgcgccagccgcgaagtggcggagcttaaggagatccacgactatcgttttgaatccgaggtgtacgaggtctcgggacaaaccctggcgcttagcgccatgccgcgcctgctgtggttggcgcaccaccgccccgatatctaccgcaaagcggcaaccatcaccatgatcagcgactggctggcggcgaagctatccggcgagctggcggtcgacccgtcaaacgccggcaccaccggcatgctcgatctgttcagccgcgactggcgtccggcgctgctggatatggccggactgcgcgccgatatgctgtcgccggtcaaagagaccggtaccctgctgggcgccgtcaccgaagcggcggcgcagcagagcggcctgcgcgccgggacgccggtggtgatgggcggcggcgacgtccagctcggctgcctgggccttggggtggtgcgcgccgggcaaactgcggtactcggcggcactttctggcagcaggtggtcaacctgccgcaggtgcgcaccgatccgcagatgaatattcgtgttaatcctcacgtgattcccggcatggcgcaggcggaatcgatcagcttctttaccggcctgaccatgcgctggtttcgcgacgccttctgcgctgaagaaaaactaattgccgagcggctcggcgtcgatgcctattcgctgctggaggagatggccagccgcgtccccgccggttcccacggcgtgatgcctattttttccgacgctatgcactttaagcagtggtaccacgccgcgccgtcgtttattaacctctccatcgatccggagaagtgcaataaagcgaccctgttccgcgcgctggaagagaacgcggcgattgtctccgcctgcaacctggcccagatttcgcagttctccggggtgacattcgagagcctggtgtttgccggcggcggctctaaaggcgcgctgtggagccagatcctcagcgatgtcaccggcctgccggtgcgggtgccggtcgtccgcgaagccactgctctgggctgcgccatcgccgccggaaccggcgccgggctgtatgacgatatggccagcaccggagagcggttagtgagctggcaccgcgagttcaccccaaatccgcagcatcgcgagctgtatcaggagatgatgagcaagtggcagacggtgtacgccgatcagcttggccttgtcgatagcgggctgacaacgtcgatgtggcaggcgccgggtctggaac

SEQ ID NO: 23764 - DNA, 987 bp, Klebsiella pneumoniae
atgatacgtttcgcagttgttggcacaaactggatcaccaagcagtttgtcgatgccgcccatgaaaccggcaaatataaacttaccgccatctactcccgcagcctcgaacaggcgcaagccttcgccaaagactatccggtcgagcatctgtttacctcgctcgatgaactggcacagagccctgacgttgacgcggtctatattgccagcccgaactcgctgcactttccgcagacccggctgttcctgagccataagaagcacgtcatttgcgaaaagccgctggcgtcgaacctgcaggaagtcgaggcggcgatagcgctggcgaaagaaaataacgtggtgctgtttgaagcctttaaaaccgccagtctgcctaactttctcctactgaaagaaacgctcgctaaagtgggcaaactacgcaaagccttcatcaactactgtcagtactcctcacgctatcagcgctaccttgacggcgaaaaccccaacacctttaacccggcgttctctaacggttcgattatggatatcggcttctattgcctggcgtccgctgtggcgctgtggggcgagccgcgggccgttcttgccaccgccagcctgctggacagcggcgtagacgcccagggcaccgtggtgctgagctatggcgacttcgacgtgacgctgcatcactccaaagttagcgattccgcgatccccagtgaaattcagggcgaagacggcgcgttagtgatcgaaaaaatctccgaatgtcagaagctggcgtttgtgccgcgcggcggtaaagcccaggacctgacgcagccccagcacattaataccatgctgtatgaggcggagacctttgcgcgcctggtggagacacaggatgtggatcacccgggcctggcggtgagccggatcaccgccaaactgtccagcgaaattcgtcgccagaccggagtgatcttcccggccgatacgcagccgctggcg

SEQ ID NO: 23765 - DNA, 969 bp, Klebsiella pneumoniae
atgaatactgtcggcacgccgttgctatggggtggattcgctgtcgttgtcgcgatcatgttggcaatcgacctgctgcttcagggacgacgcggttcgcatagcatgaccatgaagcaggccgctggctggtcaatcctctgggtcacgctttctctgctgttcaacgccgccttctggtggtatctggtgcaaacccagggccgggccgtcgccgatccgcaggccttagccttcctcaccggttatctgattgaaaaagcgctggcggtcgataacgtcttcgtctggttgatgctgttcagctatttcgccgtaccgcctgctctgcagcgccgggtgttggtgtatggcgtactgggcgcgatcgttctgcgtaccattatgatcttcgccggcagctggctgatttcgcagttcgactggctgctgtacgtctttggcgccttcctgctgtttaccggcgtgaagatggcgctggcgaaggaggacgactccggcatcggcgataagccgctggtgcgctggatccgcagccatctgcggatgaccgataaaatcgagagcgagcgcttcttcacccgtaaaaacggggtgctgttcgccaccccgctgctgctggtgctgattctggtggaactgagcgacgtgattttcgccgtcgacagtatcccggcaatcttcgcggtcaccaccgatccgtttatcgtgctgacctcgaacctgttcgccatcctcggcctgcgcgccatgtacttcctgctggcgggggtcgctgagcgcttctcgatgctcaaatacggtctgtcggtgatcctggtgtttattggcgtgaagatgctgatcgtcgacttctaccatatcccggttgccatctcgctgggcgtggtgggcggcatcctggccgtcacgctgctgattaacgcctgggtcaacaggcagcacgacaagcagcgcaaactgccagag

SEQ ID NO: 23766 - DNA, 1398 bp, Klebsiella pneumoniae
atgcagcagtatcagtttccgcaagggttcctgtggggggcggcggcgtccggcccgcaaacggaaggggtcaccaataagcgccatcgttccatctgggacagttggtttgccgaacagccggagcgattttatcagcaggtaggaccgcaaaccgtgtgtgatacttatcatcagtatccgcaggacgtggcgctgatgaaacagaccggcttcaactcatttcgtacctcgatacagtggtcacgactgatcgcggatttggaaaccggcgcgccggacccggacgcggtgcgtttttatcacgcctatctggatgagatgatcgctaacggcattgagccgatgatcaatctctaccactttgatatgccggaagcgctgcagaaacagtacggcggctttgaatcggcgcacgtaaccgagctgtttgcccgctttgcccgcaccgcctttagcctgtttggccataaggttaaatactggataaccttcaacgagccgattgtgccggttgagggaggctacctgtacgacttccactatccatgtaagaaagatggccggctggcggcgcaggtggcgtttaacattatgctggcgcacgccaaagcggtaacggcttatcgtgaactggcgctggcgggcgagatcggcgtggtgctcaacctgaccccgagctataccctcaccgacagcgacgcggataaaaaagccgccgggtatgccgacctgttttttaaccgcagcttccttgacccgctggtaaaacatgaattccccaaagcgctgtgcgagatccttgccgcccacgactgcctgccgacgaccagcaaagacgacgcggcgttgatcctcagcgcggatatcgattttcttggggtaaactattacgtgccgcggcgggtaaaagcgcgtgagagcgaatatgacctcgattatttcactccggaatactatttcgaaaacgcggtgaacccgcagggccgctttaatccttatcgtgataacaacgagatcctgccgcaggcgatctatgacattgccgccaatattcgcgataactacggcaatattaagtggtatctcgcggaaatcggcatcgcgatggatcgacaatcagagggcgagcccggggcggacggggtgatagacgatactttccgcatccagctgatggaggagcatctggtgcagctgcatcgggcgatagccgacggcgcgaactgctttggcgtgcaccagtggacgtttatcgacaactggtcgtggatcaatgccttcaaacggcgctacggcttctggcgactggatctggagaccggcgagcgacagataaaacgcaatgcgctgtggtttgccgaactggcgaccagcaacggttttaccagcgataaa

SEQ ID NO: 23767 - DNA, 1685 bp, Klebsiella pneumoniae
ggatcttcggcggttgcgaattcctccgccgtgacaaccggccgtggagcgagaaagagttccagcggctgcataccttcgcgcagatcgtcgccgtcgtcaccgaacagattcagaaccgggtcagcaataacgtcgattacgatctgctgtgccacgagcgcgacaactttcgcatcctggtggcgatcaccaacgcggtgctctcgcgactggatatcgacgagctggtcagcgaggtggcgaaagagatccatcgctacttccggatcgacgccatcagcgtggtgctgcgcagcgaccgcaaggggaagctcaacatctattccacgcattatcttgacgccagccacccggttcacgaccagagcgaggtggatgaagccggcaccctcaccgagcgcgtgttcaaaagcaaagagatgctgctgcttaatctgcacgaacatgacactctcgcgccgtatgagaaaatgctcttcgagatgtggggcaataagatccagaccctgtgcctgctgccgctgatgtccggcaataccctgctcggggtgcttaagctggcgcagtgcgacgaacaggttttcaccaccaccaatctcaagctgctgcggcagatcgccgagcgggtgtcgatcgctatcgataacgccctcgcctaccgcgaaattcagcgcctgaaagagcggctggtggatgagaacctcgccctcaccgagcagctcaataatgtcgagagcgaattcggcgagattatcggccgcagcgaggcgatgaacaatgtgctcaagcaggtagagatggtggcgcagagcgacagcaccgtgctgatcctcggcgaaaccggcaccggcaaagagcttatcgcccgcgctatccacaacctcagcggacgcaacggtcggcggatggtgaagatgaactgcgccgcgatgcccgccgggctgctggagagcgatctgttcggccacgaacgcggcgcgttcaccggggccagcgcccagcgtatcggccgcttcgaactggcggacaaaagctccctgttcctcgatgaagtgggcgatatgccgctggaactgcagcccaaactgctgcgcgtcctccaggagcaggagttcgaacgtctggggagcaacaagctgattcagaccgacgttcgattgatcgccgccaccaaccgcgatctcaagcagatggttatcgacagggaattccgcagcgatctctactaccggctcaacgtgttcccgatccacctgccgccgctgcgcgaacgtcccgacgatatcccgctgctggtgaaggcgtttacctttaaaatcgcccgccgcatggggcgcaatatcgacagcattccggcggaaaccctgcgcactctgacgcgcatggagtggccgggcaacgtgcgcgagctggaaaacgttatcgaacgggcggtattgctcacccgcggcaacgtactgcagctctccctgccggagcgggatatcgtggaagccccgcggacgccggcggtcctgcctgaggaaggtgaggatgaatatcaactgatcgtccgggtgctgaaggagagcaacggcgtggtggccgggccgaaaggcgccgcccagcggctggggctcaagcgcaccacgctcctgtcacgcatgaagcggctgggtattaataaagacgaactggtgtaa

SEQ ID NO: 23768 - DNA, 1119 bp, Klebsiella pneumoniae
atgcgttacgtagatgaataccgcgcccccgaacaggtgatgcagctggtggcccatcttcagcagcgtgctcgtctgctgccgcacaccgccgcgcgaccgctgcgcatcatggaggtctgcggcggccatacccatgccatttttaaattcgggctcgaccagctgttgccggagaacatcgaatttattcatggtcccggctgcccggtgtgcgtcctgccgatggggcgcatcgacgcctgcattgagattgcctgccgcccgggagtgatcttctgcaccttcggcgacgccatgcgcgtgccgggtaaaaacggctcgcttctgcaggcgaaagcccgcggcgccgatgtccgcatcgtttactcgccgatggacgctctgcggctggcgcagcaaaatccgcagcgcgaggtggtcttttttggtcttggtttcgaaaccaccatgcccgctaccgccctgaccctgcgtcaggcgcgagagcgcaacgtcgataacttctactttttctgccagcacatcaccctgctgccgaccctgcgcagcctgctggaccagccggagaacggaatcgacgcctttctcgccccgggccacgtcagtatggtgatcggcaccgaggcctacggttttatcgccagcgactatcaccgtcctttagtggtcgccggtttcgaaccgcttgatctactgcaaggcgcggtgatgctggttgagcagacaatagcgcagcgcagcgatgtggaaaatcagtaccgtcgcgtggtgccggatgagggcaacccgctggcgcaggcggcgatggccgacgtcttccgcctggatggcgacagcgaatggcgcggcctgggggtcatcagcgactccggcgtgcagcttacgccagcctatcagcgcttcgatgccgaggcgcattttcgcccggcgccgcagcgcgtgtgcgacgacccgcgcgcccgctgcggcgaggtgctgaccggccgctgtaaaccgcaccagtgcccgctcttcgccagcacctgcaatccgcaaagcgcctttggcgcgctaatggtctcctctgaaggggcctgcgccgcctggtatcaatatcgcagtcaggaaaatgaagta

SEQ ID NO: 23769 - DNA, 1011 bp, Klebsiella pneumoniae
atggcaacgatgctggaggtcgcaaagcgcgcgggggtatcgaaggcgaccgtttcgcgggtgctgtcgggcaacggctatgtcagccaggagaccaaagaccgggtgtttaaggcggtggcggagagcggctaccggcctaatctgctggcgcgcaacctggcgaccaaaaccacgcaaaccctcggcctggtggtgaccaataccctgtaccacggcgtctattttagcgaactgctgtatcacgtggcgcggatgacggaggataaagggcggcagctgatcctggccgacggcaagcacagcgcgcaagaggagcgggaggcgatccagtacctgctggatctgcgctgcgatgcgatcatcatctacccgcgctttctcaccgttgatgagatggacgagatcgttgagaaccactcgcagccgatcatggtgcttaatcgccgcctgcgccgccacgccagccactgcgtctggtccgatcaaaaagcctcggcgatgcgggtagtggagcggctgattgcgcttggccatcgcgatatcgcctttattaccggctcccttgactcgcccaccggcgtcgaacgcctcgccggctacaaagacgcgctggctggccacggcatcgccctgaacgaggcgcttatcgccgaagggcgctggacgccggaaaccggggcggcgggggtggagagcctgcgtcagcgcggggttacctacagcgcgctagtggcgagcaatgacgatatggccatcggggcgatgaagcagcttcaccagctgggcgttatggtgccagaacaggtctcggtggtggggtttgacgatattgctcttgcgccgtatatggtgccgtcgctcgccagcgtccgggtgccggtgacggagatgattaaagagagcatcaatcggctgatctttatgctggatggcggggaattcaactttcagcaaagctttcccggagcgctgattgaacgcgagtcgctggtggcgggcccctgtgcc

SEQ ID NO: 23770 - DNA, 357 bp, Klebsiella pneumoniae
atggttactgcattaatcatcgtcgccgccatcgcctggcttacccagctggcctttggcggctggcagatccgccgcttcaatcgcgcctttgatagcctgtgccagcaggggcgggtgggcgtcggccgctccgccgggcgctttcaaccgcgcgccatcgtcgccatcgccgtcgatgataacgaccgcattagcgacacgctgctgatgaaaggcttcaccattttcgccagtccgcaaaagatcccggctctggcaggcaaacatattgcggaattgcagcctgatgtgatctttccccatgatccgcgctgtcagaatgcactatcattagcgcttaatccgaaacatgga

SEQ ID NO: 23771 - DNA, 1002 bp, Klebsiella pneumoniae
atgtctgcgttttaccagaagcattttttaaagttactcgattttacgcctgcagaaatcaccgccctgctcgagctggcggcaaagctgaaagccgataagaaaaacggtatcgaagtccagaaactggccggaaaaaacatcgcgctcatcttcgaaaaagactcaacccgtacacgatgctctttcgaagttgccgcatacgatcagggcgcccgcgtgacctatctggggcccagcggcagccagattggccataaagagtcgatcaaggacaccgcccgcgtgctcggacggatgtacgacggcattcagtaccgcggccacggccaggaagtggtagagaccctggcgcaatacgccggcgtgccggtgtggaacggcctcaccaacgagttccaccccacccagctgctggcggacctgctgaccatgaaagagcatctgccgggcaaagcctttaaccagatgacgctggtctacgccggcgacgcgcgcaacaacatgggcaattcgatgctggaagccgccgccttgaccggtctggatctgcgcctggtggcgccatcggcctgctggccggaggccgcgctggtggagacctgcaccgcgctggccaaacagcagggcggcaacatcaccctgacggaagatatcgccgcgggggtgaaaggcgccgattttatctataccgacgtctgggtctcaatgggcgaggcgaaggaaaaatgggccgaacgtatcgccctgctgcgcgactatcaggttaacagcgcgatgctggcgctgaccggcaacccgcaggtcaagttcctccactgcctgccggcgttccacgacgaccagaccacgctgggcaaacagatggctgccgattacggcctgcacggcggcatggaggtgactgacgaggtgtttgagtcggcggcgagcgtggtcttcgaccaggcggaaaaccggatgcacaccatcaaagcggtgatggtggcgacgctgagcaaa

SEQ ID NO: 23772 - DNA, 1908 bp, Klebsiella pneumoniae
atgcgatttcccaaccaacgcttagcgcaactcttcaccctgctgcgaaatgaaacgctgccgcaggatgagctggcgcaacgcctgtcggtttccacccgtaccgtgcgcgccgatattaccgccctgaatacgctgctggcgcagtatggcgcgcagtttatccttaaccgcggcagcggttatcagctgaagatagataatccgacgagtttccaggcgctggaggagaccgcgccgaaggcgcagcacgtgccgcgtaccgcccaggatcgcatcacgtttctgctggtgcgtttcctgacctcggcgttctctatcaagctggaagacctggcggatgagtggtttgtcagccgcgccacgttgcaaaatgacatggttgaggtgcgcgagcgcttccagcgctatcagctgactcttgaaacccgcccgcgccacggcatgaagctgttcggcagcgaggtgtcaattcgcgcctgcctgaccgacctgctgtgggagctgacccagcaaggcgatatcgcgccgccgatcggcgccgaggcctttgcggcggaggtgccagcgctgctggagccggtgctgcaggagacgctcacgcggcatcatattcgcctcaccgacgccggcgagcgctttgtctgcctgtatggcgcggtggtggtgcgccgcgtcagcgaaggctacccgctggccgatttcagcgctgaagatgtggcgcagaacgtccgcgacgccgcgcgcgagctgacgggcgagctgcagcggctggccgggaaacctttatcgcccgccgaagaagagtggctatgcgtgcatatcgcggcccgtcaggtgcaggatgtcgatccggaaactatcagcgccgacgatgatgaagcgctggtcaattacatcctgcgctacatcaacagccagtataattacaacctgctggacgacgcccagctgcatgccgatctgctgacccacattaaaaccatgatcacccgggtgcgctaccagatcatgatccccaatccgctgctggataacatcaaacagcactacccgatggcctgggatatgaccctggccgcggtctccagctgggggaaatatactccgtacaccatcagcgaaaacgaaatcggctttctggtactgcatatcggcgttgggctggagcgccactacaacatcggctaccagcgtcagccgcaggtgctgctggtgtgcgataccagcaatgcgatggtacggatgatcgaggcgatcctgcagcgtaaatatccgcagctggagatcgccgctaccatctcccagcgcgagtacgaacagcgggacgcgatcgaggcggatttcgttatctcaacggtgcggatcggcgaaaaagacaagccggtagtgaccatcgcgccgttccccaccgactatcagctggatcaaatcggcaagctggtgctggtggaccgtacccgtccgtggatgctgaataaatacttcgatgccgcccacttccgggtggtggataagccgatggatcagcaaacgctgttcgccgagctgtgccagcagctgctggaggaaggctttgtcgatgcggagtttcatgcttcggtggtggaacgtgaagcgatcgtcagcaccatgttgggggatggcattgcgctgccgcactccctggggctgctggcgaaaaagacggtggtttataccgttatcgccccgcagggcatcgcctggggcgacgaaaccgcccatctcatcttcctgctcgctatcagcaagcgcgagtatgaagaggcgatggcgatctacgatattttcgtgactttcctgcgcgagcgcgccatgagtcgcctcgccgcgacccgcagcttcgatgagtttaaaacggtggcgatggagtgcgtcagccggttt

SEQ ID NO: 23773 - DNA, 462 bp, Klebsiella pneumoniae
atgaattaccatcagtactacccggtagatattgtcaacggccccggcacccgctgcaccctgtttgtctccggctgcgtccacgagtgccccggctgctacaacaaaagcacctggcgggtgaactccggtatgccgtttaccgctgagatggccgaccgtatcatcgccgacctcaacgacacccgcatcaaacgccaggggctttcgctctccggcggcgatccgctgcatccgcagaacatcgcggatattttaaagctggttcagcgcgtacgcgccgaatgccccggcaaagatatctgggtctggacgggctataagattgacgaactgaacgccgagcagatggaagtcgtgaacctgattaacgtgctggttgacggtaagtttgtgcaggatttgaaagatccggcgcttatctggcgcggcagcagcaaccaggtcgtacatcatttgcga

SEQ ID NO: 23774 - DNA, 1335 bp, Klebsiella pneumoniae
atgttaaacagtattttagtaatactctgtctgatagccgtcagtgcgtttttttcgatatcggaaatttcactggctgcctcacgtaaaatcaaactgaaactgctggccgatgaaggcaacgtcaacgcacagcgggtgctgaagatgcaggagaacccgggcaccttctttaccgtcgtgcagattggcctcaacgccgtcgccattcttggcggtattgtgggcgacgcggctttctcaccggcgtttcatagcctgctcagcgggtatttgtcgccggagctctccgagcagctgagcttcatcatctcttttaccctggtcaccagcttgttcatcctgtttgctgacctgactccgaaacgcatcggtatgattgcgcccgaaacagtggccctgcgcatcatcaacccgatgcgcttctgcctgttagtcttccgcccgctggtgtggttgtttaacggcatggccaacatgatcttccgcatcttcaaactgccgatggtgcggaaagacgatatcacttccgatgatatctatgccgtggtcgaggccggtgcgctggccggggtgctgcgcaagcaggagcatgagctgattgagaacgtgttcgagctggagtcccgcaccgttccttcctccatgaccccgcgtgaaagcgtcatttggtttgatttgcacgaagacgagcagagcctgaagaataaagtggccgaacatccgcactcgaagttcctcgtctgtaatgaagatatcgaccacattatcggttacgtcgattcaaaagatctgctgaaccgcgtgctggcgaaccagagcctggtgctgaccggcggcgtacagatccgcaacacgttgatcgtgccggacaccctgaccctgtcggaagcgctggaaagcttcaaaaccgccggggaagacttcgcggtgatcatgaatgaatacgcgctggtggtcgggatcatcactctcaacgacgtgatgaccaccctgatgggcgacctcgtcggccaggggctggaagagcagattgtcgcccgcgatgaaaactcgtggctgatcgatggcggtacgccgattgatgacgtgatgcgcgtgctggatatcgacgagttcccgcagtccggtaattacgagaccatcggcggctttatgatgtttatgctgcgtaaaatccccaaacgcaccgacgcggtgaagttctccggctataagtttgaggtcgtggatatcgataactaccgtatcgaccagctgctggtgacccgcatcgataacaagccaacggtgctggtgccgaagcaggcggaaacggcggaaagccagaacgcc

SEQ ID NO: 23775 - DNA, 1023 bp, Klebsiella pneumoniae
atgatgcctcgatctctttcgcaaaccggcccggagaagcgacgcttcacctggccgaagggcaccccgcagattattgccctgctgctggttctgctggtagacagcctggtggcgccccatttttatcaggtggtgctccaggatggccgcctgtttggcagcccgatcgatattctcaaccgcgccgcgccggtggcgctgctggcgattggcatgacgctggtgatcgccaccggcggcatcgacctgtcggtaggggcggtgatggcgattgccggcgcgacggccgcctcgatgaccgtcgccgggcacagcctgccggtggtgctgttggccgcgctggccgcgggcgcgctggccggattgtggaacggcatcctcgtggcggtccttaagatccagccctttgtggcgacgctgatcctgatggtggccgggcgcggggtggcgcagttgatcaccgccgggcagatcgtcacctttgattccccggccctggcgtggctcggcagcggatcgtttctgctgtttccgacgccggtgatcgtcgccgccgctacgctgctgctgttctggctgtttacccgtaaaacggcgctgggcatgtttattgaggcggtagggatcaacatccgcgcggcgaaaaacgccggcgtcaatacccgcatcgtggtgatgctggcctatgtcctgagcggcgtctgcgcggcgatcgccgggatcatcgtggcggcggacattcgcggcgcggatgccaataacgccgggctatggcttgagctggacgccattctggcggtggtcatcggcggcgcctcgctgatgggcgggcgctttaacctgcagctctcggtggtgggggcgctgattatccagggaatgaacaccgggattttgctctccggcttcccgccggagctcaaccaggtggtgaaagcggtggtggtgctgtgcgtactgattgtccagtcgccgcgctttatcggtttactgaaaggggtacgcggccgtgataaaacg

SEQ ID NO: 23776 - DNA, 3774 bp, Klebsiella pneumoniae
atgagtttatggaagaagataagcctcggcgtcttaatcgtgttggtgctcctgctgggcaccgtcgggttcctggtggggacgaccaccggcttgcatctggtgttcaaagcggcggatcgctgggtaccggggctggaaatcggcaaagtgaccggtggctggcgtgatttaaccctcgataatgttcgctacgaacagcccggggtggcggtcaccgccggtcagtttcacctcagcgtcaggttgcgctgcctgtgggacagcagcctgtgcgtaaacgacatcgcgctgcgcgatatttacgtcgccgtcgataccaagaagatgccgccctcagcgccggtcgaggaagaggacagcgggccgctgaatctctccactccttatccgatcaccctcagccgcgtcgcgctgcataacgtcaacgtcaaaatcgatgataccgcggtctccgtacgcgacttttccaccggcctgaactggcaggagaaaaatctgaccctgacgccgacctcgctgcaggggctgctgatcgccctgcctaaggtggcgaaagtggcgcaggagcaggtggttgagccgaaaattgacaacccgcagccgcaggaaaaaccgctcggcgagacgatgaccgacctcttctcgcagccggtgctgccggcgatgaccgatgtccatctgccgctgaacctcaatattcaggcgttccgcggcgagcagctgcgcctgaccggcgataccgatatcaccgtgtataacctgctgctgaaagtcagcagtattgacggccagatgaagctcgacgcccttgatatcgactccgatcagggcaaggtcagcgcctcgggcagcgcgcagctgcaggataactggccggtggacattaccctcgccggaaccctgaacgtcgacccgatgaaaggggagaaggtgcagctgaaggtgggcggcgaagtgcgtaaaacgctcaaagtcggagtggacttaagcgggccggtcgcggccacgctgcgcgcggatgcgcagctggcggaggccgggctgccgctcaatatggagctgaagagtaagcagctcgcctggccgttcagcggcgagaagcagttccaggccgacgatgtccagctgaagttcagcggcaaaatgaccgactatgcgctggccttctccaccgcggtgaaaggtcaatcgctgccgccggcgaaaatcgccctcaacgccaaaggcaatgaacggcagatcaatctcgacaagctgacggtcaatgccctggaagggaaaaccgagctgaaggcgctgctcgactggcagcaggcgatcagctggcgcggcgagctgaccctcgacggcatcaacaccgccaaagaggtgccggactggccgtcgaagcttaacggccggatcaagacccagggcagcctgtacggcggcagctggcagatgtcggtgccggagctgaaaattaccggcaacgtgaagcagaacaaagtggatgtggcgggctcgctgcagggtaacagctatctgcagtggaaaatcccggggctgcatctggcgttaggcccgaacagcgctgatatcaaaggcgagctgggggtgaaggatcttaatctcgacgccaccatcgatgcgccgcacctggataatgcgctgccggggctcggcgggacggcgaagggcttggtaaaagtgcgcggcactgtcgatgcgccgcagctgctggccgatatcaccgcccgggcgctgcgctggcaggagctgaccatcgcccaggtcaacgtcaaaggggatgtgaaatccaccgatcagattggcggtaacctggacgtgcgggtggatcgcatcagccagccgggggtcaatatcagcctggtgcagctcaatgccaaaggtacagagaaacagcatgagctgcggctgcgcgtgcagggcgatccggtttccggccagctggcgctggcaggcagcttcgatcgtcaggccgaacgctggaaaggctcgctgagcgatacccgcttccagacgccggtggggccggtagcgctgacgcgcagcattgcgctggactatcgcaatctggagcagaaaatcagcatcgggccacactgctggaccaacccgaacgccgagctctgcgtgcctgaaaccattgacgcgggcgccagcggacgggcgcgggtgaatctcaaccgcttcgatctggcgatgctcaagccgtttatgccggaggtgacccaggccagcggcgtgtttactggtaatgccgatgtgagctgggacaccaccaaagagggactgccgcagggcaaagtgaccctcagcgggcgcaacgtcaaggtgacccaggtcgtcaacgacgcgccgttgccggtggcgttcgatacgcttaacctcagcgccgacctgcacaacaatcgcgccgagctgggctggcttatccgcctgaccaacaatggtcaactggatgggcaggtgcaggttaccgacccgcaggggcggcgtaatctcggcggcaatgtcaatatcagcaacttctcgctggcgatgatcaacccgattttcgctcgtggtgaaaaggcagagggaaggctcaacgcccgtctgcgtctgggcggcaatgtgaaaagtccgcagctgttcggccagatgcagctgagcggggtggatatcgacggcaactttatgccgtttgatatgcagccgagccagctggcgatgaacttcaacggcacgcgctcgaccctgcaggggacggtgaacacccgccaggggcaaatcgccctcagcggtaacgccgactggacgcagatcgataactggcgggcgcaaattgcggcgaaaggcagccgggtgcggatcacggtgccgccgatggtgcgtctcgatgtatcgccggatgtggtgtttaccgccacgccaagcctgttcaatctcgacggcaaagtggatgtgccctgggcgcggatcgtggtcaacgaggtgccggagagcgcggtcggcgtctcctctgatgaagtgatgctggataaaaacctcaagccgattaagcagcagagcgccagcatcccgatcaacagcaacctgaccattcacgtcggcaacaacgttcgtctggaagccttcggcctgaaagcgcgtctgaccggtgatttgaaagtggcgcaggacaagcaggggctgggcctcaacgggcagattaatattccggacggccgtttccacgcctatggtcaggacttgattgtccgcaaaggggagctgctgttctccggtccgccggatcagccgttgctgaatatcgaagcgattcgtaacccggatgccaccgaagacgatgtgatcgccggcgttcgcgtcaccggctccgccgatcagccgaaagcggagatcttctctgatccggttatgtcccagcaggaagcgctgtcttatctgctgcgcggccagggtttgagtagtggtcagagcgatagcgccgcgatgacctcaatgcttattggtatgggggttgcacaaagtggtcaggttgtgggtaaaatcggcgagacgtttggcgtaagcaacttggcgttggacaccgaaggggtaggcgattcttcccaggtggtggtcagcggctatgtactgccgggtctgcaggtaaaatacggggtcggtatcttcgattccctggcgacgctgactttacgttatcgcctgatgcctaagctatatgtggaagcggtgtctggcatcgaccaggcgctcgatttgctctatcagtttgagttt

SEQ ID NO: 23777 - DNA, 945 bp, Klebsiella pneumoniae
atgcagaaccggctgaccatcaaagatatcgcgcgcttaagcggcgtagggaaatcgacggtatcccgcgtccttaacaacgagagcggggtcagcgaacggacccgcgagcgcgtcgaagcggtgatgcagcagcacggtttctcgccctcccgttccgcccgcgccatgcgcggccagagcgataaagtggtggcgattatcgtcacccgtctcgattcgctgtcggaaaaccttgccgtgcagaccatgctgcccgccttttatgagcagggttacgatccgattatgatggagagccagttctccccggcgttggtggaggagcatcttggcatgctcgcccggcgcaatattgacggcgtggtgctgttcggttttaccggcatcgacgaagcgatgctcgccccctggcgcgacaccctggtgctgatggcccgcgacgctcccggcttcgcctcggtgtgctatgacgacgagggggccatcacgctgctgatgcagcggctctacgatcgcggacaccgccacatcagttttcttggcgtaccgcacagcgacgtcaccaccggcgaacgccgccatctggcctacctcgccttctgtaaaaagcatcgtctgacgcccaccgccgccctgccggggctgggcatgaagcagggatatgacaccgtcgccagcgtgctgacggctgaaaccagcgccctggtctgcgcgacggataccctcgccctcggcgccagcaagtacctccagcagcagggtcgcgatgcgctgcagctcgccagcgtcggcagcacgccgctgatgaagtttctccacccggaaatcttgaccgtcgatccgggctatgccgagtccggacgccgggccgcccggcagttgatcgagcagatcgccggcaacgtcgatccccgccagatcgtgattcccgccgccctcaat

SEQ ID NO: 23778 - DNA, 549 bp, Klebsiella pneumoniae
atgacaaagcagcccgaagactggctcgacgacgtgcccggtgatgacgttgaagatgaagatgatgaaatcatctgggtcagtaagagtgaaattaagcgcgacgcggaagaactgaagcgtcttggcgcggaactcgttgacctggggaaaaacgcgctggataaaattccgctggataccgacctgcgcgacgccatcgaactcgcccagcgaatcaaaaaagagggtcgccgccgccagctgcagcttatcggtaagatgctgcgcaaccgcgatgtcgatccgattcgtcaggcgctggacaagctgaaaaaccgtcacaaccagcaggttgcgctgttccacaagctggagcagatccgcgatcgactgattgacgacggggatgacgccgtcgctgaagtactgaacctgtggccagaggctgaccgtcagcagctgcgttcgctgatccgcaatgcgaagaaagagaaagaaggcaacaagccgccgaaatcggcgcgcctgatcttccagtatctgcgtgaactggcggaaaacgaaggc

SEQ ID NO: 23779 - DNA, 2706 bp, Klebsiella pneumoniae
atgctgaaaaattatacccggcagctgttcgcgcagcttagccgccatctgccacgtcgtttagtccagcgcgatccgctgccggacgcccgccatctggcgagtggccccattcctgaatcgcttggtcagcattgcctgaacgtggcggcgatggacgaccaggagatctggcgcgcctttgacagccaccctgaagggctcaatgaaggcgaagtggcggcgaaaatcctcaaacatggtgacaaccagatcccggcgcagaagccctccccgtggtgggtgcatctgtggacctgctatcgcaacccgttcaacctgctgctgaccgtgctcggcatcgtctcctattccaccgaggatctgttcgccgccggggttatcgccctgatggtggggatctcgacattgctcaatttcatccaggaggcgcgctcgaccaaagcggcggatgcgctgaaggcgatggtgagcaacaccgccaccgtgctgcgggtggtgaacgagcagggggagagccgctggctggagctgcctatcgaccagctggtgccgggcgacattatccggttgtcggcgggggatatgatcccggcggacctgcgtatcctgcaggcacgggatctgttcgtcgcccaggcctcgctgaccggcgaatcgctgccggtggagaaagtggcccgcagccgcgatccgctgcagcaaaacccgctggagtgcgacaccctgtgctttatgggcaccaacgtggtgagcggctcggcgcaggccatcgtcttcgccaccggcggccgcacctggtttggccagctggccggccgcgtcagtgaacaggagagcgagccgaacgcctttcagaagggcatcagccgggtcagcatgctgctgatccgctttatgctggtgatggccccggtggtgctgctgatcaatggctacaccaaaggcgactggtgggaggcggcgctattcgcgctgtcggtggcggtcggcttgacgccggagatgctgccgatgatcgtcacttcgacgctggcgcgcggggcggtgaagctgtcgaagcaaatggtcatcgtgaagcacctcgacgccattcagaatttcggcgcgatggacatcctctgcactgataaaaccggcaccctgacccaggataagattgtgctggagaaccataccgacgtctccggcaaggtctgcgagcgggtactgcatgccgcctggctcaacagccactaccagaccggcctgaaaaacctgctcgacaccgcggtgctggagggcgttgagctggatgccgcccgcgggctggcggaacgctggcagaaggtggatgagatccccttcgacttcgaacgccgccgcatgtcggtggtggtgaaggaggatgacgccgcgcatcagctgatctgcaaaggggcgctgcaggagatcctcaacgtctcgacccaggtgcgctacaacggcgatatcgtaccgctggacgacaccatgctgcgccgcattcgccgggtgaccgataccctcaaccggcaggggctgcgggtggtggcggtggcgaccaaatacctgccggcccgcgaaggcgactaccagcgcgccgatgagtcggacctgatccttgaaggctacatcgccttcctcgatccgccgaaagagaccaccgccccggcgctgaaggcgctgaaggccagcggcatcacggtgaagatcctcaccggcgacagcgagctggtggcggcgaaggtgtgccatgaagtgggactggatgctggcgaagtggtgattggcagccagatcgaagccatgagcgacgacgaactggcggcgctggccaaacgcaccacgctgttcgcccgcctggcgccgctgcataaagagcgtatcgtgacgctgctgaaacgcgaaggtcacgtggtgggctttatgggcgacggcatcaacgacgctccggcgctgcgcgcggcggatatcggcatctcggtcgacggcgcggtggatatcgcccgcgaggcggcggacatcattctgctggagaagagcctgatggtgctggaggagggggtaatcgaaggccgccgcaccttcgccaacatgctcaagtacatcaaaatgaccgccagctccaacttcggcaacgtcttcagcgtgctggtggccagcgccttcctgccgtttctgccgatgctgccgctgcacctgttgattcagaacctgctgtacgatgtttcccaggtggcgatcccgtttgataacgtcgatgatgagcagatccgcaagccgcagcgctggaacccggccgatctcgggcgctttatggtcttctttggaccgatcagctcgattttcgatatcctcaccttcggcctgatgtggtgggtgttccacgccaataccgtggagatgcagaccctgttccagtccggctggtttatcgaagggctgctgtcgcaaacgctgattgtgcacatgatccgcacccggcgcattccgttcgttcagagccgggccgcctggccgctgttcgccatgaccctggtggtgatggcggtgggtatcgcgctgccgttctcgccgctggcgagctacctgcagctgcaggccctgccgctgagctacttcccgtggctggtggcgatcctggcgggctatatggtgctgacccaggccgtgaagggcttctacagccgccgctacggctggcag

SEQ ID NO: 23780 - DNA, 405 bp, Klebsiella pneumoniae
atggagttacgaaacgaagcattccacctgctgcgccagctttttcaacagcataccgcccgctggcagcaggcgttgccggacctgactaaacctcagtatgcggtgatgcgctcggtagcggagcaccccgggatcgaacaggtggcgctgattgaagcggcggtcagcaccaaggctacgctggcggagatgctcagccgaatggaagcgcgcggcctggtgcgccgggagcacgatccggccgataaacgccgccgttttgtctatctgaccgacgaaggcgaggcgttgcttaaccgttccattccgcagggcaatgaggtcgatgacgagtttctcggccgcctgagcgatgacgagcgcgagcagttctcccggctggtgcacaaaatgatggcgccc

SEQ ID NO: 23781 - DNA, 363 bp, Klebsiella pneumoniae
atgatgtccaccacgctgtttaaagatttcaccttcgaagccgcccaccacctgccgcacgtcccggaaggacacaaatgcggtcgcctgcatggccactcctttatggtgcgtctggagatcaccggtgaagtcgatccccataccgggtggatcatggattttgccgagctgaaggccgcctttaagccgacatacgatcgcctcgaccactattatctgaacgatattcctggtctggaaaaccccaccagcgaagtgctggccaaatggatctgggatgagatgaaaccgcgggtgccgctgctgagcgccgtgatggtcaaagagacctgcaccgccggctgcgtctatcgcggcgag

SEQ ID NO: 23782 - DNA, 1035 bp, Klebsiella pneumoniae
atgattataccaaatgcacaccctgacctgtggcagcgctaccaggccaccaaagcggccagtaccgcgaaatatgcccgcgatatcgccgcggaaatggggatcagcgaagccgagctgaccgccgcccgcctcggccatgatgccgtgcgcctgagcgatgacgcccgggcgctgattgccgccctggagcgcgtcggcgaaaccaaatgcatctgccgcaacgagtatgccgtgcatgagcaggtgggccagttcacgcaccagcacctcagcggccacgccgggctggtgctgaacccgcgcgcgctcgacctgcgtctgttcctcagccagtgggccagcgccttccatctgaacgataatggccgtcagagcatccagtttttcgaccaccacggcgacgccctgctgaaagtctatgcgaccacgcagaccgacatggcggcctgggagaccctgatcgcggaatatcgggtggcggcgccggcaccgctgaccctgcgcccgctggagccggtgaaatatgccgataccgccgacggcgccgccctggagaacgactggcgcgcgatgaccgacgttcaccagttcttcggtctgctgcgtaaatatcagctttcccgccagcaggccttccgtctggtgagcgacgacctcgcctgccgcgtggatcgccatgcgcttccgtcgctgctggagacggtgcgccaggagggcaatgaaatcatgattttcgtcggcaatcgcggctgcgtgcagatctttaccggcgccctggaaaagctggcccccatgcgcggctggctgaatatcttcaatactacttttaccctgcatctgcgcgaagagagcctcgatgaagtgtgggtgacccgcaagccgacttcggacggacacgtcaccagcgtcgaactgttcgctaaagacggcacccagattgcccagctctacggccagcgcagcgaggggcaccccgagcagacgcaatggcgccagcaggtagaccgcctgacccgtgaagggcagcccgca

SEQ ID NO: 23783 - DNA, 708 bp, Klebsiella pneumoniae
atggcagccacttttccgggcgtttgcgccgtggtgccggcagccggtttcggccgccgcatgcaaacggaatgcccgaaacaatatctctcaatcggtaacaaaacgattctcgaacacgcggtcgccgcgctgctggcggatgcgcgcgtccagcgggtggtgattgccgtcagccccggcgatcgccgcttcagccagctgccgctggcgcagcatccgcagattaccgtggtggatggcggcgccgagcgcgccgattcggtgctcgccggcctgcaggcgttgccggaggcgcagtgggtgctggtgcatgacgccgcgcgcccctgcctgcatcaggacgacctcagccgcctgctgtcgctctgcgaaaccagccgcgtcggcgggatccttgcggcgccagtgcgcgacaccatgaagcgcgccgagccggacaaaaccgctattgcccataccgtcgaccgcaatgacctgtggcatgcgctcaccccgcaatttttccctcgcgagctgctggtggattgcctcactcgcgcgctaaacgagggagccactatcaccgatgaagcctcggcgctggagtactgcggcttccatccgcagctggtcgccggacgcgcggataatattaaagtgacgcgcccggaagacctggcgctggctgaattttacctcacccgttcccgacaccaggagaaagct

SEQ ID NO: 23784 - DNA, 2559 bp, Klebsiella pneumoniae
atgagcacaattgacaatctcgacgcccacacgccgatgatgcagcagtatctcaagctaaaggcgcaacatcctgacattctgctgttttaccggatgggggatttttacgagctattttatgacgatgcgaaacgcgcctcgcagctgctcgatatctcgctgaccaagcgcggcgcctccgcgggcgaaccgatacccatggccggcatcccccaccacgccgtagagaactacctcgccaaactggtcaatcagggcgagtcggtggccatttgcgagcagattggcgacccggccaccaccaaggggccggtcgagcgtaaagtggtgcgtatcgtcaccccgggcaccattagcgatgaagcgctgctgcaggagcgccaggacaacctgctggccgccatctggcaggacagcaaaggcttcggctacgcgacgctggatatcagctccgggcgctttcgtctgagcgaaccggccgaccgcgaaaccatggcggcagagctgcagcgcaccaacccggcggaactgctgtatgcggaagattttgccgaatcgtcgctgatcgagggccgccgcggtctgcgccgtcgcccgctgtgggaatttgaaatcgacaccgcgcgccagcagctaaacctgcagttcggcacccgcgatctggtcggcttcggcgtcgaaaacgccccgcgcggcctgtgcgccgccggctgcctgctgcagtatgtcaaagacacccagcgtacctcgctgccgcacatccgctccatcaccatggaacgccagcaggacagcatcattatggatgccgccacccgccgtaacctcgagatcacccagaatctggccggcggcaccgacaacaccctggcctcggtactcgactgtacggtgacgccgatgggtagccggatgctcaagcgctggctgcatatgccggtccgcgataccgccgtgctggtggagcgccagcagaccatcggcgcgctgcaggagcgctataccgagctgcagccggtgctgcgccaggtcggcgatctggagcgtattctggcgcgtctggcgctgcgtaccgcccggccgcgcgatcttgcccgcatgcgtcatgccctgcagcaactgcctcttctgcgtgagctgctggccgacgttgacagtcagccggtgcaaaaattgcgcgagaaaatgggcgagttcaacgaactgcgcgaactgctggagcgcgcggtgatcgacgccccgccggtgttggtccgcgacggcggggtcatcgccccgggctatagcgaagagctggacgagtggcgggcgctggccgatggcgccaccgattatctcgataagctggagatccgcgagcgcgagcggctgggcctcgataccctgaaagtcggctacaacgccgtccacggctactacatccagatcagccgcggccagagccacctcgcgccgatccactacgtgcgccgccagacgctgaagaacgccgaacgctacattattcctgagctgaaggaatacgaagataaggtgctgacctccaagggcaaagcgctggcgctggaaaaacagctttatgacgaactgttcgacctgctgctgccgcatctcgccgatctgcaaaccagcgccagcgcgctggccgagctggacgtgctggtcaacctggcagaacgtgcggaaaccctgaactactgctgcccgacctttagcgataagccaggcattcgcattagcgaaggccgccatccggtggtcgagcaggtgctgaaagagccgtttatcgctaacccgctgcggctggcgccgcagcggcggatgctgatcattaccgggccgaacatgggcggtaaaagtacctatatgcgccagaccgcgctgattgcgctactggcctatatcggcagctacgtcccggcgcagaaggtggagatcgggcccatcgatcgcatcttcacccgcgtcggcgcggcggatgacctggccagcggccgctcgacctttatggtggagatgactgaaaccgccaatatcctgcacaatgccaccgagcatagcctggtgctgatggatgagattggccgcggcacgtccacctacgacgggctatcgctggcgtgggcctgtgcggaaaatctggccaacaaaatcaaggcgctgaccctgttcgccacccactacttcgagctcacccagctgccggagaaaatggaaggcgtcgccaacgtccacctcgacgcgctggagcacggcgataccatcgcctttatgcacagcgtgcaggacggcgcggccagcaagagctatggcctggcggtcgccgcgctggcgggggtgccgaaagaggtgatcaagcgcgcgcggcagaaactgcgcgagctggagagtatctcgcccaacgcggcggcgacccaggtcgacggcacgcagatgtcgctactcgccgccccggaagagacctcgcctgcggttgaggcgctggaaaatcttgatccggactccctgaccccgcgtcaggcgctggagtggatctaccgtctgaaaagcctggtc

SEQ ID NO: 23785 - DNA, 654 bp, Klebsiella pneumoniae
atgctccccctgaccgacggacttcttaagatgatgaacttcaagtatgttttccgctggcatgtgcctttcctgttgttgttcctgtttacctgccgcgcgatggcggcggacacgctgctgatcctcggcgacagcctgagcgctggctatcggatggcggccaacgccgcctggccggcgctgctcaatgagcagtggcaggcgaaaacgccggtggtgaacgccagcatcagcggcgatacctcgcagcaggggttggctcgcctgccagcgctgcttaagcagcaccagccacgctgggtgctggttgagctcggcggcaatgacggactgcgcggttttccgccgcagcagaccgagcagacgctgcgcaccattattaaagatatcaaagcggccaacgccgagccgctgctgatgcaaattcacctgccggcgaactatggccgccgctataatgaagccttcggcgcgatttacccggccctggccaaagagtttgctattcctctcctgcccttttttatggaggaggtctatctcaagccgcaatggatgcaggacgacggcattcatccaaatcgcgacgcgcagccgtttatcgccgactggatggcgaagcggctggctcccttagttaatcatgactcc

SEQ ID NO: 23786 - DNA, 1872 bp, Klebsiella pneumoniae
atgaaaggacaagaaactcgtggttttcagtcagaagtaaagcagcttctgcacctgatgatccattccctctattccaacaaagaaatctttctgcgtgagctgatttccaacgcctctgatgcggccgataagctgcgtttccgcgcgctgtcgcagccggatttgtatgagggagacggcgagctgcgcgtgcgggtttcgtttgataaagacaaccgcaccctgaccatcgccgataacggtatcggtatgaaccgggaagaggttatcgaccatctcggcaccatcgccaaatccggcaccaaagcgttcctcgaatcgatgggttccgaccaggcgaaggatagccagctgatcggtcagttcggcgtcggcttctattcggccttcatcgtggcggacaaagtgaccgtgcgtacccgtgcggcgggcgacaagccggaaaacggcgtgttctgggaatccgccggcgaaggcgaatataccgtagctgatatcaccaaagccgatcgcggcaccgaaatcaccctgcatctgcgcgaaggcgaagatgatttcctcaacgactggcgcgtgcgctctatcatcagcaagtattccgaccatatcgcgctgccggttgagattgaaaaacgggaagagaaagacggcgaaaccgtgatttcgtgggaaaaaatcaacaaggcgcaggccctgtggacccgcagcaaatccgaagttaacgacgacgaatacaaagagttttataagcatatcgctcacgactacagcgacccgctgacctggagccacaaccgcgtagaaggtaagcaggagtacaccagcctgctgtatatcccgtcgcaggcgccgtgggatatgtggaaccgcgatcataaacacggcctgaagctgtacgtccagcgtgtgttcatcatggacgacgccgagcagtttatgccgaactacctgcgcttcgtgcgcggcctgatcgattccaacgatctgccgctgaacgtctcccgtgaaatcctgcaggacagcagcgtgacccgcaacctgcgcaccgcgctgaccaaacgcgcgctgcagatgctggataagctggcgaaagacgacgctgaaaaataccaaaccttctggaaacagttcggcctggtgctgaaagagggcccggcggaagatccgagcaaccaggaagcgatcgccaaactgctgcgtttcgcgaccacccataccgactcctccgcgcagaccgtgtcgctggaagagtatgtctcgcggatgaaagaaggccaggagaagatctactacatcactgccgacagctatgcggcggcgaagagcagcccgcacctcgaactgctgcgtaagaaagggattgaagttctgctgctctccgatcgcatcgacgagtggatgatgagctacctgaccgagttcgacggcaaagcgttccagtctgtcgctaaagccgacgagtcgctggacaagctggcggatgaagtggacgagtccaccaaagaagctgaaaaagcgctggagccgttcgttgagcgggtgaaaaacctgcttggcgaccgggtgaaagaggtgcgtctgacccatcgtctgaccgacaccccggcgattgtcaccaccgacgccgacgagatgagcactcagatggcgaagctgttcgcggcagcgggccaggcggcgccggaagtgaaatacatcttcgaactgaacccggcgcatcagctggtgaaacgcgcagctgatacccaggatgacgcccagttcggcgaatgggtggaactgctgctggatcaggcgctgctggccgagcgcggcacgctggaagatccgaaccagtttatccgccgtatgaaccagctgctggcttcc

SEQ ID NO: 23787 - DNA, 642 bp, Klebsiella pneumoniae
atgcgtattattctgcttggcgctccgggcgcgggtaaaggaactcaggctcagttcatcatggagaaatacggtattccgcaaatctccaccggcgatatgctgcgcgcggcggtaaaatccggctctgagctcggtaagcaagcgaaagacattatggacgcaggcaagctggtgaccgatgagctggtcatcgcgctggtgaaagagcgtatcgcccaggaagattgccgtaacggcttcctgctggacggcttcccgcggaccattccgcaggctgacgccatgaaagaggcgggcattaccgttgattacgtgctggaattcgacgtgccggacgaactgatcgtcgaccgcatcgttggccgtcgcgtccacgcgccatccggtcgcgtataccacatcaaattcaatccgccgaaggtggaaggcaaagacgacgtgaccggcgaagagctgaccacccgtaaagacgatcaggaagagaccgtgcgtaagcgtctggtagaataccatcagatgacagcgccgctgatcggctactacaccaaagaagcgcaggcgggcaacaccaaatacgccaaagtcgacggcaccaaagcggtagctgacgtgcgcgctgaactggaaaaaatcctcggc

SEQ ID NO: 23788 - DNA, 1302 bp, Klebsiella pneumoniae
atgaaatttcccggtaaacgcaaatctaaacactattttcccgttaacgcccgcgatccgctgctgcagcaaattcagccggagaatgaatccagcgtctcctgggtggtcggtatcgaccagacgctggtggatatcgaagcgaaagtggatgaggcgtttatcgtgcgctacggcctgagcgcgggccattcgctggtgattgaagatgacgtcgccgaggcgctgtaccaggagctggtgcgcaacaatctcattacccatcagtttgccggcggcaccatcggcaataccatgcacaactactcggtgctggcggacgatcgctcggtgctgcttggcgtgatgtgcagcaatatcgaaatcggcggctacgcctatcgttacctgtgcaatacctccagccgcaccgatctgaactatctgcagggcgtcgacggcgccattggccgctgctttaccctgatcggtgacagcggcgagcgcaccttcgctatcagcccgggccacatgaacaagctgcgtccggaaagcattccggaagcggtgatcgccggcgcctcggcgctggtgctgacctcttacctggtccgctgcaagccgggcgagccgatgccggacgccacgatgaaggctattgagtatgccaaaaagcacgatgtgccggtggtgttaaccctcggaaccaaatacgtgattgccgataacccggcgtggtggcaggagttcctgcaggagcatgtctctattctggcaatgaacgaagaggaaggggaagcgctgaccggctttgccgatccgctgtcagcggcgaataaggcgctggactgggtcgacctggtgctgtgcaccgccggcccggcgggcctgtatatggcgggcttcaccgaagaagaggcgaagcgtaaaacccagcatccgctgttgccgggggcgatcccggagtttaaccagtttgaattcagccgcgcgatgcgtcaccaggattgcgttaatccgctgcgcatatattcccatatcgctccctatatgggcggccccgagaagatcatgaacaccaacggcgcaggcgacggcgcgctggcggcgctgctgcatgacatcaccgccaataactaccaccgcaataacgtacccaactccagcaagcacaaatgcaaatggctgacctactcctcgctggcgcaggtgtgtaaatatgccaaccgcgtgagctatcaggtgctgaaccagcactcgccgcgtttaacccgcggcctgccggagcgtgaggacagcctggaagaggcgtactgggatcgg

SEQ ID NO: 23789 - DNA, 352 bp, Klebsiella pneumoniae
atgttaaaaatttttaatacactgacgcgccagaaagaggaatttaaacctatccatgccggggaagtcggcatgtacgtgtgtggtattaccgtttacgatctctgtcatatcggccatggacgtaccttcgtctcctttgacgtcgtggcgcgctatctgcgttttctcggctataagctgaagtacgtgcgcaatatcaccgatatcgacgacaaatcattaagcgcgctaatgaaaacggcgaaagctttgtcgcgctggtcgatcgcatgattgccgaaatgcaccaagattttgacgcgctgaatattctgcgtcccgacagcgagccgcgcgccacgcaccatat

SEQ ID NO: 23790 - DNA, 175 bp, Klebsiella pneumoniae
atccgcaccgatcgcgtgattgaaatcgatggcgaaacttttccggtatgtgacgatcgacgtctcctcgaaatcgcatccgtactacacgggcaaacaaaaaaccttcgccaatgaaggcagtgcagcccgattccgccagcgcttcggcggctttattgatgcgaaaaggaaa

SEQ ID NO: 23791 - DNA, 3411 bp, Klebsiella pneumoniae
gtgctattctgcgcgcttgcgacgacccccggtattctccggcatttgcattcattcatattaactatgctgcacacgatctccaggcaacgcgccacgttcatctttattatcacgctgctctgttttattggccttttcagcccagtccagggccgcgccgcggatctccccgatcgggcagaggtgcagagccagctcaatacgttaaacaagcaaaaagaactgactccgcaggacaaactggtccagcaggatctgactcagacgctggaaacgctggataaaatcgagcgtatcaaaagcgagacggcacagctgcgacagcaggtcgagcaggcgccggcgaagctgcgccaggcggtggagagcctcaataacctgagcgatgtcccgaacgacgacgcgacgcgcaaaacgctaagtacgctctccctgcgtcagctggagtcgcgcgtcacccagacgctggacgatctgcagaatgcgcaaaacgatctggcgacctataacagccaactggtttccctgcaaacgcaaccggaacgcgtgcaaaatgcgatgttcaacgcctcccagcagctgcagcagatccgcaatcgtctgaatggcacctcggtgggcgacgagaccctacgcccgacccagcaggtgctgttgcaggctcaacaggcattgctcaacgcgcagatcgagcaacagcgcaagagcctcgaaggcaacactatcctgcaggataccctgcagaagcagcgtgactacgtcaccgcctggagcaaccggctggagcatcagctacagctgctgcaggaggccgtgaacagcaaacggctgaccctgaccgagaaaaccgcccaggaggcggttacccccgacgaaacggcgcgtattcaggccaacccgctggtcaagcaggagctggatattaaccatcagctcagcgagaagctgattcaggcaacagagaacggtaaccagctggtgcagcgcaatatccaggtcaaaaactggctcgaccgcgcgctgcagtctgaacgggatattaaagagcaaatttcagttctgcgggggagcctgctgctgtcgcgtattctttaccaacagcaacagacattaccgtcggcggatgagctgcaggatatgaccaaccgcatcgccgacctgcggcttgaacagtttgaggtgaaccagcagcgcgacgcgctgttccagagcgatgcctttgtcgccaaactggaggaggggcacagcagcgaagtgaacgatgaagtccacgccgcactactggaagtgatcgacatgcgtcgcgaactgcttgatcagttcaacaaacagttgggtaaccagctgatgatggccatcaacctgcagatcaaccagcagcagctgatgagcgtctcgagcagtctgaaggaaattctgacccagcaaattttctgggtgaacagcaataaaccgatggactgggagtggattaaggccttcccggaggcgctgaaaggtcagtttaaggcgatgaaaatcaccgtgaactgggaaaaagcgtggcctgcggtgtttgtcgctttcctggccggtttaccgctgctgttgattgccggcctcatccgctggcgtctgcagtggctcaaggattatcaggcaaagcttgcttcccaggtgggacagctgcgcaacgatacccagctgcatacgccgaaggcgatcctgatcgatctgatccgcgccttaccggtggtgctgttgattctggctatcggtctgatcttactcaccatgcagttaaatattagcggactgctgtgggcgtacagtaaaaagctggctatgttctggctggtatttggcctgtgctggaaagtgctggaaaagaacggcgtcgcggtcaaccactttaatatgccggcgcagttgaccagccactggcggcggcagattgttcgcgtcagcctggcgctgctgccgctgaatttctggtcggtgatttccgaactgtcgccgctgaacctgatggacgacgtgctggggcagttggtgattttcttcaacttactgctgatcgcggtgctggtttggccgatgtgccgggaaagttggcgcgataaagagtcgcacagcctgcgcctgctgacgatcacggtgttgtctatcgttccggtggccctgatggtgctgacggcaaccggctacttctacacgacgctgcgtctggcgggacgctggatcgagaccgtgtatctggtgatgatctggaacctgctgtaccagaccgtgctgcgcggcctaagcgtggcggcgcggcgtatcgcctggcgccgcgcgctggcgcgccgtcaacatctggtgaaggaaggggcggaaggcgccgagccgcaggaagagccaactatcgctctcgagcaggtcaaccagcagacgctgcgcatcaccatgttggtgatggtcgcgctgttcgcggtgatgttctgggcgatttggtctgatttgatcaccgttttcgcctacctcgacagcattaccctctggcactacaacggtaccgaggcgggggccagcgtggtacgcagcgtgacgatgggcagtttgttgttcgccattgtggcgtcaatggtcgcctgggcgctgatccgcaacctgccgggtttgctggaggtgctggtgctgtcgcggctcaacatgcgtcaggggacctcctacgccatcaccaccattctcaactatgcgattatcgctatcggggcgatgacggtattcggggcgctgggtgtctcctgggataaactgcaatggctggcggccgcgctgtcggttggtttaggttttggtctgcaggagatcttcggtaactttgtctccggccttatcattctgttcgaacgtccggtgcgcattggggatacggtcactatcggaaccttctcggggacggtaagcaaaatccgtattcgcgccaccaccatcaccgacttcgatcgcaaagaggtgattatcccgaacaaggcgttcgttaccgagcgcttgatcaactggtcgctctccgacaccgtgacccgggtggtgatccgcctcggcgtcgcctatggctcagacctggataaggtgaaagaggtgctgctgaaggccgcgcacgatcatccgaaagtgatgcaggagccggcgccagcggttttcttcaccaccttcggggccagtaccctggatcatgaactgcgtctgtatgttcgtgaactgcgcgatcgcagctacacggtggatgagctcaaccgcgccatcgaccgcctgtgccgggagaatgacatcaacattgcctttaaccagctggaagttcatctgcgcaatgaaaaaggcgatgaagtcaccgaagtgaagcgggacgggaaaggcgacgatctggcgcccaccaccgcgtcc

SEQ ID NO: 23792 - DNA, 564 bp, Klebsiella pneumoniae
atgagtgaagaaaaacgcaaaatgatcgccggtgagctctatttatctggcgacccaacgcttcgcgccgatcgcctgcgcgccagacagttgttgcaccgttataatcattccgccccggatgaccaggaacaacgtcagcatattctggccgagctgttcgctcgcgccggcgatgcgtatatcgagccaagctttcgctgcgactatggttataatatttttctcggcgccggtttttacgccaattttgactgcgtgatgctcgacgtctgccctatccatattggcgataactgtatgctggcgccaggcgtccatatttataccgccactcatccgctggacgccgatgcgcgtaatagcggccaggaatacggcaagccggtaactattggccacaatgtgtggattgggggtcgggcagtgatcaatcccggcgtgaccattggcgataatgcggtcattgcgtccggcgcggtggtcaccaaagacgtccctgcctgtaccgtcgtcggcggtaacccggcgcagatcattaagcgccttccgccgacaaatccg

SEQ ID NO: 23793 - DNA, 171 bp, Klebsiella pneumoniae
atgtcgctggaaaatgcatccgatgaggtcaaactggccgtcgatttaatcatgttgctggaatcgcatcagatcccggcgcaaaccgtgctgagcgcgctggaaattgtccggcgggattatgcaaacaagttaaaaaacgcggaaagcgggtcgcaaaacccagagaag

SEQ ID NO: 23794 - DNA, 525 bp, Klebsiella pneumoniae
gtgaaaactgctcaacttttacaaacgctgaacgaccagctgagtgagctggccgcgctggtggcgccgctggcggagcacgcgaccctcagcccgcgctttgaccgccagctcttccacacccgcagcacgctgatgcaggcctatctggcggaagcccaacacaactttaaccagctccgccaggccgtcgagcgccagcagatgccgcaggtggtctggattgccgagcgtctggcggcgcaaatcgccgcgctgcgccgtgaaaccgccacctggtccttgcgcagttgggaccacgcgtcgccaacgttgagccgctggcagcgccgtcgcctgcagcatcaggagtatgagcgccgcctggtggcgatgcgcgaccaacgccagcgtcagctggcgcaggcgaccagccttgacgagcagcagcggctggggaaagaagttgaagcctacagcggccggttggcgcgctgccgacaggcgctggacaagattgaaaacgtactggcgcggctgacgcgc

SEQ ID NO: 23795 - DNA, 3144 bp, Klebsiella pneumoniae
atgcctaatttctttatcgatcgccccatatttgcatgggtgatcgccattatcatcatgctggctgggggattatcgatcctcaaattgccggtggcgcaatatccgacgattgcgccgccagcaatttccattaccgccatgtaccccggtgctgacgccgaaacggtgcagaacaccgtaactcaggttatcgaacagaatatgaacggtatcgatcacctgatgtacatgtcctcaaatggcgactccaccggtacggcaaccattacgctgaccttcgaatccggtaccgatccggatatcgcccaggttcaggttcagaacaagctggcgctggcgacgcctctgctgccgcaagaagtacagcagcaagggattagcgttgagaaagcgtccagcagcttcctgatggttgtcggcgtcattaacaccaacggcaccatgaaccaggacgatatttcggactacgtggcggccaacatgaaggatccgataagccgtaccagcggcgtcggcgacgttcagctattcggttcccagtatgcgatgcgtatctggatggatccaaacaaactgaacaacttccagcttacgccggtggatgtgatcagcgccctgaaagcgcagaacgcccaggtggccgcgggccagttaggcggtacgccgccggtgaaaggccagcagcttaacgcctcgatcatcgcgcagacgcgtctgaccaatacggaagagtttggcaacatcctgctgaaggtgaaccaggacggttcccaggttcgtctgcgtgatgtcgccaaaattgagctgggcggcgaaagctatgacgtagtggcgaagtttaacggccagccggcatccggtctgggtattaaactggctaccggcgcgaacgcgctggataccgccaacgctattcgcgctgaactggcgaagatggagccgtttttcccgtcggggatgaagatcgtttacccgtatgacaccaccccgttcgtgaaaatttctattcacgaagtggttaaaacgctggtggaagcgatcatcctggtgttcctggtcatgtatctgttcctgcagaacttccgcgccaccctgatccccaccatcgcggtaccggtggtcctgttaggcaccttcgcggtgctggcggcgtttggcttctcgataaacaccctgacgatgttcgggatggtgctcgccatcggcctgttggtggatgacgccatcgtggtggtagagaacgtcgagcgcgtgatggcggaagagggtctgccgccgaaagaagcgacgcgtaaatcgatgggacagattcagggcgcgctggttggtatcgctatggtgctgtcggcggtatttatcccgatggcgttcttcggcggctcaaccggggccatctatcgccagttctccatcactatcgtttccgcgatggcgctgtcggtactggtggcgttaatcctgacgccggcgctgtgcgccacgatgctgaaacccattcagaaaggcagccatggcgcgaccaccggcttcttcggctggtttaaccgcatgtttgataagagcacgcaccattacaccgacagcgtaggcaacattctgcgcagcaccggtcgttatctggtgctgtatctgatcatcgtggtgggtatggcatggctgtttgtccgtctgccgagctcgttcctgccggacgaggaccagggtgtattcctgagtatggcgcagctgcctgccggcgccacccaggagcgtacgcagaaagtgctggatgagatgacgaattactatctcaccaaagagaaggacaacgtggaatccgtgtttgcggttaacggcttcggtttcgccggccgcggccagaacaccggtatcgcgttcgtttcgctgaaagactggagccagcgtccgggtgaggaaaacaaagttgaagcgatcaccgcgagagcaatgggctacttctcgcagattaaagatgcgatggtcttcgcctttaacctgccggctatcgttgaactgggtaccgcgaccggctttgacttcgagctgattgaccagggcggtctgggccacgaaaaactgacccaggcgcgtaaccaactgtttggcatggtggcgcagcatcctgacgtgctgaccggcgtgcgccctaacggtctggaagatacaccgcagtttaaaatcgatatcgatcaggagaaagctcaggcgctgggcgtctccatcagcgacattaacaccacgctgggcgcagcctggggcggaagctatgtcaacgactttatcgaccgcggccgcgtgaagaaagtgtacatcatgtccgaagcgaaataccgtatgctgccggaagatatcggcaagtggtatgttcgcggcagcgatggtcagatggtgccgttctctgctttctcgacctcgcgttgggaatacggttcgccgcgtctggaacgctacaacggtctgccgtcactggaaatcctcggtcaggccgcgccaggcaagagtaccggtgaggcgatggcgctgatggaagagctggcgggtaaactgccttccggtatcggctacgactggaccgggatgtcttatcaggagcgactgtccggcaaccaggcccctgccctgtatgccatctcgctgattgtcgtcttcctgtgtctggcggcgctgtatgagagctggtcgattccgttctcggttatgctggtcgtccccttgggtgtggttggtgcgctgttagccgccaccttccgcgggctaaccaacgacgtttacttccaggtgggtctgctgaccaccatcggcctgtcggcgaagaacgcaatattgatcgttgaattcgccaaagacctgatggagaaagagggcaaagggctgattgaggcgacgcttgaagcagtacgtatgcgtctacgtccaatcctgatgacatctctggcgttcatcctcggggtaatgccgctagttatcagctccggcgccggctccggtgcgcagaacgccgtcggtacaggcgtaatgggcgggatggtgaccgcgacgatcctggcgatcttcttcgtgccggtgttctttgtggtggttcgtcgccgctttagcaaaaaatcggaagatatagagcacagccatcaggttgagcatcat

SEQ ID NO: 23796 - DNA, 1913 bp, Klebsiella pneumoniae
atgagttatcaggtcttagcccgtaaatggcgcccacaaacctttgctgacgtcgtcggccaggaacatgtgctgaccgcactggcgaacggcttgtcgttagggcgcattcatcacgcttatcttttttccggtacccgcggggtcgggaagacctccatcgcccgtctgctggcgaaagggttaaactgtgaaaccggcatcaccgccaccccctgcggcgtgtgcgataactgccgggaaattgaacaggggcgctttgtcgatctgattgagattgacgccgcctcgcgaaccaaagtcgaagatacccgcgatctgctggacaacgtccagtacgcgccggcccgcggccgctttaaggtctatctcatcgacgaagtccatatgctgtcgcgtcacagcttcaacgcgttgttaaaaacgctggaggagccgccggcgcacgtcaaattcctgctggcgacgacggatccgcagaagctgccggtaacgatcttatcccgctgcctgcagttccacctgaaggcgctggacgttgaacagatccgccatcagctggagcatattcttggcgaagagcagattgcctttgagccccgcgcgctgcagctgttgtcgcgggcggccgatggcagcctgcgcgatgccttaagcctgaccgatcaggcgattgccagtggggaagggcagctgacggccgcatcggtgagcaccatgcttcggcacccttgatgacgatcaggcgctgtcgctgattgaagcgctggttgctgccgacggcgagcgggtcatggcgggcgtcaatgacgccgccgcacgcggcgtcgagtgggaggcgctgctggtcgagatgcagagcctgctgcaccgcgatcgccatggttcagctgtcgccttcggcgctgggcgccgacatggccgcggtcgaagtgcggatgcgcgaactggcgcgaaccgtaccgcccggcgacgttcagctctactaccaaacgctgctgattggccgcaaagagctgccttacgccccggaccggcggatgggcgtcgaaatgacgctgctgcgtgccctggcgtttcatccgcgtaagccgctgccggagccggaggtgcagccggcacaggccgccgcgcccgcgccgcgtcagccggttgcccccgccgcgccgccgccacagtcgccgcagagtttgccgccgaccaccagccaggtgctggcggcccgcagccacctgcagcgcagtcagggagcaaccaccccaaaaaagagtgaaccggcagccgcttcccgcgcgcggccggtgaataacgctgcgctggagcgactgagttcgattaccgagcgcgtccaggctcgtccggccgcggccgcgctggagcaggccccggcgaagaaagaggcctatcgctggaaggcgacgacggtggtggaagagagcaaagtcgaagtcgccacgcccaaagcgctgaaaaaggcgctggagcatgagaagacgccggagctggcggccaagctcgccgaagaagcggtcgagcgcgacagctgggcggcggaagtgagccagctggcggtaccgaagctggtcgagcaggtggcgctcaacgcgtggaaagagcaggagggcagccgcgtctgcctgcatctgcgtcccagccagcgccacctcaattccgccagcgcgcagcaaaagctggctgaagcgctgggggtgttgtacggtacgccggttgaattgaccatcgtggaagacgataatcccgcgatgcgtacgccgctggagtggcggcaggctatttatgaagagaagctcgcgcaggcgcgcgaagccattatcgcggataataacattcagaccctgcgtcgtttcttcgacgccgatctggatgaagagagtattcgccccatttgaatg

SEQ ID NO: 23797 - DNA, 330 bp, Klebsiella pneumoniae
atgtttggtggaaaaggcggcctgggtaacctgatgaagcaggcccagcagatgcaagaaaaaatgcagaagatgcaggaagagatcgctcagctggaagtaaccggcgaatccggcgcgggtctggtgaaagtgaccattaacggcgcgcacaactgccgccgtgtggagatcgacccaagcctgctggaagacgacaaagagatgctcgaagatctggtggctgccgcgttcaacgacgccgcgcgccgtatcgaagagacccagaaagagaagatggcttccgtttctgccggtatgcaactgccgccaggcttcaagatgccgttc

SEQ ID NO: 23798 - DNA, 573 bp, Klebsiella pneumoniae
atggaagcgctgcgctgtctgccgggcgtcggcccgaagtcagcgcagcgcatggcgtttaccctgctgcagcgcgatcgcagcggcgggatgcgcctggcgcaggcgctgacgcgtgcgatgtcggagatcggccactgcgccgattgccgcaccttcaccgagcaggaggtgtgcaatatctgcagcaacccgcgtcgccaggaaaacggccagatctgcgtggtagagagtccggcggacatctatgccattgagcagaccgggcagtattccggccgctacttcgtgctgatggggcacctgtcgccgctcgacggcatcgggcctgatgacatcgggctcgatcgcctggagcaacggctggaggcggagtcgatcaccgaggtgatcctcgccaccaacccgaccgttgagggcgaggcgacggccaactacatcgcggagttgtgcgcgcagtatggcgtcgacgccagccgaatcgcccacggcgtgccggtgggcggcgagctggagatggtcgacggcaccacgctgtcccactccctggccggtcgccacaagattactttc

SEQ ID NO: 23799 - DNA, 819 bp, Klebsiella pneumoniae
atgaataatcgagtccatcagggccatttagcccgtaaacgcttcgggcagaacttcctcaacgatcagtttgtgatcgacagcatcgtctcggcgattaacccgcagaaaggccaggcgatggttgaaatcggccccggcctggcggccctgaccgagccggtcggcgaacgccttgaccagctgaccgtcatcgaactggaccgcgatctggcggctcgcctgcagacgcatccgttcctcggtccaaagctgaccatctatcagcaggatgcgatgaccatgaactttggcgaactggcggagaaaatgggccagccgctgcgcgtcttcggcaacctgccgtacaatatctcgaccccgctgatgttccatctgttcagctatactgatgccattgccgatatgcactttatgctgcagaaggaagtagtgaatcgtctggttgccggaccgaacagtaaggcgtatggtcggttaagcgtgatggcgcaatattattgccaggtgatcccggtactcgaagtgccgccgagcgcgtttaccccgccgcctaaggtcgactccgcggtggtacgcctggtgccgcacagcaccatgccgtatccggtcaaagagatccgggtgctgagccgcatcaccaccgaagcgttcaaccagcgccgcaagactatccgcaacagtctcggcaatctgttcagcgtggaagtgctgaccgagctgggcatcgacccggccatgcgcgccgaaaatatttccgtggcgcagtactgcctgatggccaactggctgtctgacaatctgccaacgaaggagagc

SEQ ID NO: 23800 - DNA, 765 bp, Klebsiella pneumoniae
atggatacctacatgacaaatgcagtaaccgtaaagaacatcaccttccaggaaggggaaaccctcatttgtgtaccgctgatcggtaaaaccctggatgagatactgggtaacgcccacggcctggtcgatgccggcgccgatattatcgaatggcgcgttgaccactttgcccaggtcagagagatggcccaggtgatggccgcgctggcggaaattcgtggcgcgctgaaagcgcttccgctgctgtttaccttccgcagtaagaaagaaggtggcgaaaccgagctcagcgacgaagcctattttgcgctcaaccgcgaggccgcacgcagtggactggttgatgttatcgatatcgaactgttcaatgatgaagcgcagatccgcgcgctggttgacgatgcgcatgccgcgggcgtcaaggtgatcatgagtaatcatgatttccataagacccccgctcaggaagatattatctatcgcctgcgccgcatgcaggatctgggggccgatctgccgaagatcgcggtgatgccgcagtcgccgcaggatgttctgaccctgctggccgccacgctgaccatgaaagagaagtatgcgacgcgtccgctgatcaccatgtcgatgggcaaatccggtggcgttagccgggtcaccgggcgcttgttcggttcggcgatgaccttcggtaccgttggtcaggcctccgcgccggggcagatcgccatcgctaagctgcgtgaagtgatggatattctctcc

SEQ ID NO: 23801 - DNA, 1653 bp, Klebsiella pneumoniae
atgtcttccggccgtctgcaacaacagttcattcgcctatggcagtgctgcgacggcaagtcgcaggagaccacccttaacgagctggcggaaatgctgagctgctcgcgccgccatatgcgcaccctgctcaatatgatggagtcccgcggctggctgacctgggaagcggaggcaggccgcggcaagcgttcgcggctaacctttctctataccggcctcgccctgcagcagcaacgtgccgaagatctccttgagcaggatcgcatcgatcagctggtgcagttggtcggcgataaggctgccgtccgccagatgctggtctcgcatctcggccgcagcttccgccaggggcggcacatcctgcgcgtgctctactatcgtccgatgaagaatttgctgccaggtagcgcgctgcggcgttcggaaacgcatattgcccggcaaatattcagcgccctgacgcgggtaaatgaggaaaatggggaactggaagccgatattgcccaccactggcagcagctgacccccacccactggcgctttttcctccgtcccggcatccattttcaccatggccgtgagctggagatggcggatgtgatcgcctctctgcagcgcagcaatgccctgccgctctattcacatatcgaacgcatcgaatcgcccaccgcctggaccctggatattcatctgcgccagcccgaccgctggctgccctggctgctggggcaggtgccggcgatggtgctgccgcaggagtggcagaccatgaaccacttttcctccatgccggtcggcaccggcccctatgccgtggtgcgtaacaaccagaatcagctcaagatccatgcctttgaggactattttggctaccgggcgctgatcgatgaggtgaacgtctgggtgctgccggagattagcgaagagcccaacggcggcctgacgctgcagggcaataccgaaagcgaaaaagcggtagagagtcgcctggaagagggctgctattacctgctgttcgactcgcgaagcccgctgggggccaacgacgcggtgcgccgctggctaagctatctgtttcagcccgccaacctgctctaccatgcgggcgaacactaccagggcaactggtttcccgcctacggcctgctgccgcgctggcatcacgccagcaaccacgcctgcgagaagccggcggggctggagacagtcacccttacctactaccgcgatcacgtcgaacatcgggtgatcggcgggatcatgcgcgacctgctggcggcgcatcaggtaaagctggagatccaggagctggagtacgatgcctggcatcgcggcgaggtggtcagcgatatctggctcaacagcgtgaacttcaccttaccgatcgaattttcgctcttcgcctatctgtacgaagtcccgctgattcagcgctgcattcccattgactggcaggcagacgcctgccgctggcgagcaggagagtttaatccggccacctggagccagcggctgctggccgggcaacatatcgtgccgctgatccaccactggctgatgattcagggtcagcgcagtatgcgcggcgtgaggatgaataccctcggctggttcgattttaaatccgcatggtttgcgccgccggagccg

SEQ ID NO: 23802 - DNA, 981 bp, Klebsiella pneumoniae
gtgttgaaaaaattactcccgctgctggcgctggtcgccatgcccgctttggctaagcctgttcttaccgtctatacctatgactccttctctgccgactggggccccggcccggcggtcaaaaaagcctttgaagcggagtgcggctgcgagctgaagttcgtcgcgctggaagatggcgtttcgctactgaatcgcctgcgcatggaaggcaaaaacagcaaggccgacgtcgtgcttggccttgataacaacctgctggaagccgcggcgcagagtaagctgtttgccaaaagcaacgtacccgccagcgcggtcagcgtgccgggcggctgggataatgaaacctttgttccctacgactatggctatttcgccttcgtctatgacaaaaacaaactggctaatccaccgaagagcctgaaagagctggtcgaggggccgcaaaaatggcgggtcatctatgaagatccgcgtaccagcaccccgggactgggcctgctgctgtggatgcaaaaggtctatggcgatcaagcgcccgaggcctggcagaagctggccgcgaaaaccgttaccgtcaccaaaggctggagcgaagcctatggtctgttcctgaaaggggaaagcgacctggtgttgagctataccacctcgccggcctaccacattattgaagagaagaaagacaactatgcggcggcgagcttcgccgaaggccattatctgcaggtcgaagttgccgcgcgtaccgccgccagcaagcagccggaactggcggagaagttcctcaaatttatggtctcgcctggcttccagaacgcgatccccaccgggaactggatgtatccggtgactcaggtcgcgctgccggccgggtttgataccctggtgaagccgcagaccaccctgtcctttaccccacagcaggtcgccagcgagcgtcaaacctggattagcgcatggcaacgcgccgtcagccgc

SEQ ID NO: 23803 - DNA, 861 bp, Klebsiella pneumoniae
atgtcctggtcaatcgatattatttcctgcataaccgatcgctttgtggaactcacggcgaccgaaaaacgcattgcgcagtttattctcgatgatgtcgcggcggcggcggagctgcccatcgccgagatagcgcgtctgacgcaaaccagccaggcttcggtcacccgttttgcccgggcgctcggctgtaaagacgtccgcgagctgaagatgaagcttgcgcaatctcttgcggtcggccagcggtttatcctcgatgttccggatctcgaaggcgtccaggggatctatgagtcaatcatcagcgtactggagaccaaccggcgggcgctggatatcgaggcgctgaagcgcgcggtgagctggctgagcgatgcgcggcagatcctcgccctggggatgggcggcggttcgaccatctgcgctcaggaaattcagtatcgcctgtttcgcctcggtctgccggtagtcagccagagcgatggtctgctggtacgcatgatgagctcggcggtgacgccgcaggatgtggtgatcgtgctgtctctgggcggctatacccgggaaatcatcgagagcgcggcgattgccagccagtacggcgcgaaggttattgcgattacccccgccggaacgccgctggctgaacaggtggatctggtgctaccgctgctggtacgggaaaacgactatatctttaagcccagcacttcccgttacgcgatgctggcgatggtcgatgtgctggccaccgaactggcgatggccaacaaaacccaggcaaaaggcaaattacgccgtattaagctggcgctcgacagccaccgcggcggcgtcgatcggcagccgctgggggac

SEQ ID NO: 23804 - DNA, 1750 bp, Klebsiella pneumoniae
ccaggttttactatggataccaaaaaactattcaagcacataccctgggtgattctcggaatcatcggggcattttgcctctcagtcgtcgccctgcgccgcggtgagcacgtcagtgccctgtggatcgtcgtcgcgtcggtttccgtgtacctcgtcgcctaccgttattacagcctgtacatcgcgcagaaggtgatgaagcttgacccgacgcgctccacgccggcggtcattaataacgatggcctgaactatgtgccaaccaaccgctacgtgctgtttggccaccactttgccgccattgccggcgctggcccgctggtcggcccggtactggccgcgcagatgggctatctgccgggcaccctgtggctgctggccggcgtggtgctggcgggcgcggtacaggacttcatggtgctgtttatctcctcgcggcgtaacggcgcctcgctgggcgagatgattaaacaggagatggggccggttccgggctctatcgccctgttcggctgcttcctgattatgatcatcatcctcgcggtgctggcgctcatcgtggtgaaagcgctggcggaaagcccgtggggcgtgtttaccgtctgctcgacggtgcctatcgccctgtttatggggatctacatgcgcttcctgcgcccaggccgcgtcggtgaagtgtcggttatcggtatcgtgctgctggtggcctctatctggttcggcggcgtgattgcccacgacccgtactggggcccggcgctgacctttaaagacaccaccatcacctttaccctgattggctacgcgtttatttccgccctgctgccggtatggctgattctggcgccgcgcgattatctggccaccttcctgaaaatcggcgtaatcgtcggcctggcgctggggatcgttatcctcaacccggacctgaaaatgccggcagtgacccagtacattgatggtaccggtccgctgtggaaaggcgcgctgttcccgttcctgtttatcaccatcgcctgcggcgcggtctccggcttccacgcgctgatcgcctccggcaccacgccgaagctgctggccaacgaaaccgatgcccgctttattggctacggcgcgatgctgatggaatcctttgttgcagtcatggcgctggtcgccgcctcgattatcgaaccgggcctttatttcgcgatgaacaccccgccggcaggcctgggcatcgtcatgccgaacctgcatgaaatgggcggtgaaaacgcggcgatgatcgcagcgcagttgaaagaagtcaccgtccacgcggcggcgaccgtcagctcctggggctttgtgatttcacctgagcagatcctgcagacggcgaaagatatcggcgaaccttcggtactgaaccgcgctggcggcgcgccgacgctggccgtcggtatcgcccacgtattccataaaatcatcccgatggcggatatgggcttctggtaccacttcggtatcctgtttgaagcgctgtttatcctcaccgcgctagatgcgggtacccgcgcaggccgctttatgctgcaggatctgttgggtaacttcgtgccgttcctgaaaaaaaccgactcgctggtcgccgggattatcggtaccgccggctgcgtcgggctgtggggctacctgctgtatcagggcgtggtcgacccgctgggcggcgtgaagagcctgtggccgctgttcggtatctctaaccagatgctggccgccgtgg

SEQ ID NO: 23805 - DNA, 201 bp, Klebsiella pneumoniae
atgtttggtaacttaggtcaggcaaaaaaatatctcggtcaggcggcaaaaatgctgattggcattccggattacgacaactacgtcacgcatatgcaaaccaaccatccggatcagccgtacatgacttatgaagaattcttccgcgaacgccagcaggcccgctacggcggcgacggcaaaggcggcgtacgctgctgt

SEQ ID NO: 23806 - DNA, 954 bp, Klebsiella pneumoniae
atggcaccgattgcagtcaccctactcaccggttttctcggcgcaggaaaaaccaccctgctgcgccatatcctcaatgagcagcacggtttcaaaatcgccgtaattgaaaacgaattcggcgaagtctccgttgacgatcagctcatcggcgaccgcgccacgcagattaaaaccctgaccaacggctgtatctgctgtacacgctccaacgaactggaagacgccctgctcgatctcctcgacagtcgcgatcgcggcgaaatcgagtttgaccggctggtgattgaatgcaccggcatggccgacccggggccgattatccagacctttttctcccatcaggtgctctgcgagcgctatctgctggacggcgtgatcgccctggttgacgccgtccatgccgaccagcagatggatcagttcaccatcgcccagtcgcaggtcggctacgcggaccggatcctgttaaccaaaaccgacgtcgccggcgacaccgaaaagctgcgtgaacggctggcgcgcattaacgcgcgggcgccgatttataccgtcattcacggcgatatcgatttaagccagttgtttaacaccagcggttttatgctggaagagaaggttgtcagcgccacaccgcgctttcattttgtggcagaaaaacagaatgacgtctcgtcgattgtggtcgagctcgactatccggtggatatcagtgaagtttcacgggtaatggaaaatctgctgctctccttcgccgagcaattgatgcgttataaaggcatgctgtggatcgacggcgagccaaatcgcctgctgttccagggcgtgcagcgcctctacagcgccgactgggatcgcccgtggggcgatgaaacgccgcacagcacgctggtgtttatcggcattcagttgccggaagaggaaattcgcgcggcgtttgccgggttacgacgc

SEQ ID NO: 23807 - DNA, 2289 bp, Klebsiella pneumoniae
gtgtcagagttgttatccatcgccttatttttagcttcggtggtgctgtatgcctggaaagcgggtcgtaacacctggtggtttgccgccacgctcacggtgttaggcctgttcgtggtgctgaatatcaccctctacgccagtgactacttcaccggcgacggcatcaacgacgcggtactctacactctgaccaacagcctgaccggcgccgggatcggcaaatatatactgccgggggtcggcgtggccgtcgcactggtcgccgtctttggcgccctcggctgggtgctgcgccgccgtcggcatcatcctcatcacgtcggttacagcctggcggcgctactgctggcgctggcctccgttgatgccagcccggccttccatcagatcagcgagctggtgaaatcccagtcacgcgagggcgatccagactttgccgcgtactataaggagccgtcgaagcaaatcgacaatccgcagctgaacctggtctatatctatggcgaaagtctcgagcgcacctattttgataacgacgccttccccaacctcacccctgagcttggcagaattaaagatgaggccattgatttcagcaataccatgcagctgccggggaccgattacactatcgccggcatggtcgcctcacagtgcggcattccgctgttcgcgccgttcgaaggtaatgcctcagcctcagtctccagcttctttccacagaatatttgccttggcgatattctgaagaactccggttacgagaattactttgtgcagggggctaacctacgctttgcgggcaaagacgtgtttcttaaatcccacggcttcgatcatctgtacggggcggaagagctaaaaactacggtggcggatcctacctaccgcaacgactggggcttctatgacgacaccgtactcgacgagacctggaaaaaattcgaagagctgtcgcagtccgggaaacgcttctcgctcttcgccctgacggtggatacccaccatcccgacggttttatctcacgcacctgcgagcgtaaacgctatgatgtggacggcaagaaaaacctctctttcagcgccgttagctgcagtcaggaacatatcgccgcgctgatagagaagattaaagcctcaccctatttcaaaaacacggtcatcgtggtctcttccgatcacctggccatgaagaacagcgcctgggattatctcaacaagcacgatcgcagcaatctgttcttcgtcctgcgcggcgataaaccgcagcaggagaccctggcggtgaaacgcaacaccatggataacggcgcgacggtgctggatattctcggcggcgataactatatcggcctcgggcgtagcagcctctccggccagtcgctctccggtattttcatgaatatgaaagagaaagtcctggcatggaagcctgacgtgatccgcctgtggaatttccccaaagaaatgaagaatttcaccatcgactcgcagaaaaatatgatcgctttctccggcagccatttccgtctgccgctgctgctgcgggtatctgaccagcgcgtagaaccgctgccggagagtgaatactctgcgccgctgcgcttccagctggccgatttcgcgccacgggataatttcgtgtgggtcgatcgctgctataaaatgggccagctgtggtcgcctgagctggcgctctccaccgactggtgcgtctcgcagggacagctggggggtgagcagaaggtccagcacgttgataagccgcagtggcacggcaagaccgccttcagggacacccttatcgatatggagcgctataagggcaacgtcgatacactgaaaattgtcgacaacgatattcgctataaggccgacagcttcgtgtttaacgtcgctggcgccccggaagaggttaaacagttcagcggtatttcgcgtcccgagtcgtgggggcggtggtccaatgctcagttgggcagcgacgtgaagattgaatataaagagccgctgccggagaaatttgatctggtgatcaccgccaaagcttatggcccaaacgccaataagccaattccggtgcgagttggagaaagtgagcaagtactcactctggataatgacgtgactaccacgacgctgcattttgacaacccaacgcgcagcaacacgctgatcatcaccccgccggacccgcaaaccactaacgagggcaatatcctcggccactccccgcgtcagttggggatcggcatggtggagatcaaagtggtgaaaagcgaaggc

SEQ ID NO: 23808 - DNA, 1373 bp, Klebsiella pneumoniae
atgaaaggtaccatcttcgccgttgcgctcaatcatcgcagccagctcgacgcctggcgcgaggcgtttcaacaggccccctacaagacgccgccgaaaaccgcggtctggtttatcaagccgcgcaataccgtaattggcgatggcgaagcgatcccgtctccacagggcgagaccgtacaaagcggcgcaacggtggcgctgattgtcggcaaaaccgcgcgtaaagtggcggcggaagaggcggcgaactatatcgctggctacgcgctggctaacgatgtgagtctgccggaagagagtttttatcgcccggcgatcaaagccaagtgccgcgatggcttctgccccatcggcacgctatcggcggtacgcaacgtcgacgatctgaccatcatcaccgaaatcaacggccgcgaggcggatagctggcataccggcgatctgcagcgtaatgccgcgcagctgctgagcgccttgagcgaattcgccaccctcaatcccggcgacgcgatccttatcggcacgccccactctcgcgtcacgctgcgccccggcgaccgggtacgtattctcgccgacggtttcccggcgctcgaaaacccggttgtcgcagaaggagagctggcatgaaacaggcacgcattgaatggcaaggacaggtacgcgacgtgctagtcaatgaacgcgaccaggtgcgcctggacgatggcacggtattaaaagaaggtgaattccgctggctgccgcccgccgacggcacgctgttcgcgctggggctgaattacgccgatcacgccagcgagctggaatttaaaccgccaaccgagccgttggtattcatcaaagcgccgaacacctttactggccaccagcagcagtcggtacgcccggataacgtcgaatacatgcactacgaagccgaactggtggtggtgattgggaaaaccgcgcgccgcgtcagcgaagccgaggctatggattatgtcgctggctataccgtgtgcaatgactacgcgatccgcgactatctggaaaactactaccgcccgaacctgcgggtgaaaagccgcgacaccctgacgccgatcggcccgtggatcgtcagcaaagaggcgatcccggatccgcataatctggccctgcgcacctgggtcaacggcgagctgcgccagcagggcaccaccgccgatctgatcttcagcatcccgttcctcatcgcttatttaagcgaatttatgaccctgcaaccgggcgacatgatcgccaccggcacgccgaaagggctatccgacgtggtaccgggcgacgaggtgatcgttgaagtcgagggcgtgggccgcctggtcaaccatatcatcagccagcaagcg

SEQ ID NO: 23809 - DNA, 855 bp, Klebsiella pneumoniae
atgggtaagttagcgttagcagcaaaaatcactcacgtgccgtcgatgtatctgtctgagctaccggggaaaaaccacggctgccgtcagggcgctatcgacgggcataaagaaattggtaagcgctgtcgtgaaatgggcgtcgataccattatcgtgttcgacacccactggctggtcaacagcgcctaccacatcaactgtgccgaccatttccagggcgtctacaccagtaacgaactgccgcattttattcgcgacatgacctacgactacgacggcaacccggagctgggccacctcattgccgacgaggccgtcaagcttggcgtacgcgccaaagcgcacaatatccccagcctgaagctggagtacggcaccctggtgccgatgcgctacatgaatagcgataagcatttcaaagtggtgtccatttccgccttctgtaccgttcacgattttgccgatagccgcaggctgggcgaagcgatcctcaaagccattgagaaatacgacggcaccgtggcggtgctggccagcggttcgctgtcgcaccgctttatcgatgaccagcgcgccgaagaggggatgaacagctacacccgcgagtttgatcatcagatggatgagcgggtggtgaagctgtggcgcgagggcaaattcaaagagttctgcaccatgctgccggagtatgccgactactgctacggcgaaggcaacatgcacgacacggtgatgctgctcggcctgctgggttgggataaatacgacggcaaggtggagtttatcaccgagctattcgccagctccggtaccggccaggttaacgccgtgttcccgttgccagcgcaggcg

SEQ ID NO: 23810 - DNA, 380 bp, Klebsiella pneumoniae
atgccgcattttatcgccgaatgtaccgacaacatccgcgagcaggccgatctgcctgggctgttcgccaaagtcaacgaggcgctggccgccaccggcatctttccgatcggcgggatccgcagccgcgcccactggctggatacctggcagatggccgacggcaggcaggattacgccttcgtgcatatgaccctgaagatcggcgccgggcgcagcctggagagccgtcaggacgtgggagatatgctgttcgcgctgatcaaatcccacttcgcgacgctaatggagagccgctatctggcgctgtcgttcgccatggaagagctcgacccgacgctgaactacaaacaaaacacgtgcacgcgttatttaaataa

SEQ ID NO: 23811 - DNA, 1035 bp, Klebsiella pneumoniae
atgacagatcaaccgcaacgccatcgccgctgggtactggcttcccgcccccatggtgaaccgacggcagagaatttccgcctggaagagagcgaagtgccgacgccaggcccgggtcaagtgctgctgcgtaccgtttatttatcgctcgacccgtatatgcgcgggcgcatgagcgacgcgccgtcctattcgccgccggtggccattggcgcggtgatggtgggagggaccgtgagtcgtgtggtcagctcaaatcatgccgattatcaacccggcgactgggtgctgggctacagcggctggcaggattatgaactctccgacggcagcggactggtgaagctgggtgacaatccgcaacacccgtcctggtcgctgggagttctggggatgcccggcttcaccgcctacatgggtttgctggacatcggccagccaaaggcgggcgaaacgctggtggtcgccgcggcgaccgggccggttggcgccacggttggacagatcggcaaaattaagggctgccgcaccgtcggcatcgctggcggcgcggaaaaatgccgctatgcggttgagacgttaggctttgatctctgccttgaccatcgtgcggatgattttgccgaacagctggcccaggcctgcccgcagggtattgacgtttattatgaaaacgtcggcggcaaggtttttgacgcggtgctgccgctgttgaataccgcagcgcgggtacccgtctgcgggctggtgagcggctataacgccaccgggctgccggacgggccagatcgtctgccgctgctgatggcgaccatcctcaaaaagcgcatccggatgcagggctttattattggccaggattacgggcatcggatcgccgaattccagcagcagatggggcgctgggtgcaggaggggaaaattaaatatcgcgaacagcttatcgacggtctggaccaggcgccgcaggcgctgatcggcctgttaaaaggtgagaacttcggtaaggtagtgatccgcgtcgcggcggacgac

SEQ ID NO: 23812 - DNA, 933 bp, Klebsiella pneumoniae
atggcactgccgattatgattgattgcgatccgggacatgatgacgcgatcgccctggtcctcgccctcgcctcgccggagctggaggtgaaagccgtcaccgcttccgcgggcaaccagaccccggagaagaccctgcgcaacgtgctgcgtatgttgacgctgctgaaccggccggacattccggttgccggcggcgcgtggaagccgttgatgcgcgatctgatcatcgccgataacgtgcacggcgagagcggactggatggcccgagcctgcctgagccggcctttgcgccgcagaactgcaccgccgtcgaactgatggccagcgtgctgcgggaaagccaggagccggtgaccctggtggccaccgggccgcagactaacgtggcgttgctgctcgccagccatccggagctgcacgcgaagatcgcccgcatcgtgatcatggggggcgccatggggctgggcaactggcagccggcggcggagtttaatatttacgttgatccgcaggccgcggaaatggtctttcagtccgggatcccggtggtgatggcgggccttgacgtcacccataaggcgcaaatccttcccgccgatatcgagcgattccgccagattggcaacccggtgtcgaccatcgtcgccgagctgctcgacttctttatggcctaccacaaagatgaaaagtggggcttcgacggcgcgccgctgcacgatccctgcaccatcgcctggctcctcaagccggagatctttaccacgatcgaacgctgggttggcgtagaaacggaaggcaaatatacccaggggatgacggtggtcgattactaccatctgaccggcaatcggcccaataccaccctgatgctggatgtggaccgcgaagcctttgtcgatctgctcgcccagcggttagccttctacgcc

SEQ ID NO: 23813 - DNA, 1059 bp, Klebsiella pneumoniae
atgtcattacgtcattttgccgcgccgcgtctgcgccattcactgctcgtcacttctctgctgctggcaggcagctttagcgcccacgccgcggaagagatgctgcgcaaggccgtcggaaaaggggcctacgaaatggcctacagccagcaggagaatgcgctgtgggtcgccacatcacagagtcgttcgctggacaaaggcggggtggtttaccgtcttgaccccaccaccctcgacgtgacgcagattattcacaacgatctgaagccgttcggcgccactatcaaccatgccaccggcacgctgtggtttggcaataccgtcgacagcactgtcaccgctattgacgccaaaaccggcgccgtgaaggggcgtctggtgctggacgagcgtcagcgcagcgaaaccgtgcgcccgctgcagccgcgcgagctggcggtcaatgagcagaccaacacggtctacattaccggtctgggcaaagagagcgtgatttgggtggtagatggcgcgaccctgaagctgaaaacgaccattaccggcaccggggcaatggcgacgggtctggcgatcgatccgcaggctaagcgtctgtataccaccaacgccgatggcgaactgctgaccatcgacagcgagagcaacacgattgcgtcgcgaaaaaaattgcaggatgacggcaaagcgcatttctatcttaacctgagtctcgataccgccggccatcgtgcctttattaccgacagcaagcagccggaagtgctggtggtcgatacccgcgacggcaaggtgctggagaaaatcgccgcgccggagtcgctggcggtgctgtttaacccggcgcgcaacgaagcctatgtgacgcatcgtaaggccggggaagtcagcgttatcgacggcaagagctacaaggtagtgaagacctttaaaacgccgactcaccccaacagcctggcgctctccgaggacggcaaaacgctgtacgttagcgtgaaacaggcttccagccgtgagaaagaagccaccgcgccggacgatgtgatccgcatcgccctc

SEQ ID NO: 23814 - DNA, 1360 bp, Klebsiella pneumoniae
gcttttccgcacaatttcttatggggtgccgctaccgcagcgtatcaggttgagggaggacacgacgccgacggtaaaggaccgtcaatctgggatatctactctcatctgccgggtaccacctttgaaggcaccaccggcgatattgccgtcgaccactatcaccgttttcgcgaagacgtggcgttaatggccgagatgggcctgcaaagctatcgattctccatctcctggccccgcctgctgcccgccgggcgcggtaaggtgaatgaagcgggagtccagttttacagcgatctgatcgacgaactgctggcgcacaatattgagccgatgatcaccctctatcactgggatctgccgcaggccctgcaggatgagggcggctgggaagcgcgcactaccgccgaggccttcgccgagtacgcccgcctgtgctatgcgcgctttggttcacgggtgaagctgtgggctaccttcaacgaaaccattgtcttcattgggcacggctacattaacggcctccatcccccggcggtccgcgatccggcgcgtgctattcaggcctgccaccacgtatttatcgcccatgcgctggcggtgaaggcctttcgcgagatggctgtggccggcgagattggcttcgtcaacgtactgcaaccgcataccccgctcaccgacagcgaggcggacatcaaggccaccgaactggctgacgccatccatactcactggctgtacgatccggtgctgaaaggcacctatcctgccgacctgctggcgcagacccaggcgctgtggggggtacctcgctttgctccaggcgacgacgcgctgctccgtgacaaccgctgcgactttatcggtctgaattactatcgccgggaaacggtatctgcccagccgcctgagatcgctaccggcggtgagcctggcgtggagggattattctatttcgtgcgtaatccccagagtacatataccgaatggggctgggaaatctggccgcaggggctaactgacggcattatgatgattaaggcgcgctatggcgatattccgatatatatcaccgagaatggcctcggcgcgaaggacccgattattgacggggaagtggtcgacgacccgcggattgattatctcagcagccatattggcgccctcgaaaaagcgctggcgctgggggcagatgtgcgcggctattacccctggtcatttatcgatctgctgagctggctcaacggctatcaaagcatatggttttgtctatgtcgatcaccagcgaaatctggcgcggaaacgaaagaagagtttttattggtacaaatctgttattgccagtcacggcgaacagcgt

SEQ ID NO: 23815 - DNA, 1410 bp, Klebsiella pneumoniae
atgaaaaagtatcaacagttggcgcagcaactgaccgagcagatcgcccttggcgtctggttgcctggcgatcggctgccgtcgctgcgcgagcaggtgatcagcagcggcatgagctttatgaccgtcagccatgcctatcagctgctggaaagccaggggcgcatcgtcgcccgtccgcagtcgggttattatgttgccccccagccggtgaagctccgccagccggcgccgcctgcccaggtcactcgcgatgaagccgtcgatatcaatacctatatctttgaggtgctccaggccagccgccaggcgtcgatgctgccctttgcctcggcctttccggacccgcgtctcttcccgctgcagcagctcaaccgctcgctggcgcaggtgagtaaaaccgccaccgccatgagcgtcattgagaatctgccgccgggcaatgcagaactccggcatgccattgcccgtcgctatgccctgcaggggatgaacgtctcgccggacgagatcgtcatcaccgccggggcgctggaggcgcttaacctcagcctgcaggcggtgaccgagccgggagactgggtggtggtggaaaacccctgcttctacggcgccctgcaggcgctggagaggctgcgtttgaaagcattgtcggtagccactgacgtcagggaaggcattgatctgacggcgctggaggcggccctgcaaaactatccggtgaaggcctgctggctgatgaccaacggccagaatccgctcggcttcaccctcagcgctgaaaaaaaagcggcgctggtggcgctgctggcgcgctataacgtgatgttgatcgaagatgatgtctacagcgagctctattttggccgcgaaaagccgttaccggcgaagttctgggatcgccaggagatgacgctgcactgcagctcgttctcaaaatgtctggtacccggctttcgtatcggctgggtggcggccggcaaacaggcgcggcggatccagcagctccagctgatgagtacgctttccaccagttcgccgatgcagttagccctggtggattacctgtccaccaagcgctatgacgcccacctgcgccgtctacgtcgtcagctggcggagcgtaaacagcaggcctggcaggcgctgctgcgccatctgccgccggaggtcgtcgtccaccacagcgacagcggctactttctgtggatcgaactaccggaaggggccgacgctagcgcacttagcgcccgggcgctggcgtcgcacatcagtattgccccagggaaaatgttctccacctccgacagctggacctcgtttttccgttttaataccgcctggggctggggggaacgcgaagagcagggggtgaagcgcctggggaagcttattcgcgaacagcttgcc

SEQ ID NO: 23816 - DNA, 976 bp, Klebsiella pneumoniae
caggtgctaaacctgccggcgggttattttggcatggtgctcggcaccatcggaatgggcttcgcctggcgttacgccagcaccctttggccggtcagccgcagcattggtgatgggctggtgacgctggcgatggcgatgtgggtcctgctcagcatggcgtttatcagccgggcgatccgctttccggcgagcgtgctgcgggagatgcgtcatccggtgagcagcagcttcgtcagcctgtttccggccaccacgctgttggtggcgattggtttggctccctggtgccggccgctggcgatcgggctgtttgtgccgggcgtggcgctgcagctcgcctatgccgcctggcaaagcggtgggctatggcgggggaaccatcctcgcgaggccaccacgccggggttgtatctgccgacagtagccaataattttatcagcgcgatggcctgcggcgcgctgggattttccgatgccggactggtgttcctcggcgccggggtcttctcctggctgagcctcgagccggcgatcctccagcgtctgcgcagcgcaggcgagctgccgacgccgctgcgcacctcgctggggatccagctggctcctgcgctggtggcctgcagcgcctggctcagcgtaaacggcggggaggccgataccttcgctaagctgctgtttggttacggcctgctgcagctactgtttatgctccgtctgatgccctggtatcttcgtcagccgttcaatgcttctttctggagcttctcgttcggcatttccgcgctggccaccaccggtctgcatctcggccaggccaggggagacggcttttttcatcatctggcgatgccgctatttatttttagcaatctggttgtcggcctgctgctgctgcgtacagcagttgctgttggtcagcggaaaactgttgctccaggtcgaccgggaaacactcctgaataagaaggaagga

SEQ ID NO: 23817 - DNA, 993 bp, Klebsiella pneumoniae
atgaatactgaagccactcaagatcatcaagaagcaaacaccacgggcgcgcgtctgcgtcacgcccgcgaacaactcggacttagccagcaagcggtggccgaacgcttatgcctgaaggtgtccacggttcgtgatattgaagacgataaggcccccgccgacctcgcctccaccttcctgcgcgggtacatccgctcctacgctcgcctcgtacatattccagaagacgagctgctgccgatgatggccaagcaggcgcccatccgcgcggcgaaagtcgcgccaatgcagagtttctctttaggcaagcgccgcaaaaagcgcgacggctggctgatgagcttcacctggctggtgctgtttgtggttatcggtctgagcggcgcctggtggtggcaagaccataaggcgcagcaggaagagatttcgaccatggccgatcagtcttccgctgagctgaacggcggcgacgccaacagccagaacgtgccgctggataccagcgcccctgcagccccgaccgccgatagcgccgcgaacagcgcgccaaacgataccgccagcgcaccgaccaccagcgcgccggtccagacgccagcggataataacgctgtcgtggccccttcccaggccaatgtcgataccgcggggacgacgccggcagctccggctaccaccccagcctcgccgttgccgaccgatcaggcgaacgtcacgactccggcggcgtcggcgcaggatctggtgatgaacttttccgccgactgctggctggaagtgagcgatgccaccggtaaaaaactgttcagcggcctgcagcgtaaaggcggtaacctgaacctgagcggtcaggcgccgtataagctgaaaattggcgccccggccgcggtacagatccagtatctgggcaagcctgtcgatttaagtcgttttatcagaactaaccaggttgcgcgtctgaccctcaatgccgaatcatcaccggcgcag

SEQ ID NO: 23818 - DNA, 1194 bp, Klebsiella pneumoniae
atgcagcgtactggctttaataacgcccgggtccggcaggccaataagtcgatttttctttcccatctgtggcgggaaaagcagctcagtaaatcacagctctctcaactcaccggtctctccattccggcggtgagcaatattctggccgagctgcttagcgagggattgatcggtcactcaacggaacacttgagcaaacggggcgtgaacagcggcagctaccagatccccgagcacggcgcctggacactgtgcatgaatatcaccccgaccagcattgaatatcagcttgccgacgcccgcctgctggcagtggatggccatcagcatttgccggtcaacgcgcccactcctcaggccctgcttgaggccattgttgaatgctggcggcatatccaccgccgctacccgcagcacagcatcaatctcgcccttggcgtgcatggacaggttgatccgattaccggcgtttcacaaaccatgccccaggcacgctggaaaacaccgatcgaaataaagtatctgcttgaggagcggcttggcgtgcaggttcgggtggataacgactgcgtgatgctggcgctggcggagaagtggcagcatcagggtacacagcaggatttttgcgtgatcaacgtcgactacggtatcggctcgtcatttgtgattaacgatcatatttatcgcggcagtctgtacggcagcgggcagattgggcatacgattgtcaatcctgacggcaacgcctgcgactgcggaagatacggttgcctcgaaaccgtcgcctctctcagcgcgctgaaaaaacaggcccgaatgtggctcaaaacgcagcctgaagcaacgctcgcccccgagcagttaaccacggcgtcgctcattgaggcctggaaagagggagatgtgcaaattcgcgcatgggttgataacgctgccaacgcgattggcttaagcctctataatttcctgaatatattaaacattaatcaaatctggctttacgggcgcagctgcgccttcggtgagcagtggctggaaagtatcgttaaacaaacgggtttcaacccctttgaccaccgggatacgccgcgagcgcacgccacccaaattggctttggccagctgacacgcgcccagcagctgatggggataggttatctgtacgttgaggagcaattgcagacgctggtt

SEQ ID NO: 23819 - DNA, 1663 bp, Klebsiella pneumoniae
aatattttactcataacctgcgatcaggaacgttatttcgagcggtatccctttccggtgccgggccgggaacgcctgatgaaaacgggtatcacttttaccaatcatcagaacacggccaacgtttgtacgccatcgcgctctgtcatgtacaccgggctccatatgccgcacacccggatgtttgataatcttggcttcccctggatgaattacgatctggacccggaattacgtaccgtgggccatatgatgcgtgaactgggttattacacggcgtataaaggtaaatggcatcttacccgggagatcgatcagccggtcgctggtaaatcggtagaagaaatggacctgggcgagatcccgacgccgcgactgcatgaaattatggaaaagtatggtttctctgattatcacggcattggcgatgtcatcgggaaaagtaagggaggctatttctttgattcagtcaccacggggcagaccattagttggctacgtaacaccggccgcccgctgaatgatgaaaataagccctggttcgcggcagtaaacctggttaacccccacgatgtcatgtttatcgacaccgatgagcatggtgagcaggtgcagtggaaagggccaatggataaagaaaaccacaccctgctgccaacccaacccccgcacaaccaaatctatcagcaaagctggccagactatccgctgcctgcaaaccgccatcagtcgctcgatgagcctggcagacctgccgcccataaagagtaccagaatgccagggcggtgatggagggacagttccccgatgaagaccggcgctggcgcaaattactggattattatttcaactgtattcgcgacaatgaccagcatcttgaggcgattctcaatgagctggataacctgcagctgacgcaaaatacgattatcgtctttaccgccgaccatggggaactcggtggctcccaccagatgcatggtaaaggttcctcggtgtataaagagcagatccatgtgccgatgatcattcgccatccggcgtatccgggaaatatctgctgcaacagtttgaccaatcatctggatttagtaccgaccctgattggtctgactggacgcgatcgctcgctgcgagagaaagtcctgaagggcagaaaaggccgggatatgagcccattactggcgcatcctgagcaagcgggcttaaatgcgctgcgtccgggttcgctttattgttacggcatgatcctgtatatggatgcgcaatacacggcaaaattcagaaagctggctggagagaaactcccgcacgatcaatttaaaaaagcgatcgcgtcactccatcctgatttttcccatcgctcagggatccgtatgatcaacgatggacactataaatttgcccgctacttttcgctcaagcagcatcatattcctgcttccctggccgagctgctggagaataatgatgttgaacttttcgatctggttaacgaccccgaagaaaatcataacctcgcccgggagccagagaaataccgggatctgttaatgacaatgaacgataaactcaatcagctcactgccgctgagattggcgaagatgatggcagctatatgcccccgtttgaaggaagccagtgggatctgacggcggccc

SEQ ID NO: 23820 - DNA, 1389 bp, Klebsiella pneumoniae
atgttaccctctcaatcccccgcaatttttaccgtaagccgcctcaatcagacggtgcgtctgctgcttgagcgcgaaatgggccaggtttggatcagcggcgagatctctaacttcagccagccctcctccggccactggtacttcaccttaaaagacgataacgcccaggtgcgctgcgcgatgttccgcaacagcaaccgccgggtcacgttccgcccgcagcacgggcagcaggtgctggttcgcgccaacatcacgctgtatgagccgcgcggcgactaccagattatcgtcgaaagcatgcagcccgccggcgaagggttgctgcagcagaagtatgagcagctgaaagcgcagttaacggcggaaggactgtttgagcaaaaacataagcaggcgctcccctctcccgcccactgcgtcggcgtcatcacctcgaaaaccggtgccgcgctgcacgatattctccatgtcctcaggcgccgcgatcccgggctgccggtgatcatctacccaaccgcggtccagggtgacgacgcccccgggcagattgtgcgcgccatcgcgctggccaacgcgcgccaggagtgtgacgtactgattgtcggacgcggcggcggttcgctggaggatctgtggagttttaacgatgagcgggtggcgcgggctattttcgccagccagatccctatcgtcagcgccgtcggccatgaaaccgacgtcacgatcgctgattttgttgccgacctgcgggcaccgactccctcagccgccgcggaaatcgtcagccgcaaccagcaggagctgctgcgccagctgcagtccggacagcagcggctggagatggcgatggactatttcctcgccagtcgccagcgccgttttacccagctgttccatcgcctgcagcaacagcatccacagctgcgcttggcccgccagcagaccgccctggaacgcctgcgccagcggatgcgtatcgccgtggagtcacagcttaagcgcgcagaacagcggcaaaagcgcaccgttcagcgtctgaatcactacaacccgcagccacggatccaccgcgcgcagtcgcggatccagcagctggaataccggctggcggaaattatgcgtggccgcctcagcgagcggcgtgaacggtttggcaacgcggtgacccatctggaggcggtgagccccttagccaccctggcgcggggctacagcgtcacctcggtgagcgacggtacggtgctgaagcagacaaaacaggtcaaaaccggcgatctgctcaccacccgcctgaaagacggctgggtcgaaagcgaagtgaagcagatcgcgccggtgaaaaaaacgcgggccagaaagccttcgcccactaaaccagcggaa

SEQ ID NO: 23821 - DNA, 1239 bp, Klebsiella pneumoniae
gtgaagagttatctggtcggtggcgcggtgcgtgacgcgctgttagggctgccggtcaaagaccgagactgggtggtggtgggcgccaccccgcaacagatgctagacgcgggctatcaacaggtaggccgcgattttcccgtgttcctccatccgcaaagccgggaagagtatgccctggcccgcaccgagcgcaaatccggcgcgggctataccggttttacctgctatgccgccccggacgtcaccctcgaagccgatctgctgcgccgcgacctgacggtcaatgccctcgcccaggatgccgacggcgcaattatcgacccctacggcggacagaacgatctccgtcagcgcctgctgcgccatgtctctcccgcgtttagtgaagatccgctgcgcgtgctgcgcgtcgcgcgttttgccgcccgctacgcccacctcggttttcgcattgccgaagagactcaggccctgatggccgcgatggttgaggccggcgagctggcgcatttaacgccggagcgggtgtggaaagagacggaaagcgcattaactactcgcaacccgcaggtctttttccagacgctgcgcgactgtcaggccctcaaggtgctgttcccggagattgacgccctgtacggcgtgccggccccggcgaaatggcatccggaaatcgacaccggcctgcacaccctgatgaccgtcacgatggccgcgatgctgtcgccggatgtcgacgtacgtttcgccaccctgtgccatgacctcggcaaagggctgacgccgaaggcgctctggccgcgtcaccacggccatggtccggcgggagtcaagctggtggagcagctctgcgcgcgtctgcgggtgccgaacgatatccgcgatctcgcgaaactggtggcggagtaccatgacctaatccacaccctgccgattctgcagccgaaaaccctcgtcaaactcttcgacagcattgacgcgtggcgcaaaccgcagcgcgtgcagcagatcgcgctcaccagcgaagccgacgtccgcggacgcaccggtttcgaggccagcgattacccgcaggggcgcctgctgctggaggcctgggaagtggcgcagtcggtctccactaaagaggtcgtggcggcgggctttaaaggggcggaaattcgcgaggagctgacgcggcggagaattgcggcggtagcgcagtggaaggaacagcgttgcccccagccgcaaggc

SEQ ID NO: 23822 - DNA, 615 bp, Klebsiella pneumoniae
atgagtgcaatcgcgcctggactggtactcctcgcctacctctgcggctccatttccagcgccattctggtatgtcgccttgctggcctgcccgacccacgcgacagcggctcaggcaaccccggggccactaacgtactacgaattggcggaaaaggggcggccgtagcggtacttatttttgatgtgctgaagggcatgctcccggtgtggggcgcctgggcgctgggccttacgccgttctggctggggttagtggcgattgccgcctgcgtgggccatatctggccagtcttctttcatttccgcggcggtaaaggcgtcgccacggccttcggcgctatcgcccccatcgggctcgatctcaccggggtgatggccgggacctggctgctgaccatcctgctcagcggttactcttccctgggcgctatcgtcagcgcgctgatcgccccgttctacgtctggtggttcaaaccgcagtacacctttccggtgtcgatgctctcctgcctgatcctcctgcgccatcacgacaacattcagcgtctgtggcgccgccaggagagcaaaatctggacccgcgtgaagaagaaaaaaacgccagagcagaag

SEQ ID NO: 23823 - DNA, 1701 bp, Klebsiella pneumoniae
atgagtaatatttcacgccaggcctatgccgatatgttcggccccaccgtcggcgacaaggtgcgcctggcggataccgagctgtggatcgaggtggaggacgatctgaccacctacggggaagaggtcaaattcggcggcggcaaagtgatccgcgacggcatgggccagggacagatgctggccgccgactgtgtcgacctggtgctcaccaacgcgttgatcgtcgatcactgggggatcgttaaggccgatatcggcgtgaaggacggccggatcttcgccatcggcaaagccggcaaccccgacatccagcccaacgtcaccatccccatcggcgccgcgacggaagtgattgccgccgaaggaaaaattgtcaccgccggcgggatcgatacccatattcactggatctgtccgcagcaggcggaagaggcgctggtctccggcgtgaccaccatggtcggcggcggcaccggcccggccgcgggcacccatgccaccacctgcaccccgggcccgtggtatatctcacgcatgctgcaggcggccgacagcctgccggtcaatatcggcctgctgggcaagggaaacgtttctcagccggatgccctgcgcgagcaggtggcggcgggcgttattggcctgaagatccatgaggactggggcgccaccccggcggcgatcgactgtgcgttaaccgtcgccgatgaaatggacatccaggtcgccctgcacagcgacaccctgaatgaatccggttttgtggaagacaccctcgccgccatcggcgggcgcaccatccacaccttccataccgaaggggccggcggcggccatgcgccggacatcatcaccgcctgcgcccacccgaacattttgccgtcgtccaccaacccaacgctgccctacaccctcaacaccatcgatgaacatctcgatatgctgatggtctgccaccatctggacccggacatcgccgaggacgtggcctttgccgagtcgcgcattcgccgggaaaccatcgctgcggaagacgtgctgcacgatctcggcgccttctcgctcacctcctccgattcgcaggccatgggccgcgtcggggaagtgattctccgcacctggcaggtggcgcatcgcatgaaggtgcagcgcggagcgctggcggaggagaccggggataacgacaacttccgcgtgaagcgctacatcgccaaatacaccatcaacccggcgctgacccacggcatcgcacacgaagtcggatccattgaggtgggtaagctggctgacctcgtggtctggtcgccagccttcttcggcgtgaaaccggccaccgtgatcaaaggcggcatgatcgccatcgcgccgatgggcgatatcaatgcctctattccgaccccgcagccggtgcactaccgcccgatgtttggcgcgctgggcagcgcccgccatcactgccgcctcaccttcctgtcgcaggcggcggcagccaatggcgttgccgagcggctgaacctgcgcagcgcgatcgccgtggtgaaaggctgccgtacggtgcagaaagccgacatggtgcacaacagcctgcagcctaacatcaccgtcgacgcccagacctatgaggtgcgggtggatggcgaacttatcaccagcgagccggcagacgttctgccgatggcgcaacgatattttctgttt

SEQ ID NO: 23824 - DNA, 672 bp, Klebsiella pneumoniae
atgtcgacagcggaacaacgcctgcggctgatgcagctggccagcagcaacctgccggtagggggttacagctggtcccaggggctggagtgggctgtggaagccggctgggtgccggacgtcgcggccttcgagcgctggcagcgacgccagatgacggaaggcttttttaccgttgacctgccgctgttcgcccgcctgtaccgcgcctgcgaacaaggcgatatcgctgcggcccagcgctggaccgcctatctgctggcctgccgggaaactcgtgaactgcgggaggaagagcgcaaccgcggcgcggcgtttgcccgtctgctgagcgactggcagccggactgtccgccgccgtggcgctccctgtgccagcaaagccagctcgccgggatggcctggctcggcgtgcgctggcgtatcgccctgcccgagatggccctcagcctgggctacagctggattgagagcgccgtgatggccggcgtcaagctggtccccttcggccagcaggccgcccagcagctgattttacgtctttgtgaccactacgcggccgagatgccctgcgcgctggccgcgccggacggcgatatcggatcggccaccccgctcgccgccatcgcctctgcccggcatgaaacccaatactctcgattattccgttcc

SEQ ID NO: 23825 - DNA, 615 bp, Klebsiella pneumoniae
atgaactcttataaacacccgctgcgcgtcggcgtcggcggcccggtcggctccggtaaaaccgctctgctggaagcgctgtgtaaagcgatgcgcgatacctggcagctggcggtggtcactaacgacatctataccaaagaagatcagcgcatcctcaccgaagcgggcgcgctggcgcctgaacgcatcgtcggtgtggaaaccggcggctgcccgcatacggcgatccgcgaagatgcctcaatgaacctcgccgccgtggaagcgctgagtgaaaagttcggtaacctcgaccttatcttcgtggaaagcggcggcgataacctgagcgccaccttcagcccggagctggcggatctgaccatctacgtcatcgatgtggccgaaggggagaagatcccgcgcaaaggcggaccggggatcaccaaatccgattttctggtgatcaataaaaccgaccttgccccctatgtgggcgcgtcgctggaggtgatggcgagcgatacccagcgtatgcgcggcgatcgcccatggaccttcaccaatctgaagcagggcgacggcctgagcaccattatcgccttcctcgaagacaaaggcatgcttggcaaa

SEQ ID NO: 23826 - DNA, 1605 bp, Klebsiella pneumoniae
atgtcatcactggatcttaactctgaattacccgcgacaacgcggacttccggctcccgggaaaccttagaagattacaccttacgttacgccccgctgagctttcgccgctggggtccgggcgtcgtcgcggtcaccgcgctgggcggcatcgcctatctggccgacttttccatcggcgccagcatcggtatggcctggggcaccagcaacgccatctattcgatcctggtggcggcgctggtgatcttcctcaccggcattccgctggcgatcaccgccgcgcgctacaacattgaccttgacctgatcacccgcagcgccggcttcggctatttcggctcggtgatcaccagcattatttttgccggcttcacctttatcttcttcgccctcgaaggctcgatcatggcccagggcctgctggtgggcctcgggatcccgctgtggatgggatatctgatcgccaccctgatggtgctcccgctggtggtctatggcatgaaagccctgacccgcctgcaggtgtggaccacgccgctgtggctggtgctgatggtggtgccggtggtgtggctgattgtcaaagatccgcagctggtggacggcttcctgcatttcgccggtaaaaacagcgcgtcgacggtggatattaccgccatcatgctcggcgccggggtatgcctgtcgctgatcatgcagattggcgagcaaattgattacctgcgctttatgccgcctaagaccgcggagaatcgtaaaagctggtggctggcggtcttttccgccggcccgggctgggtggtgttaggggcgatcaaacagatcatcggcgccttcctcggcttctatctgttgacccgtttcccggcggtgcacaataccgaaccggtgcagcagttcgtcagcgtcttcgataacctggtgcccggctggctggccctgacgctggcggtggtgctggtggtgatctcgcagatcaaaattaacgtcaccaatgcctactccggctcgctggcgtggaccagcgcctggacccgcaccaccaaacgctatccgggacggattatttttgtggtggtcaacctggcgattgccctggcgctgatggagggcgatatgttcagcgccctgtcgtggatcctcggcttttactccaacttcgccatcgcctgggtcgtggtggtggcgaccgacatcacctttaataaaggcttgctcaagctggcgccggcgcagccggagtatcgtcgcggcatgatctacaacgttaacccggtgggcgtggtctcctttggtctggccgccgggctgtcgatctgcgccttcttcggtctgctgggggcgacgctggcgccgttctcgccgctgattgcgctggtcgttgcctttgtcatgaccccgctgatggggctccttacccgcgggcgctactatattaagcaggtggatgacggcatcgccgagccgcgctatgacgcggcggggaatgcctccaccaccgtgtatcaatgcgttagctgtgaggaagagtacgagcgcccggacgtgatgcactcgcacaagcatcagggagccatctgctcgctgtgtaaaagtatggag

SEQ ID NO: 23827 - DNA, 1431 bp, Klebsiella pneumoniae
atgaaaaaaaccacgttagcaatgagtgcactggctctgagtttaggtctggcgttgtccccgctctctgcgagcgcggcagaaacggcatcttcggccactaatgcacagcagatgccaagcctggccccgatgctggagaaggtgatgccgtcggtggtgagcattaacgttgaaggtagcaccaccgttaataccccacggatgccacgtaacttccagcagttctttggcgataattcgccgttctgccaggatggttctcctttccagagttcgccgttttgccagggcggcggacagggcggtcagcctgacggcggccagcagcagaaatttatggcgctgggctccggcgtcatcattgatgccgccaaagggtatgtggtgaccaacaaccacgtcgtggacaacgccaccacgattaaggttcagctgagcgatggccgtaggtttgatgccaaagtcgtcggcaaagatccgcgctctgatatcgcgctgattcagattcaggatccaaaaaacctgacggcgattaagcttgccgactccgatgcgctgcgcgtcggtgattacaccgtggctatcggcaacccgttcggtctgggcgaaaccgtgacctccgggattgtctccgcgctgggccgtagcggcctcaacgtggaaaactacgaaaactttatccagaccgatgcggcgattaaccgcgggaactccggcggtgcgctggtgaacctcaacggcgagctgatcggtatcaacaccgccattctggcgccggacggcggcaacatcggtatcggttttgctatcccgagcaacatggtgaaaaacctgaccgagcagatggtgaaatatggccaggtgaaacgcggtgagctcggcattatgggcaccgaactgaactctgagctggcgaaagcgatgaaagtcgatgcccagcgcggggccttcgtcagccaggtaatgccgggttcggcggccgcgaaagcgggcattaaagccggcgatgtcatcacctccctcaacgggaaagcgatcagcagcttcgccgcgctgcgtgcccaggtcggcaccatgcctatcggcagcaaagttgagcttggtctgctgcgcgacggcaaaccggtgaccgtgaccgtcgaactgcagcagagcaaccagacccaggttgactccagcactatcttcaacgggattgaaggggcggaaatgagcaataagggtcaggataagggcgtggtggtcaataatgtgaaagccggtaccccggcggcacagattggcctcaagaaaggcgacgtcatcgtcggggcgaatcagcagccggtgaaaaacatcgccgatctgcggaaaatcttcgacgccaaaccgtccgtactggcgctgaacattcagcgcggcgacgcctctatctatctgctgttgcag

SEQ ID NO: 23828 - DNA, 1209 bp, Klebsiella pneumoniae
atgcagcgcgacgatgactcttttatgctggtgcccagcaaaggggaggactacatggctggctggcatcttgataccaaaatggcgcaggatattgtggcgcggaccatgcgcatcatcgataccaatatcaacgtgatggatgcccgcgggcggatcatcggcagcggcgatcgggaaaggattggtgaattgcacgaaggcgcgctgctggtcctctcccaggggcgggtggtggatatcgacgacgcggtcgctcgtcatctgcacggggttcgccaggggattaacctgccgctgcgcctggagggggagatcgtcggggtgatcggcctgaccggcgagccggagtcgctgcgaaaatatggcgagctggtgtgcatgacagcagagatgatgctggagcagtcgcggctgatgcatctcctggcccaggacagccgtctgcgcgaagagctggtgatgaacctgattcaggcggaagagcataccccggcgctgaatgaatgggctcagcgtttaggcatcgatctcaatcagccgcgcgtggtggcgatgattgaggtagacagcggtcagctcggcgtggacagcgcgatggcggaactgcaacagttacagaacgcgctgaccacccccgatcgcaataatctggtggccattgtctcgctcacggaaatggtggtgctgaaaccggcgctgaacagctttggccgctgggacgctgacgatcacgtccggcgcgtcgagcagcttatcgccaggatgaaagagaatggccagctgcgctttcgcgtggcgctgggcaacttcttcaccggcccaggaagtatcgcccgctcttaccgtaccgcacggacgacgatgatggttggcaagcagcggatgccggagagccgcagttatttctatcaggatctgatgctgccggtactgctcgacagcctgcgcggcggctggcaggccaatgagctggcccgtccgctggcgcgtttgaaggccatggacaacaacgggctgctgcggcggacgctgcaggcgtggtttcgccataacgtgcagccgctggcgacgtcaaaggcgctgtttattcatcgcaatacgctggagtaccggttgaaccgtatctcggagctgaccggcctggatctcggtagctttgacgacaggctgctgctgtatatcgcgctgcagctggacgaacaacgc

SEQ ID NO: 23829 - DNA, 841 bp, Klebsiella pneumoniae
atgcagcagttacagaacgttattgagtccgctttcgagcgtcgcgccgacattacgccggctaatgtggataccgtgacccgcgaagcggttaaccaggttatcgcccttcttgattccggcgcgctgcgcgtcgctgagaagatcgacggtcagtgggtgacgcatcagtggctgaagaaggcggtactgctctctttccgtattaacgataaccaggttatcgatggtgcggaaagccgctacttcgataaagtgccgatgaaattcgctgactacgacgaagcgcgtttccagaaagaaggtttccgcgtggtgccgccggccgccgtgcgccagggcgcgttcatcgcccgcaacactgtgctgatgccgtcctacgttaacatcggcgcctacgttgacgaaggcaccatggttgatacctgggccaccgtcggctcctgcgcgcagatcggtaaaaacgtgcatctgtccggcggtgtcggcatcggtggcgtactggagccgctgcaggcgaacccgaccatcatcgaagataactgcttcatcggcgcgcgctctgaagtggttgaaggggtgatttgtcgaagaaggctccgtcatctccatgggcgtttacctcggtcagagcaccaaaatctacgatcgcgaaaccggcgaagtcttctacggccgcgtaccggctggctcggtggttggtctcaggcaacctgccgtcgcacaccgatggtacatacagcctgtactgcgcggctgattgtgcaagacagtcgatgccaaaacccgcggcaaggtcggcattaacgagctgctgcgcaccatcgactaacgcaaataa

SEQ ID NO: 23830 - DNA, 453 bp, Klebsiella pneumoniae
atgcaagaagggcaaaaccgtaaaacatcgtccctgagtattctcgccatcgctggggtggagccgtaccaagagaaaccgggcgaagagtatatgaacgaagcccagctggcgcacttcaagcgtattcttgaagcatggcgtaatcaactcagggatgaagtggatcgcaccgtatcgcacatgcaggatgaagcagctaacttcccggacccggtagaccgcgccgcccaggaagaagagttcagcctggaactgcgtaaccgcgaccgcgaacgtaaactgatcaaaaagatcgagaaaacgctgaaaaaagttgaagacgaagacttcggctactgcgaatcctgcggcgtggagatcggcattcgccgtctggaagcgcgtccgacagcggatctgtgcattgactgcaaaaccctggcggaaattcgcgaaaaacagatggcgggc

SEQ ID NO: 23831 - DNA, 2427 bp, Klebsiella pneumoniae
gtgtcctcattgccggttgccgctgtccttccagaactgttatccgccctgcagcatgcgccgcaggttttgctcaacgcgccgaccggcgccgggaagtcgacctggctgccgctgcagatcctcgccgagggcaacatcgcgggacgcattatcctgctcgagccgaggcgcctggcggcgcgtaatgtcgcgcagcggctggctgaactgcttggcgaaaagccgggggagaccgtgggtttccgcatgcgcgccgaaacctgcgtcggaccgcagacccgcctggaggtggttacggaggggatcctgacgcgcatgatccagcgcgatccggagctgacgggcgtggggctggtgatcctcgatgagtttcacgagcgcagcctgcaggcggatctggccctggccctgctgctcgacgtccagcaggggttacgtgacgatctcaagctgctgatcatgtcggcgaccctcgataacgatcgcctgcagcgtctgctgccggaggcgccggtggtggtctcggaggggcgcatttatccggtggagcgtcgcttcagcccgctctccgcgcaccagcgttttgatgaggcggtggcggtagcggcggcggagctcctgcggcatgaacagggatcgatgctgctgtttctgcccggcgtcggcgagatccagcgcgttcaggaacagctgacggagcgcgtggcggaggatgtcattctctgcccgctgtatggcgcgttgcccttaagcgaacagcgcaaagcgatcctcccggcgccggccgggaagcgcaaagtggtgctggccaccaatattgccgagaccagtttgaccatcgaggggatccgcctggtggtcgacagcgcccaggagcgggtcgcccgctttgacccgcgcaccggcctgacccggctggtgacgcagcgcatcagccaggcatcgatgacgcagcgtgccggacgcgccggtcgtctctccccggggatctgcctgcatttgctcggcaaagaacaggcggaacgggcggcggcacagagcgagccggagatcctgcacagcgatctgtcggcgctgttgctggagctgctgcagtggggctgccacgatccggtagcgctggcctggctggatcagccgcccgcggtcaatctggccgccgcgcgccgcctgctggaggcgctgtcggcgctggacggcgagcggctgtcggcgtttggccgcaaaatggcagcgcttggcaacgagccgcggctggcggcgatgctgaccgccgcgcagaccgatgacgaggcggcgacagcggcaaagctggcggcgatcctcgaggagccgccgcgcggcggactggtggatttgggggccgtcttttcccgtcagcaggccaactggcagcagcgagcgcagcagctgatgaagcgcctggcccgccgcggcggccagcccgatgtcgggctaatggcggggctgctggcgtcggccttcgccgatcgcatcgcccgccgccgcggtcaggaggggcgctaccagctggcgaacggcatgggcgcgatgctggacgccgacgacgcgctgggccgtcatgaatggcttatcgctccgctgctgctgcagggtagcgcttcgccggatgcccgcatgctgttggctctgtcagtggatatcggcgagctgatcgccgcccgccctgaactggcgaaaagttccgacacggtggagtgggatgaagcgcaggggacgctgaaagcctggcggcggacggtgatcggccagttggtgatcaagacccagccgctggcgaagccctctgaggcagagctgcatcaggcgatgctcaacggtattcgtgagaaaggcctcggggtgctcaactggacgccagaggctgagcagctgcgcctgcggctgcactgtgcggcgcagtggctgccggaagaggcatggcccgcagtggatgacgcttcgctgctggcctcgctggagacatggctgctgccgcagatgaacggcgttcattccctgcgggcgctgaaggcgctggatctgcgtcaggcgctacaggactggctgccatggccgctgcgccagaagctggatcgcgagctgccgacgcactataccgtgccgaccggcagccgcctggcgatccgataccatgcggagaacccgccagcgctggcggtgcgtatgcaggagatgttcggcgaggccacgacgccggtgatcgccgaggggcgggtgccgctggtgctggagctgctgtcgcctgcccagcgtccgctgcagatcacccgcgatctgagcgccttctggcaagggagctaccgcgaggtgcagaaagagatgaagggacgctatccgaagcacgtctggccggacgatccggccaacgccgccccgacccgccgcagcaaaaaatactcg

SEQ ID NO: 23832 - DNA, 2556 bp, Klebsiella pneumoniae
atggcgggagatgaccgcgagcctatcggacgtaagggaagaccctcacgtccgactaaacagaaagtcacccgtcgccgggtccgggaagaggactacgacgacgagtatgatgacgatgattatgaggatgagaaaccggtgccgagaaaagccaaaggcaaaggtggcaagcctcgtcggaagcgcagctggctgtggctgctggtcaagctggggattgtcttcgcggtgctgattgccgcctatggcgtctacctcgaccagaaaatccgcagccgcattgacggtaaagtctgggagctgccggccgcggtctatggccggatggtcaaccttgagccggacatgcagatcagcaaaaacgagatggtgcgtctgctcaacgccacgcagtatcgccaggtcagcgcgatgacgcgccccggcgaatataccgtgcaggctaacagcatcgagatgatccgtcgtccgttcgatttcccggacagtaaggaagggcaggtgcgcgcgcgtcttaccttcgacggcgaccatcttgagaccatcgagaatatggataataaccgccagttcggtttcttccgcctcgatccgcgtcttatcaccatgctgcagtcgccgaacggcgagcagcgcctgttcgtgaagcgcagcggcttccccgatctgctggtggataccctgctggcgaccgaagaccgccacttctatgagcacgatgggatcagtctctactccatcggccgcgcggtgctggcgaacctgacggcaggccgaacggtgcagggggcgagtaccctgacccaacagctggtgaaaaacctgttcctctccagcgaacgctcctactggcgtaaagccaacgaagcgtatatggcgctgatcgtcgacgcccgctacagcaaggatcgcatccttgagctgtatatgaacgaggtgtacctcggccagagcggcgataacgaaattcgcggcttcccgctggccagcctgtattacttcggccgtccggtggaagagctgagcctcgaccagcaggcgctgctggtggggatggtgaaaggggcgtcggtctataacccgtggcgtaacccgaaactggcccttgaacgacgcaatctggtgctgcgtctgctgcagcagcagcaggttatcgaccaggagctatacgacatgctcagcgcccgtccgctgggcgtgcagccgcgcggcggggtgatttcaccgcagccggcgtttatgcagatggttcgtcaggaactgcaggcgaagctgggcgataaagtgaaagatctctccggcgtgaagatcttcaccactttcgactcggtggcgcaggatgcggcggaaaaagcggcctccgaagggatcccggttctgaagaaacagcgtaagctggcagacctggaaaccgccatggtggtggttgaccgcttcaccggcgaagtgcgggcgatggtcggcggcgcggagccgcagttcgccggttataaccgcgcgatgcaggcccgccgatcgattggttctctggccaagccggcgacctatctgaccgcgctgagccagccgaatcagtatcgcctgaatacctggatcgccgatgcgccggtgacgattcgcctgtccaacggtcagacgtggtccccgcagaacgacgatcgtcgtttcagcggtcaggtgatgctggtggatgccctgactcgctcgatgaacgtcccgacggttaacctcgggatggcgctgggcttaccggcggtagtcgatacctggactaaactgggggcgccgaagaatcagctcaacgcggtgccgtcgatgctgcttggcgcgctgaacctgacgccgattgaagtggcccaggccttccagaccatcgccagcggtgggaaccgtgcgccgctttccgcgctgcggtcagtgattgccgaagatggcactgtgctctaccagagctatccgcaggcggagcgcgcggtgcctgcccaggcggcctacatgacgctgtggactatgcagcaggtggtgcagcgcggtacggggcgtcagctgggggcgaagtatccgggcctgcatctggcggggaaaaccgggaccaccaacaataacgtcgatacctggttcgccggcatcgacggtagtcaggtgaccatcacctgggtggggcgcgacaataaccagccgaccaaactgtacggcgccagcggcgcgatgtcgatttaccagcgctatctggcgaaccagacgccaacgccgctggtgctgacggtgccggaagacgtggttgatatgggcgtggacagcaacggcaacttcgtctgcagcggcggtatgcgttcgctgccggtctggaccacgcagccggatgcgctgtgccgtcagggcgaaatgatgcaacagcagcagttgcagcaacaggaagcgaaaaatccgtttaatcagtccgggcagcaaccgccgccgcagcagcaacagcaacagcagcaacagccgccgaagcagcaggaaaagagcgacggcgtcgcgggctggatcaaggatatgttcggcagtaac

SEQ ID NO: 23833 - DNA, 2205 bp, Klebsiella pneumoniae
atggcgcgtccaaaaactgctcagccaaatcactcgctgcgtaaagtcgcagctgtagtagccacggcggttagcggcatgtctgtctacgcacaggcagcagaacaaccgaagcaagaagaaaccatcaccgtcgttgccgccccggccgcccaggaaagcgcctggggaccggcgccgactatcgcggcaaaacgctccgccacggcgaccaaaaccgataccccgattgaaaaaacgccgcagtctgtgtcggtggtgacgcgccaggagatggagatgcgccagccgacgacggtaaaagaggcgctctcctatacgcccagcgtcttctccactcgcggcagttcgaccacctatgacgtggtcaccattcgcggcttcaccacctctacgaccgtcaacaccaaccagtatctggacggcatgaagctgcaggggaataactactctgaagtctccatggatccttacttcctcgagcgtgtggaagtgatgcgcgggccaacctcggtgctgtacggcaacagcaacccgggcggtatcgtcagcatggtcagcaagcgcccgactaccgagccgctgaaagaagtgcagtttaagatgggcaccgacaatctgtggcagaccgggtttgactttagcgacgccattgatgatgccggcgtttggtcgtatcgcctgaccggccttggccgcagtcaggatgcccagcagcagatggcgaaatcgactcgctacgcggtggcgccctcctttagctggcgtccggacgataaaaccgacttcaccttcctgagcaacttccagaatgacccggatgcgggctactacggctggctgccgcgcgaaggcaccgtggtgccgtattacgacgccaacggtaaggcgcacaagctgccgaccgatttcaacgaaggcgagtccgataataaaatctcccgccgccagaagatggtgggctacagcttctcccatcagttcgatgacacctttaccgtgcggcagaacctgcgctatgccgatgtgcatacgctctatcgttcggtatacggcaacggctatgtcgcgccgggctacatgaatcgcgcctacgtgcgctccgacgagcacctgaacaccttcaccgtcgatacccagctccagtctgatttcgccaccggcgcggtcagccatacgctgctgaccggcgtggactactcgcggatgcgtaacgatgtggatgccgactacgggacggcggatcctatcagcatgagcaatccgcagtacggcaatccgaatattcaggtcaccttcccgtacgcggtcctcaaccggatggagcagaccggcctgtacgcgcaggatcagatggagtgggataaatgggtgatgaccctgggcggccgttacgattacgccacgacctcaacgttaacccgcgccaccaacagcctggcggagaatcacgaccagcagttcagctggcgcggcggcatcaactacctgttcgataacggcatctctccgtacttcagctacagcgaatcgtttgaaccggtatcgggttccaacagccgcggccagccgttcgatccgtcgcgcggtaagcagtatgaagccggcgtgaaatacgtgccgaaagatatgccggtggtggtcaccgcggcggtctatcagctgaccaaagacaagaacctgacggctgatccggctaaccaggcgttcagcatccagaccggcgagatccgctcccgcggccttgagctggaggcgaaggcggcggtgaacgccaatattaacgtcaccgcagcctacagctacaccgatgcggagtacactcacgatacggtgttcaacggcaaacgtccggcggaagtgccgcgtaacatggcctccctgtgggcggattataccttccacgaaaccgcgctgagcggtctgacgattggggccggggcgcgctatatcggttcaacggtcagctactacaaaaatgacaccagcaccggtaagaaaaatgatgcctttagtgtggccggttatgcgctgatggatgcgacggtgaaatacgatctggcgcgctttggcctgccgggatcgtcggtcggcgtcaacgtcaacaacctgttcgaccgcgaatatgtctccagttgctacagcgaatacgcctgctactggggtgccggacgtcaggtcgtcgccaccgccaccttccgtttc

SEQ ID NO: 23834 - DNA, 795 bp, Klebsiella pneumoniae
atgcaggaacagactccgcacgcagaaaccaccttcgcgctggatcgcgtcactttccgtgtgcctggccgcacattgctccatccgctctcgctcaccttcccgaccggaaaagtcacaggcctgatcggccataatggctccggcaagtcgacgttactgaaaatgcttggccgtcatcagccgccctccgcaggcgaagtgctgctggacgggcagccgctggagagctggggcagcaaagcctttgcccgcaaagtggcctatctgccgcagcagctgccgccggccgaaggtatgacggtgcgcgagctggtggcgatcggccgctatccatggcacggcgcgctgggtcgctttggcgcagcggaccgtgagaaagtagaagaggcgattgcgctggtggggctgaagccgctcgctcatcgtctggtggacagcctctccggcggtgaacgccagcgggcgtggatcgccatgctggtggcgcaggacagtcgctgcctgctgctcgatgaacccacctcggcgctggatattgctcatcaagtcgatgttctggcgctggtgcatcgtctcagccagcagcgcggcctgacggtgatcgccgtcctgcacgatattaatatggcggcccgctattgcgactatctggtggccctgcgcggcggagaaatgattgcccaagggacgccggcggaactgatgcgcagcgacactctggaacagatctacggcatcccgatggggatcctgccacacccggccggtgcggcgccggtaagctttgtctat

SEQ ID NO: 23835 - DNA, 888 bp, Klebsiella pneumoniae
atgatgaacccaactctgataacccgacgccgcctgctgatcgcgatggcgctctcgccgctgctgtggcagatgcgcggcgcgcaggcggccgacgtcgacccgcagcgcgtggtcgccctggagtggctgcccgcggagctgctgctggcgctcggcgtgacgccctatggcgtggccgatattcccaactatcgcttgtgggtgaacgaacccgcgctgcccgactcggtgatcgatgttggtctgcgtaccgaacccaaccttgaactgctgacgcagatgaaaccgtcgtttatcgtctggtcggcgggctacggcccgtcgccggagaagctggcgcgtatcgcgcccggccgcggtttcaccttcagcgacggcaaacggccgctggcgatggcccagcgttcgctactggaaatggccgatctgctgggcaaaacgcagcaggcgaagcgccatctggcggagttcgacgcgctgatggagagcctgcgtccgcgttttgccgggcgcggcgatcgtccgctgctgatgatctctctgctcgatccccgccacgtgctggtgtttggcgaaaactgcctgttccaggaggtgcttgatcgctttggtattaaaaacgcctggcacggcgaagcggcattctggggaagcgttagcgttggcatcgacaggctggcggcatttaacgaagccgatgtcatctgtttcgaccatggcaatgagcgagatatggctcaactgctggcgacgccgctatggcaggcgatgcccttcgtgcgcgcgggccgcttccagcgcgttccggcggtttggttctacggcgcgacgctgtcagcgatgcattttgcccgcgtgctggctgatgcccaggggagaccggca

SEQ ID NO: 23836 - DNA, 1980 bp, Klebsiella pneumoniae
atgaatacgcgtctctcgccgttagctattatcctgctggccgggctgctgggcgtcgccttcgcgctgagcatcgtcaacctcaatgtcgccttgccctatgcgcagtggcggcaggcgctgtggcagccggatgtcgatgatatcgcccaaatgctgtttcattacagtttgttaccgaggctggctgttgcgctgctggtgggcgccgggctgggactggttggcgtcctgttccagcaggtgctgcgtaatccgctggcggaaccgaccacccttggcgtcgccaccggcgcgcagctggggataacggtcaccacgttatgggctattcccggcgtgctggcgtcgcaattcgccgcgctggccggggcctgtctggtgggcgcgctggtgtttggcgtctcgtggggcaagcgcctgtcgccggtaacgctgatcctggcggggctggtggtcagcctttactgtggcgcgcttaaccagctgatggtgattttccatcacgaccagctgcaaagcatgttcctgtggagcaccgggacgctgacgcagaccgactggagcgtagcgcagcgcctgtggccgcagctgcttggcggggcaatactcaccttgctgctgctgcggccgctgaccctgatggggctcgatgacggggtggcgcgtaacctcgggctggcgctgtccctggcgcgcctcggcgccctgacgctggcgatcgtcatcagcgcgctgctggtgaacgcggtagggattatcggctttatcggcctgttcgcgccgctgctggcgaaaatgcttggcgcccgtcggctgctggcgcggctgctgctggcggcgctgatcggcgcgctgctcctgtggctttccgatcaggtgatcctctggctgagccgggtatggcgggaagtctccaccggctcggtcaccgccctgattggcgcgccgctgctgctgtggctgctgccgcggttgcgcagcatcagcgccccggtgatgaacggcggcgataatgtgcagcctgagcgctatcatgtgcaatggtttgttctcgcaggcgtcgcgttgctgctgctggcggtgagcgtggcgctggcctttggtcgcgatgcccacggctggctgtgggcccacggcgatctgctggagcaactgctgccctggcgctggccgcgggtgctgtcggcgctgttcgccggggtcatgctggcggtcgccggctgtattatccagcgcctgaccggcaacccgatggccagcccggaagtgctgggcatcagctccggcgcggcttttggcgtggtgctgatgctgttcttcgtgcctggcgacgcctttggctggctgctgccggccggcagccttggcgcggcggccaccttgctgatcattatgcttgccgccgggcgcggcggcttctcgccgcatcggatgctgctggcggggatggcgctgagcaccgccttcactatgctgctgatgatgctgcaggccagcggcgatccgcgtatggcgcagatcctgacgtggatctcggggtcgacatatagcgcgacgccggagagggtggtgcgtagcggcgcggtaatgctggcgctgctggcgctggcgccgctctgtcgtcgctggttaaccatcctgccgctgggcggggaggcggcgcgagcggtgggcatggcgctgacgtcatcgcggattgttctgctgctgctggcggcctgcctgacggcggcggcgacgctgaccatcggcccgctgagctttgtcgggctgatggcgccgcatatcgcgcggatgatgggcttccggcgaaccctaccgcatatggtgatttcagggctgactggcgggctgctgctggtcttcgccgactggtgcggacggatgatgatgttcccgtatcagatcccggcggggctactgtcgacctttatcggcgcgccttactttatttatttgctgagaaagcagagtcgc

SEQ ID NO: 23837 - DNA, 777 bp, Klebsiella pneumoniae
atgaatcattctgctgaatgcacctgcgaagagagtctatgcgaaaccctgcgggcgttttccgcgcagcatcccgagagcgtgctctatcagacatcgctcatgagcgccctgctgagcggggtttacgaaggcagcaccaccatcgccgacctgctgaaacacggcgatttcggcctcggcacctttaatgagctggacggggagctgatcgccttcagcagtcaggtctatcagctgcgcgccgacggcagcgcgcgcaaagcccagccggagcagaaaacgccgttcgcggtgatgacctggttccagccgcagtaccggaaaacctttgaccatccggtgagccgccagcaactgcacgaggtgatcgaccagcaaatcccctctgacaacctgttctgcgccctgcgcatcgacggccatttccgccatgcccatacccgcaccgtgccgcgccagacgccgccgtaccgggcgatgaccgacgtcctcgacgatcagccggtgttccgctttaaccagcgcgaaggggtgctggtcggcttccggaccccgcagcatatgcaggggatcaacgtcgccgggtatcacgagcattttattaccgatgaccgcaaaggcggcggtcacctgctggattaccagctcgaccacggggtgctgaccttcggcgaaattcacaagctgatgatcgacctgcccgccgacagcgcgttcctgcaggctaatctgcatcccgataatctcgatgccgccatccgttccgtagaaagt

SEQ ID NO: 23838 - DNA, 879 bp, Klebsiella pneumoniae
atggacaaacagtatccggtacgccagtgggcgcacggcgccgatctcgtcgtcagtcagctggaagctcagggggtacgccaggtgttcggcatccccggcgctaaaatcgacaaggtcttcgattcactgctggattcctccattcgcattattccggtacgccacgaagccaacgccgcatttatggccgccgccgtcggacgtattaccggcaaagcgggcgtggcgctggtcacctccggtccgggttgttctaacctgatcaccggcatggccaccgcgaacagcgaaggcgacccggtggtggccctgggcggcgcggtaaaacgcgccgataaagccaaacaggtccatcagagtatggatacggtggcgatgttcagcccggtaaccaaatacgccgtcgaggtgacggcgccggatgcgctggcggaagtggtctccaacgccttccgcgccgccgagcagggccggccgggcagcgcgttcgttagcctgccgcaggatgtggtcgatggcccggtcagcggcaaagtgctgccggccagcggggccccgcagatgggcgccgcgccggatgatgccatcgaccaggtggcgaagcttatcgcccaggcgaagaacccgatcttcctgctcggcctgatggccagccagccggaaaacagcaaggcgctgcgccgtttgctggagaccagccatattccagtcaccagcacctatcaggccgccggagcggtgaatcaggataacttctcacgcttcgccggccgggttgggctgtttaacaaccaggccggggaccttttccagcacagtggcgatgatatcagatctgccggtctccctatagtgagtcgtactaactattcggaa

SEQ ID NO: 23839 - DNA, 1215 bp, Klebsiella pneumoniae
atgtcgcttcgttctctgcgggctttatgtctgaccagcttttttattgccgacgtgcgcgacggcctcggcccgtttctggggatctttctcacccagcgtcactggcaggcggaggacattggcctgctgatgtccgtcggcggtatcgccggcctgctggcgaccctgcccgccggcttcatcaccgacagctcgcggcataagcgcttgctgctggccggggtctgcctggtgatcaccctcaccaccctgctgctctggtttagtcagaagaccagcgtggtcgccctctcgcaagtcgccagcggcatctgcgcggcctttgtcggaccgctgatcgccgggattaccctcggtcttgccagacagcgcggctttagcgcccagatggggaaaaacgaagccttcaaccacgcgggaaatttcttcaccgcgctaatggccggggctatcgcctggtactggggcatcggcggcattttcattctgatggcctgtaccacgctgcttaccctggtcgccctgctggcgatccgcggcggcgatatcgacgatgatgccgcccgcggcatcgaagcggcatccacgccctccctgccggggtttgccatcctgttccgccatacgccgctgctgatcgccggcgtaaccctgatgctgttccatctcgccaatgccgcactgttgccgatgctgagcatgcggatcgccgccgcgccgggacacctcaatcccggactgtttgccgccgccacggtgattatttcgcaggtggtgatgatcccggtggccatccgggtcgccggcagcatcgacaaatacggttactggcgatgcatcctgctggcgctgctgatcatgcccatccgggcggcgctggcggcgtccagcgacgccccggcgatgatggtcccggtgcaaattcttgatggcctggcggcagggattttgggggtggcggtgcccagctttatcgtctcgctgctgcgcggcagcgggcacgttaacgctggacagagcgtggtgatgctgatgcagggcgccggggcggcaatgagtccggcgttaaccgggtctatcgccgggcactactcctatgccaccgccttcggcgtgctgagcgttatcgcgattgtcgccctgatgatatggtggcgcagcgctccgctgctcaccgtctccgcgtcaccgccagtcggcgagagcgggcag

SEQ ID NO: 23840 - DNA, 1416 bp, Klebsiella pneumoniae
atgttattaattattaaaaatgcccatgccatcctcagcggtctgcccggagaggcggcgcggctggccgggccggatattcgcatccgcgacggcaagattgccgccatcggcagcctgacgccgctgccggaagagcgacagatcgatgcccgcgactgcgtgatctatccggcgtgggtgaacacgcaccaccatctttttcagtcgctgctgaagggcgagccgcaggggctgaaccagagcctgacggcctggctgagcgccacgccgtaccgctttcgcgcggctttcgatgaacatacctttcgtctggcggtgcgcattggcctggtggagcttctgcgctcgggctgcgccagcgtggcggatcacaactacctgtactggccggatatgcctttcgatacctcggagattgtcttcaacgaaggggaagcgctggggatgcgcatcgtcctgtgccggggtggggcgacccagggccgggcggtggaacaggatctgccggtggcgctgcgtccggaaaccttcgacggctatatggcggatgtcgaacggctggtcagccgctatcacgacccccggcccgagtctctgcgccgggtggtgatggcgcccactaccgtcctgcactccgcgccgggcgcccagctgcgggagatggcgaagctggcccgccagctggggatccggttgcacagccatttatcggaaaccgtcgattatctcgacgccgcgcggcagaaattcgccatgacgccggtgcagttctgcgcggaacacgactggctggggaatgacgtgtggtttgcccatctggtgaagctgctgccggaggagattgccctgctgggccgtaccggaaccggcatcgcccactgcccgcaaagcaacggccggctgggcagcggcatcgccgatctgctggcgttagagcaggccggggtcccggtctcgctgggggtggacggcgctgcctcgaatgaagcggcggatatgcaaagcgaagcccatgccgcatggctgctgcagcgcgcgcgcaaggggatgctggcgcagccgcgctacgcggggggcacctttgagggtggggccgatgcggccacggtggaggatgtggtgcgctggggcagcgccggcggggcgcagatcctcggcttagcgcagagcggcaccctgcaggtcggcatgcaggcggacctcgccatttaccggctggacgatccgcgctacttcggcctgcacgatatggccattgggccggtggcctgcggtgggcgcgccgcgctaaaggcgctgctgctcaatggccgccccatcgtggaagacgacgccattcccggtctcgaccttgacgcgatgcgccacgacgcgctggcggccgtccgtaccctccaacagcgcgccgctgtt

SEQ ID NO: 23841 - DNA, 2004 bp, Klebsiella pneumoniae
ttgcgcgtcagccgttcacttacaatcaaacagatggcgatggtcgcgagcgtgtccatggcctttgtattggttttttgcactattttgctgtttcactttgtgcaacagagtcgctttaccacggccacgcagttagaaagtatcgcgcgatccgttcgcgaaccgctgtctgcggctattctgaaagccgatattccggaagcggaagccattttaagccgtatccagcctgctggcatcgtcagccgggcggatgtggtattgccgaaccagttccaggcgctgcggatgcgatttatccccgagcggccggtgccggtaaccgtcacccggctgtttgagctgccggtgcagatttcgctgcccatttattcgctggagcgaccggccaacccgcagccgctggcctatctggtgctgcaggccgactcctatcgcatgtataaattcgtcatgagcgcccttgccacgttagtgactgcttacttacttctggtgctgatgctgacggtggcgctcacctggtgcatcaaccggcttatggttcgccctctgcggcgtatcgcccgcgagctgaacgatctctcccagcaggagcgtcttggccatcagctgaccctcccgcgcctgcaccatgacgacgagatcggtatgctggtgcgcagctataaccgcaaccagcagagcctggtccgccagcatgatgagctgtccatccagtcgacccgcttcccggtctccgagctgccgaataaagcctttttgctggcgatgctggagcagacggtggcccgcccgcagagcgccgcgctgatcgtcgtcgcctgtgaaactctgcaggacgccgccggggtcctcaaggagagtcagcgcgaaatgctgctcctgacgctggtggagaagctgcgggccgcgatcccgccgcagatggtgctggctcaggtgagcgggtatgacttcgcgattctcgccgatggcctcgccgaaccgtggcaggcggtaacgttaagtaagcaagtgctcactattattaatgagcgtttaccgctgcatgggctgcagctgcggccctacgccagcgtcgggatcgccatgttccacgccgggctcagcgccgagcagttttaccggcgcgcggtgtcggccgccgtcaccgcacgacgtaaaggcaaaaaccagatcgagttcttcgatcccgagcagatggaaaaggctcagcgccgcctgatggaagagcacgacattatgaccgcgctcgataaccagcagttcgcgatctggctgcagccgcaggtggcctgcgccagcggcgagatctgcggcgccgaggtactgctgcgccagcggcaggcggatggcagctggtcgctaccgccggcgctgattgagcgcattgaatcctgcgggctgattatcccggtcggctactgggtaatggaagaggcctgccgccagctggcggcctggcaaagccaggggattatgctgtcgctgtcggtcaatgtttccctgctccagctgctggaacacgaccgcggcgaggagatgctaaagctgatcgcccgctaccgcatcgccccgggcaccctcatcctcgaggtgacggagagctgccggatggacgatccgcaggatgtgatggcgcggttgcgaccgctgcgcgaggccggggtacagattgcgctggatgattttggcatgggttatgccgggttgcaccagctgcagcagatgaaagctctgccggtggatattctgaaaatcgataaagtattcatcgatatgctgccggaggatgtcagcatggtgccggcgatgatccagctcgcgcgcggcctgtcgctgcgtatcgtggcggaaggggtggagaacgacgcccagcgccgctggttgcaagccgccggcgtcgaggtgctccagggccatctgttcggttgcgctttgccgcaggaggcattcagcgcgcgctatctctccccggttcaggaggatgaaaatttg

SEQ ID NO: 23842 - DNA, 1308 bp, Klebsiella pneumoniae
gtggttattcccaaaggacaccctatgaaaacctctatctttaaaagcctctatgtccaggttctgacggccatagcgatcggtattctgctgggccatttttacccggaactgggcgcgcaaatgaaacccttcggcgacgccttcgttaagctgattaaaatggtgattgctccggtgatcttctgtaccgtcgtgacggggatcgccgggatggaaagcatgaaagccgttggccgtaccggggcggtggcgttgctctatttcgaagtggtcagcaccatcgcgctgattatcggtctgattatcgtcaacgtggtgcagcccggcgccgggatgaacgtcgacccgtcgacgctcgatgcgaaagcggtggcggtgtacgctgagcaggctaaagatcaaggggtagtggcctttttactggatgtgatcccgggcagcgtcattggcgccttcgccagcggcaacattctgcaggttctgctgttcgccgtcctgtttggttttgccctgcaccgtctgggcagcaagggccagctgattttcaacgtcattgaaagcttctcccaggttatcttcggcattatcaatatgatcatgcgcctggcgccgattggcgccttcggagccatggcctttaccatcggtaaatatggcgtcggcaccctggtgcagctggggcagctgattatctgcttctatatcacttgtatcctgttcgtggtggtggtgctggggagcatcgcccgggctaccggcttcagcatcttcaaatttatccgctacatccgggaagagctgctgattgtgctggggacctcctcatcagaatcggcgctgccgagaatgctcgacaagatggagaagctgggctgccgtaaatcggtggtaggcctggtgatcccgaccggctattcgttcaacctcgatggcacctctatctatctgacgatggccgcagtctttatcgcccaggcgaccaacagccatatggatattttccatcagatcaccctgctggtggtgctgctgctctcctcgaaaggggcggcaggggtgaccggcagcggcttcatcgtgctggcggcgaccatctcggccgtcgggcatttaccggtggctggcctggcgctgatcctcggtatcgaccgctttatgtccgaagcccgcgcgctgactaacctggtgggtaacggcgttgccacggtggtggtggcgaaatgggtgaaagaactggatgccaaacagatggatgacgttctgaataaccgtgttccggcgaacaaaacgcacgaattatcctct

SEQ ID NO: 23843 - DNA, 1638 bp, Klebsiella pneumoniae
atgcaaacaacatcacaattttggagcagaataatgagtatttccttgaagaaatcagggatgctgaagcttggtctgagcctggtcgccatgaccgtcgccgccagcgtgcaagcgaaaaccctggtttattgttctgaaggctcgccggaaggatttaacccacagctcttcacctctggcaccacctatgatgccagctccgtaccgatctataaccgcctggtcgaatttaaaaccggtacgacggaagttattccaggacttgctgagaaatgggaagtcagtgcggatggcaaaacctatactttccacctccgtcagggtgtgaagtggcaggataataaagactttaaaccaacccgtgacctgaacgccgatgacgtggtgttctccttcgatcgccagaagaatactaataacccgtaccataaagtttctggcggcagctatgaatactttgaagggatgggcttaccggacctgattagcgaagtgaagaaagtggacgataataccgtccagttcgtcctgacccgtccggaagcgccgttcctcgctgatctggccatggacttcgcctccattctttcgaaagagtatgctgacaacatgctgaaagccggcacgccggaaaaagtggatctcaatcctatcggtaccggcccattccagctgctgcaataccagaaagattcccgtattctgtataaagccttcccgggctactggggtaccaagccgaagatcgatcgtctggtcttctccatcaccccggacgcttccgtgcgctatgccaagctgcagaaaaacgagtgccaggtgatgccgtacccgaacccggccgacatcgcgcgcatgaaggaagataagaacattaccctgctggaacagccgggtctgaacgttggttatctctcctttaacaccgagaagaaaccgctggacgacgtcaaagtacgtcaggcgctgacctacgcggtcaacaaagaagcgatcatcaaagcggtttaccagggcgcaggccaggcggcgaagaacctgatcccgccgaccatgtggggctataacgacgacgttaaggactacacctacgatccggagaaggcgaagcagctgctgaaagaagcgggcctggaaaaaggcttcaccatcgatctgtgggcgatgccggtacagcgtccgtacaacccgaacgcccgccgcatggcggagatgattcaggctgactgggccaagattggcgtccaggccaagatcgtcacctacgagtggggcgagtatctgaagcgggcgaaagcgggcgagcaccagagcgtgatgatgggctggaccggcgacaacggggatccggataacttcttcgcgaccctgttcagctgcgccgcggcgaaagacggctccaactactcgcgctggtgctataagccgtttgaagatcttattcagccggcccgcgctaccgacgaccacaacaagcgtattgaactgtacaaacaggctcaggtagtgatgcatgaccaggctccggcgctgatcattgctcactccaccgtctatgagccggtgcgtaaagaagtcaaaggctatgtggtggacccgctgggcaaacaccacttcgataacgtctctgtcgaa

SEQ ID NO: 23844 - DNA, 946 bp, Klebsiella pneumoniae
atgttgcagtttattctccgacgtctgggactagtcatcccgacatttatcggtatcacccttctcacctttgctttcgtccatatgatccccggcgatccggtgatgattatggcgggcgaacgtggtatttcccccgaacgtcacgcgcagctgctggccgaaatgggccttgataagccgctgtggcagcaatatgcccactatatctggggcgtgctgcacggcgatttaggcatctcgctgaaaagccgcattcccgtgtggcaggagtttgtcccgcgctttaaagccactcttgagctgggcgtctgcgcgatgatcttcgccgtcgccgtcggcattccggtgggcgtgctggctgcggtaaaacgcggctccatctttgaccacaccgcggtgggcctggcgctgaccggctactcaatgcctatcttctggtggggcatgatgctgattatgctggtttcggtacagctgaacctgacgccggtctccgggcgcatcagcgatacggtgttccttgacgataccctgccgctgaccggctttatgctgatcgacaccgccatctggggcgagcagggcgactttattgacgccttaatgcatatgatcctgcccgctatcgtgctgggcaccatcccgctggcggtgatcgtgcgtatgacccgttcgtcgatgctggaagtgcttggcgaagactatatccgtaccgcgcgcgccaaaggcctgacccggatgcgggtgatcgtgatccacgcgctgcgtaacgcgatgctgccggtggtcacggtgattggtctgcaggtgggcaccctgctggcgggcgccatcctgacggaaaccattttctcatggcctggtttaggtcgctggctgatcgacgcgctgcagcgtcgcgattatccggtggtgcagggcggggtgctgctggtggcgacga

SEQ ID NO: 23845 - DNA, 1011 bp, Klebsiella pneumoniae
atgagtacgcaaaaggccgccacgccacaaccgctgttgcaggccattgatctgaaaaaacactatccggtgaagaaggggttattcgccccggaacggctggtgaaggcgctggacggcgtctcctttacccttgagcgcggtaaaacgctggcggtagtgggggagtcgggctgcggcaaatcgaccctcggtcgtctgctgacgatgattgagatccccaccggcggcgagctctattatcaggggcaggatctgcttaagcacgacccgcaggcgcagaagctgcggcggcaaaaaatccagattgtgttccagaacccgtatggttcgctgaacccgcgtaaaaaagtggggcagattctggaggagccgctgctgattaacagcagcctgagcaaagagcagcggcgtgaaaaagcgctggcgatgatggcgaaagtgggcctgaaaaccgagcattacgatcgctacccgcatatgttctccggcggtcagcgtcagcgtatcgctattgctcgcgggctgatgctggatccggatgtggtgattgccgatgagccggtctccgcgctggacgtttcggtacgcgcccaggtgctgaacctgatgatggatctgcagcaggatttagggctgtcctacgtgtttatctcccacgacctgtcggtcgtcgagcacatcgccgatgaagtgatggtgatgtatctcggccgctgcgtggagaagggcaccaaagaccagatcttcaacaatccgcgtcatccgtacacccaggcgctgctgtcggcgacgccgcgtctgaacccagacgaccggcgcgagcggatcaagctgaccggcgaactgccgagcccgctaaatccgccaccgggctgcgcctttaacgcgcgctgtcgccgtcgctttggcccctgcactcagctccagccgcagctgaaggattacggcggccagctggtggcctgctttgccgtcgaccaggatgagaatccgcaaaagtcccacgcc

SEQ ID NO: 23846 - DNA, 1107 bp, Klebsiella pneumoniae
atgatgaaagtactttgtggcgcggtgctctcggcgctgctgctggcggcgggccaggtgggcgccgcctgccagtggcccgcctgggagcagtttaaacaagcgtacgtcagccccgagggacgggtgattgaccccagcgatgcgcgcaaaatctccacctccgaagggcagagctatggcctgtttttcgccctggcggccaacgatcgcgtggggttcgacaaactgctgacctggacgcagaacaacctggcggaaggcgatctgaaacaacatttgccgggctggctgtggggcaaaaaggacgatgagcagtggaccctgctggacagcaactcggcgtccgactcggatctgtggatagcctgggcgctgctggaggcgggccgcctgtggcaacagccgcagtacaccgagaccggtaaagccctgctggcgcggattgtcgctgaagagacggtggcggtgccgggcctcggcacgatgctgctgccgggaaaagtcggttttgccgatgacagcggctggcggtttaaccccagctatcttccgccgcagctggccacctactttgtgcgttttggcgcgccgtggcccgctctgcgcgacagtaacctgcgcctgctgctggagaccgcgccgaaaggctttaccccggactgggtgcgctatgataaagggaaaggctggcagctgaaaaccgaaaagccgccgatcggcagctatgacgcgattcgcgtctacctgtgggtgggcatgctccatgatggcgataagcagaaagcgcgtctgctgcaacgcttcacgccgatggcggcgcagaccacgaagcagggggtacccccggagaaagtgaatatcgccaccggcaaaaccagcggtcaggggccagtgggcttctccgcggcaatgctgccgtttttacaggacgacgaggcccggtcggtgcaacgccagcgcgtcgccgataactatcccggcgcggatgcctactacagcgcagttctgacgctgttcggccagggttgggatcaacaccgttttcgtttcacggcgagtggcgaattacaacctgactggaaccaggaatgcgcaagctctcac

SEQ ID NO: 23847 - DNA, 3505 bp, Klebsiella pneumoniae
aattacaacctgactggaaccaggaatgcgcaagctctcactaagtttactcacgctgtccctcggcgttgcgctgctgccgttagcgcaggcggcgacgacgcctgcccaggagcatctgctggagcaggtgcgcctcggcgaggccagcaatcgtgaagacctggtgcgccagtcgctgtaccgtctggagctgattgatcccaacaacccggagctgattgccgcgcggatgcgctatctgctgcgtcagggggatgccgccggggcgcaaaaagagctggaacgactgacgaagctggcgccggactccccggagctgaaggcgtcgcgcaatgagatgaaaagcaacaccggcgagggccgccaggcgctgcagcaggcgcgactgctgggcgtggccgggaaggtcgatgaagccatcgccgcctatgaaaaactgtacggcggggtgccggatgacgttgacgtcgccattgaatactggacgctggtggcgcgcctgccggcccgccatagcgaaggcgtcagccagttgaaacaactgaacgccagcgcgccgggcaacgtcagcctgctgacttcgctggcgaagcagatgttcgccgataacaaaccgcaggaggggttcgcctatctggcggagatggcccgatcggcctcgggacgcggtatcgccgccgatatgtggttcagtgaggtgaaaagcatgccggtgagtaaggccagcgtgcaggcgttgcagcaatttcttctgcagtttcccaccggctcggtggcggcgaacgcccgcgttctgctcgaccaacagcaggcgcagctgcaggatccgactttccgcgcccgctcggaagggctggcggcggtcaagtccgggaataccacgcaggcggtcgcggatctgcagaaagccgttcaggccgacagccgcgacagcgacgcggtgggcgctctcggccaggcctattcccagcgcggcgaccgcgcgcgggcagtggcgcagctcagtaaagcgattgccatggaccctgacagcccgaaccgcggcaagtgggacagcctgctgcaaactaaccgctactggctgctgataaagcagggggataacgccctgaaagccggccagctttcgcaggcgcagaactattatgcccaggcgcagcgggtcgatcgcaccgacagctatgccgtgctggggctgggggatgtcgcggcggcgcgcaaagaggcggcggcggcggagcgctattaccagcaggcgttgcgcctggatcgcggcaataacctggcggtgcgcggcctggccaacctctatcgcgccgaatcgccggagaaagccagcgcctggatcgccggcctccctcccgctcagcggcgcagtatcgatgatattgagcgcagcctgactaacgaccggctggagaaacaggcgcaggctctggagagccagggcaactgggcgcaggcggcggaagttcagcgtcggcgcctggcgctggatccggacagcgtctggataacctaccgtctggcgcgggatctggtcagcgctggcgaacgccaggaggccgacgcgctgatgcggacgatggtcaaccgccagccgcaggacgccgaacgggtctacgcctcgggactctacctgtcggggaacgaccaggacgatctggctctggcgcaaatcgccgctctgccgcgcagcgcgtggacggataacattcgtgaactcgaagcgcgcctgcaaagcgaccgggtgctgcgccaggccaaccagctgcgcgacagcggcgacgaagcgcaggcgatcgccctcatcaaacggcaacccgcctcggtgcgctatgatctgacgctggccgactgggcgcagcagcgcggcgacagccagacggcgattgccgactatcagcgggtgctgcgtcaggaggccgacaacggcgatgcgcgcctcggccttgcggaagtctacctggccgagggcgataaaccggccgcccgggcgcaggtcatgcagctgaaaggcgcagagaccgaatccatgaacatgcagcggcgggtggcgctggcgcgagctggccttggcgataccgctgacgcgcaacggatttttaatcagattgtgccgcaggcgaaggcgcagccgccctcgatggagagcgcgctggtgctgcgcgatgccgcgcgctttgccacccagagcggggcgccgcagcaggcgctgacgcactaccgggaagcgatggtggcctccggcattacccccgcgcagccgcaggataacgatacttttacgcggctgacgcgcaacgacagccatgatgactggctgaagcgtgggatccgcagcgatgccgccgacctttatcgtcagcaggatctgaacgtcaccctggaacataacttctggggttccagcggcaccggcggctattccgacctgaaggcgcataccaccatgctgcaggtggatgctccgctggcggatggccggatgttttttcgcaccgatctggtcaatatggatgccggcagcttttccacccacagcgacgggagctactcgcccagctggggcacctgcggggagatcgcctgtaccagcggcagtaaaaatcagaccgacagcggggccagcgtggcggtcggctggaagaatgacacctggagcggggatatcggcaccacgccgatgggcttcaatgtcgtcgatgtggtgggggggctgagctacagcagcgacgtcgggccggtggggtacacggtcaacgtccaccggcggcctatctccagctcgctgctctcctttggcgggcagaaggacagcagcagccataccggcgccacctggggtggcgtccgcgccgacggcggcggcctgagcctgagctacgatcgcggggaggctcacggcatctggtcctcgctgggcgccgactcgctgaccggtaaaaacgtggcggataactggcgcgtgcgctggatgaccgggtactactacaaggtcatcaacgagaataatcgtcgcgtcaccgtcggcctcaacaatatgatctggcactacgacaaagatctcagcggctacaccctcggccagggcggctattacagcccacaggagtatctctcgttcgccgtgccggtgacctggcgtcagcgcaccgagaactggtcctgggagctcggcgggtcggtgtcatggtcccattcgcgcacccagacgcaagcccgctatccgctgctgaacctgatcccgtccgactaccggcagcgcgccagcgagctgacggaggaggggagcagcagccatggattcggttacaccgccagagcgctggtggagcggcgggtgaccagcaactggttcgtcggcgccgcggtcgatattcagcaggcgaaggattacaccccgagccatgcgctgctttacgtccgctactcggcggccggctggcagggggatctggatatgccgccccagccgctggtgccctacgccgactggtag

SEQ ID NO: 23848 - DNA, 954 bp, Klebsiella pneumoniae
atgaatcagttagacagcatcaagcagttcaccacggtggtcgccgacagcggagacatcgaatccatccgccactaccatccggaagacgccaccaccaacccctctctgctgctgaaggccgccggcctggcgtcctatagcggcctcatcgacgacgctatcgcctgggccaaaaaacagggtggcggccgcgaagcgcaggtgactcacgcctgcgataagctggcggtcaattttggcgcggagatcctcaaaagcattcccggacgggtctccaccgaggtggacgcccggctctccttcaaccgcgagaaaagtatcgagaaggctcgccatctggtggcgctgtatcaggagatgggcattgataagtcgcggatcctgatcaagctggcatccacctgggaggggatccgcgccgcggaggtgctggagaaagaggggatccactgcaacctgacgctgctgttttccttcgcccaggcccgggcctgcgccgaggccggggtttatctcatctccccgttcgttgggcgtatttatgactggtatcaggcgcgcaaaccgctggagccttacgtggtggaggaagatccgggggtgaaatcggtgcgcaatatctatgactatttcaaacagcataaatacaacaccatcgtgatgggcgccagcttccgccgcaccgagcagatcctggcgctggtcggttgcgaccggttgaccatcgccccgcctttattaaaagagctgcaggccagcgataccccggtggtgcgcaaactgatccctgccagccagatcctgccgcgtccggtgccgctcagtgaagcggagttccgctgggaacataatcaggatccgatggcggtcgaaaagctagcggaggggatccgcctgttcgccgtcgatcagcgcaaactggaagatctgcttgccgccaaactgtcactt

SEQ ID NO: 23849 - DNA, 1113 bp, Klebsiella pneumoniae
atgcctttagccgattttcaccgctccgatccttttaccctcggtatcgaactggagctgcaggtggtgaacccgccgggttacgatctcagccaggatgcctcgacgctgattgccgacgtccagcatgagctgaccgtgggagaagccaaacacgacatcaccgagagcatgctggagatcgccaccggggtgtgccgcgacatcagccatgcgcaaatccagctcagcgccatccagcaggcggtccagcgcgcggcgctgcgccatcatctgcagatctgcggcgggggttcccacccctttcatgcctggcagcgccagcaaatcagcgataacccgcgctatgtcaaaaccgtcgagcattttggctatctggcgcagcaggcgacggtctttggccagcatgtgcacgtcggctgccagagcggcgatgacgccatctatctgctgcatggcctgtcgcgctttgtaccgcacttcatcgcccttaacgccgcctcaccgtggtttgacagcaccgacagccgcttcgcctgttcgcgcctgaaccgcttctcctcctatcccgacaacggtccgatgccgtgggtggccgactggcaggggtttcgtcgcctgttccgccagctgagctacaccagcatgatcgatagcatgaaggatctgcactgggatattcgccccagcccgcagtttggtaccgtcgaggtgcgggtgatggacacccccttgacccttgcccaggcgatccacatcgccggctttattcagaccctggcctgctggctgttgacggagcgtccttttaagcaccagcctgatgattatctgctgtacccctttaaccgctatcaggcctgccgctacgggctggacgggaccctcaccgacgtgcgcagcggagagcagcgcagcatccgccaggagatcctgcagctcgccgaccggctggcccctttcgcccatcagctgaaggcgacggcagcgctggaggcggtggttcgccaggcgaaatcgccgcacagcgaggcgcagcagatgcgcgactttatcgccaacggcggttcgctttccgggctggtgcaaaaacactgtgagatttgggcggca

SEQ ID NO: 23850 - DNA, 946 bp, Klebsiella pneumoniae
atgagtaatagcgaacatctcgccacggtgatggtgaatgcctttattgatgctgtagaccgcggcgtggatctggtgccggtggtggccgactccacctcaacggcgaaaattgccccgtttatcaaaagattccctgtgccgggctggtcaacgtcggcatcgccgagcagacgctggttggcgctgccgccggcctggcgctggtggggtaaagtggccgtgacctgcaacgcggcgccattccttatttcacgtgctaatgaacagattaaggtcgacgtttgctacaacaacaccaactgtcaaactgttcgggctgaacgcgggcgccagctacggtccactggccagcacccaccacagtattgacgatatcgccattctgcgcggttttggcaatattgaaatttacgcaccgtccagtcccggcgagtgccggcagattattgattatgcccttgcccacgtcgggccagtgtatatccgcctcgacggtaaagcgctgccggaactgcatgatgaacattaccggtttattccgggcaacattgatgtgctgcgtctggggcgcgatattgcgctggttgccatgggctcaacggtacatgaaattgtggaagccgccgcacaactcgctgcagaaggtattgacgccaccgttatcagtgtcccatctattcgtccttgtgatacccaggcgctactggcggcaatccagtcctgtccggccgcaatcacggtggaagaacacaacgtcaacggcggcgtcgggagcctggtggcggaagtgctggccgaggccgggtgcgctatcccgttgcggcgcttaggtatccctgacgggcaatacgccattgccgccgatcgcgccgccacgcgtgcgcgccatgaaattgatgccgccggggtggtgaagcacgcccgcaagctgctcacaaaaaaa

SEQ ID NO: 23851 - DNA, 1470 bp, Klebsiella pneumoniae
atgtcccgaatggcagaacagcagctttatattaatggtggttatacatcggccaccaacggtcgcaccttcgagaccatcaaccctgccactggcgaggtgctggcgaccgttcaggctgccggacgcgaggatgtcgaccgcgccgtcgagagcgcgcagcgtgggcaaaaaatctgggcggcgatgaccgccatggaacgctcgcgtatcctgcgtcgcgccgtcgaccttctgcgccagcgcaacgacgagctggcgcggctggagacgctggataccgggaaacccctcagtgaaaccgccgccgtcgatatcgtcaccggcgccgacgtgctggagtattacgccggattgatcccggcgctggaaggcagccagatcccgctgcgcgacagttccttcgtctacacccgtcgcgaaccgctgggggtggtagccgggatcggcgcgtggaactacccgatccagatcgccctgtggaaatcggcgccagcgctggccgctggcaatgcgatgattttcaaaccgagcgaagtcaccccgctgaccgccctcaagctggcggaaatttacagcgaagcgggcctgccggacggggtgtttaacgtcctgccagggatcggcgcggaaaccggccagtatctgaccgagcatccggacattgccaaaatctccttcaccggcggcgtcgccagcggcaaaaaagtgatggccaactcggccgcttcatcactgaaagaggtcaccatggagctgggcggcaaatcgccgctgattatcgccgacgatgccgacctcgacctcgccgccgatattgccatgatggccaacttttacagctccggccaggtctgcaccaacggcacccgggtgtttgtcccggcgaaacagaaggcggaattcgagcacaagatcctcgagcgggtggcccgcatccgccccggcgatctgtttgccgacgacaccaacttcggcccgctggtcagcttcccccatcgcgacaacgttctgcgctatatcgagagtggcaaacgcgaaggcgcgcgcctgctgtgcggcggcgaggcgctgaaaggcgaaggtttcgataacggcgcgtgggtcgccccgacggtgtttaccgattgcagcgacgagatgaccatcgtgcgcgaagagatcttcggcccggtgatgtcgatcctcagctatgccgacgaagcggaggtcattcgccgcgccaacgccaccgaatacggcctcgccgccggcgtggtgacgcccaacctcaaccgcgctcaccgaattatccaccagctggaagccggcatctgctggatcaacagctggggggaatccccggcggaaatgccggttggcggctacaaacactccggcattggccgcgagaacggcgtcatgacgctgcagagttacacccaggtgaagtccatccaggttgagatgggtaaattccagtccatattt

SEQ ID NO: 23852 - DNA, 1662 bp, Klebsiella pneumoniae
ttgcaatttgactacatcattattggtgccggctccgccggcaacgttctggcaacacgactgactgaagatccaaacaccaccgtcctgctgctggaagccggcggccctgactaccggttcgatttccgcacccagatgcccgccgcgctggcttatccgctgcagggcaagcgctacaactgggcctacgaaaccgaaccggagccgtacatgaacaatcgccgcatggagtgcggacgcggcaaagggctcggcggctcctcgctgatcaacggcatgtgctacattcgcggtaacgcgatggatctggacaactgggccaaagagccgggtctggaacactggagctatctcgactgcctgccctactaccggaaagcggaaacccgcgatatcgggcctaacgactaccacggcggcgatggcccggtgagcgtgacgacgccgaagccgggcaataatccgctcttcgaggcgatggttgaagccggggtgcaggcgggctatccgcgtaccgacgatctcaacggctaccagcaggaaggctttggcccgatggaccgcaccgtgacgccgcagggccgtcgcgccagcaccgcccgcggctatctcgaccaggcgcgcggtcgcccgaacctgaccatccgcacccatgcgctgaccgatcacattatttttgccggcaagcgcgcggtgggcgtcgagtggctggagggagagagcacgatcccgtcaaaagcgacggccaacaaagaggtgctgctgtgcgccggggcgattgcctcgccgcagatcctgcagcgctccggcgtgggtaacccggagctgctcaggcagttcgatatcccggtggtgcacgatctccccggcgtgggtgagaacctgcaggaccatctggagatgtatctgcagtacgagtgcaaagagccggtatcgctctacccggcgctacagtggtggaaccagccgaagatcggcgccgagtggctgttcggcggcaccggcatcggcgccagcaaccagttcgaagcgggcggttttatccgcagccgcgcagagttcgcctggccgaacattcagtaccacttcctgccggtggcgattaactacaatggctccaacgcggtgaaagagcacggcttccagtgccacgtcggctcgatgcgttcgcccagccgcggccacgtgcgcctgaagtcgcgcgacccgcacgcccatccggcgatcctgtttaactatatgtcccatgagcaggactggcaggagttccgcgacgccatccgcattacccgggagatcatgaaccagccggcgctggataagtatcgcggccgcgaaatcagtccgggaatagaatgccagagcgatgccgaactggatgagtttgtgcgcaaccacgccgagaccgcgttccacccgtgcgggacctgtaagatgggttacgacgagatggcggtggtcgatggcgagggccgcgtccacggtctggaaggattgcgggtggtcgacgcctcgatcatgccgcagatcatcaccggcaatctcaacgccaccaccattatgatcggcgagaagatggccgacgccattcgcggccgccagccgctgccgcgcagcaccgcgacgtattatgtcgctggcgacgcgccggttcgccgc

SEQ ID NO: 23853 - DNA, 891 bp, Klebsiella pneumoniae
atggcagattttccccctgtcgccagcctgcgcagctttgaggcggtggcgcgcctcggcagcgtaacgcaggccgcccacgagatgagcgtgacccattcggcggtcagccagcacatcaaacagctggaagccctggtcggcgtcacgctctttatccgccacggccgcggagtgcgcatcacggaagaaggacggctctatgccctgcaaatccgcgaggcgttacagcacatcgccgacgccacgcgcatggtgcagatcaaaccccgcaccctggaagtgaccctggcgacgctcccctcctttggctgccactggctgctgccgcggctggcgcgctttcaggcgcggcatccgcagatcgcggtgcgcctgctgaccagcctggcggtggttaacctgcaacaggagggtatcgatctggccatacgcatggggcaaggcgactgggaggggatggaaagccggcatctgtttgccgatgaacagctggtggtcgccgcccccggctatcgcggcggtaacctgccgaccaccccgcaggcgatcgccgccagcgatatcattttttccatggagtcctggcatgcctggtgcagccaggcggggctggaaaagccgatcgtcccctcaggcctgcgcctgaacgactccaatctggtgctggaggcggttcgtctgggggccggcgtggcgctggagcggcgctccctggtggcgggggcgatagcccgcggcgagctggtgcagctcaccgccgtcaccgtcccctacccctggcactactggctaaccgtctccccgcaggcggagaaccggccggaagtcgcccggttcatcgcctggctggaggaggagagcgccctctggcgccagcagatcagcgct

SEQ ID NO: 23854 - DNA, 1020 bp, Klebsiella pneumoniae
atgaaaacgattaagggaccgggcatttttctggcgcagtttatcgggccccaggcgccgttcaacaccctggcggggatagcgcagtgggccgccggcctggggtacaaggcattgcagatcccctgcaaccacccggcgatttttgatgtcgagcgggcggcggcgagccagacctactgcgacgaggtcagcggcatcctggcggagcatgggctggtgatcagcgagctgtccactcaccttgaaggacagctggtggcggtgcatccagcgtatgacgcggcgttagacgcctttgccccggcggcgctgcatggcgatccgcaggcgcgccagcgctgggcggtggagaaagtgcaccaggcggcggtagcctccggccgcctggggctgcaggcgcacgcgaccttttccggggcgctggcatggccctttttttatccgtggccgccgcacaatcagccgcttctggatgaggcctttgccgagctggcccggcgctggcggccgctgctggacctattcgacgagcagggagtcgatgtctgctatgagatccatcccggcgaagacctgcacgatggcgtgacctttgagcgttttcttacgctggtggataaccatccgcgctgcaatatgctctatgacccgagccacctgcatctgcagcagatggactacctgacctatatcgatatctatcatgcgcgtattaaagcgtttcacgtcaaggacgccgaatttcgccgcaacgggcgcaatggcgtctacggtggataccagccctggcagcagcgggccgggcgtttccgctctcccggcgacggacagatcgacttcaaaggggtgttcagtaagctgaccgaatatgattttgccggctgggcggtgctggagtgggagtgctgcctgaaggatagtgagaccggcgcgcgcgagggcagcgagtttatccgccgccatatcattcccgttgccggacgggccttcgatgactttgccgccggcgggagggaa

SEQ ID NO: 23855 - DNA, 1192 bp, Klebsiella pneumoniae
cggctgtcgttaatgatgtttatgcagttttttatctggggcagctggtcggtgaccctggggctggtgatgacccgctatgagatgtcattgctgatcggcgatgcgttctccgccgggccgatcgcctccatcttgtctccctttgtgctggggatgctggtggatcgctttttcgcctcgcagaaggtgatggctggtgatgcacctggccggtggcggcgatcctgtggtttgtcccgcaggctgctggtggctgcagaactggctgccctgctgattggcctgctgttcggctatacgctgtgctatatgccgaccctggcgctgaccaacaatatctgccttccacagcctggccaatgtcgataaaaccttcccggtggtccgcgtgttcggcaccatcggctggattatcgccgggatctgcatcggggtgaccggtatctctgataccaccggcatcttcacgctggcggcgctctgttcggtcgcgctggcgctctacagcctgacgctgccgcacaccccggcgccggccaaaggcatgccggttcagtttcgcgacctgctgtgcgcggacgccttcgcgctgctgaaaacccgccatttcctgattttctccctctgcgccaccttaatttccgtgccgttaggcacctattacgcctataccgcgtcgtatctggcggatgccggcgtcaaagatgtcagcaccgcgatgtcgttcggtcagatgtcagagatcgtctttatgctggtgatcccgttgctgttccgtcgcctcggggtgaaatacatgctgctcatcggcatggcggcgtggttcgtccgctacgcctttttcgctctcggagtcagcgaggaggggcgcttcctgctctatctgggcattttgctgcacggcgtgtgctatgactttttctttgtcgttggctttatctacaccgaccgcgtggcgggcgagaaggtaaaaggccaggcgcagagcatgattgtgatgttcacctacgggatcggcatgctgctgggctcgcagatctccggcgcgctgtataaccatctggtggccggccagagcgtgcctcaggcctgggtgaccttctggtggatcccggcggtggccgccgcggttatcgcgctgattttccttttctctttccagtacaacgagaaagagccgcactaattt

SEQ ID NO: 23856 - DNA, 297 bp, Klebsiella pneumoniae
atgaccacacctgaagacctgcaggcccgcgccggagaagccgccgcgctgatgaaagcgatgagcaatcctcaccgattgctgatcctgtgcatgctgtgcgatgcgcccagggccagcgccggcgaactcgcccgggctacagggctgagcccctccgccacctcgcaacacctcgcgcggatgcgtgacgaggggctgatcgacagcgagcgcgacgcccagcgtatccactatttcatcacccaccctgcggtacagcaggtgatcaatacgctgaaaacgctctattgcccg

SEQ ID NO: 23857 - DNA, 528 bp, Klebsiella pneumoniae
atggatagttcgtttactcccattgagcaaatgctcaagttccgcgccagccgccatgaagatttcccgtttcaggagatcctgttaactcgtctttgcatgcatatgcaaggtaagctgctggaaaatcgcaataaaatgctcaaagcgcagggaattaacgagacattatttatggcgctgattacgctggagtcacaggaaaaccacagcatccagccgtccgagctgagctgtgcgctgggctcgtcacgtaccaacgccacccgtatcgctgatgaactggaaaaacgcggctggattgagcgccgcgagagcgataacgatcgtcgctgtttgcatctgcaactgaccgaaaagggccatcagtttttgcgtgaagtcctgccgccgcagcataactgcctgcatcagctgtggtcttcacttagcaccagcgaaaaagatcagctcgaacacatcacccgcaaactcctgagccgccttgatcagatggaagaagaaggcgtgctagcggactctctacgc

SEQ ID NO: 23858 - DNA, 551 bp, Klebsiella pneumoniae
aaaggaaaaaccatgtccgttcagcctgtcgaaataagtaaggcctatcgtttattgcagtcgggtccaccaccatgatttccgcaaaatatgatggcgtcgaaaatgtcatgtcagccgcctgggttgggctggcaggcgagcgaaaagtggtggcctatattggcacccaggctttcactcgtcagctggtggaaaagagcggctatttcgtggtgcagatccccgtagtcagccagatggcaaccgtcctctacgctggcgggcgcagctatgccgacgcgccggataaaaatgacaccatccccttcttttatcagccggaatttgatcttcctcttgtggcaggctgtgcgggctggctggtgtgcaaagtgatgccctacccggacattcagcagcaacacaatctgtttatgggcgatatcgtcgccgcctggagcgatgaccgggtattccgcaacggacactggatttttgatgatgcgccggacgagctacggaccgttcactatgtcgcaggcgggcagttctatgccatcggcaaaggc

SEQ ID NO: 23859 - DNA, 3150 bp, Klebsiella pneumoniae
atggacttttcccgcttttttatcgacaggccgattttcgccgcggtgctgtcgattttaatttttatcaccgggttaatcgctatcccgctgctgccggtgagcgaatatccggatgtcgtcccgccgagcgtccaggtgcgcgcggagtatcccggcgccaacccgaaagtgattgccgagaccgtggcgacgccgctggaggaagcgatcaacggcgttgaaaacatgatgtacatgaaatcggtcgccggctccgacggcgtgctggtcaccaccgtcaccttccgcccgggtaccgacccggatcaggcgcaggttcaggtgcagaaccgcgtcgcgcaggcggaagcgcgtctgccggaggatgtacgccgtctggggatcaccacccagaagcagtctccgacgctgaccctggtggtgcatctgttttcgccaaacggtaagtacgactcgctgtatatgcgcaactacgccacgctgaaagtgaaggatgagctggcgcgcctgcccggcgtcggccagatccagatttttggctccggtgaatatgcgatgcgcgtctggctggatcccaataaggtcgcggcccgcggtctgacggcctcggatgtggtgacggcgatgcaggagcaaaacgtccaggtgtctgccggacagcttggcgccgagccgctgccgcaggagagcgatttcctgatctccattaacgcccagggccgtctgcataccgaagaagagtttggcaatatcattctgaaaacggcgcaggatggctcgctggtccgcctgcgcgacgtggcgcgcatcgagatgggttccggtagctatgcgctgcgctcccagctcaacaataaggatgcggtcgggatcggtatcttccagtcacccggcgctaacgccatcgatctgtcgaacgcggtacgcgccaaaatggccgagctggccacccgcttcccggaagatatgcaatgggcggcgccgtacgacccgacggttttcgtccgcgactccatccgcgcggtggtgcagacgctgctggaggcggtagtgctggtggtgctggtagtgatcctgttcctgcagacctggcgcgcgtcgattatcccgctgatcgcggtgccggtatcggtggtgggtaccttcagcattctctatctgctgggcttctcgctgaataccctgagcctgttcgggctggtactggcgattggtatcgtggtggacgacgccatcgtggtggtggagaacgtcgagcgtaatatcgaagaggggcttgcaccgcttgccgcggcgcatcaggcgatgcgtgaggtctccgggccgattatcgccattgcgctggtgctgtgtgcggtgttcgtgccgatggcgtttctctccggggtcaccggccagttctacaaacagttcgcggtgaccatcgccatctcgacggtgatctcggccatcaactcgctgacgctctccccggcgctggcggccctgctgttaaagccgcacggcgcgaagaaagacctccctacccggctgatcgatcgcctgtttggctggattttccgtccgtttaaccgctttttcctgcgcagctcgaacggctatcagggactggtaggcaaaacgcttggacgccgtggcgcagtgtttgcggtgtacctgctgctgctctgcgccgctggggtgatgtttaaagtcgtccccggcgggtttattcccacccaggataagttgtatctcattggcggcgtgaagatgccggaagggtcgtcgctggcgcgcaccgacgcggtgatccgcaaaatgagcgagatcgggatgaataccgaaggggtcgactatgcggtcgctttcccggggcttaacgcgctgcagttcaccaacacgccgaataccgggacggtcttttttggcctgaaaccgttcgaccagcgcaaacacacggcggcggaaattaacgcggagatcaacgccaaaatcgcgcaaatccagcagggctttggcttctccatcctgccgccgccgattttaggactgggtcagggttccggctactccctgtacatccaggatcgcggagggctgggctatggcgcgctgcaaagcgcggtgaatgcgatgtccggggcgattatgcaaacgccggggatgcacttcccgatctcgacttaccaggctaacgtgccgcagctggacgtgcaggtcgatcgcgataaggcgaaagcgcagggggtatcgctaaccgagctattcggtacgctgcagacctatctcggctcgtcttatgtcaatgactttaaccagttcgggcgtacctggcgcgtgatggcccaggccgatgggccataccgcgagagcgtggaagatatcgccaatctgcgcacccgcaataatcagggcgaaatggtgccgatcggcagtatggtgaatatcagtaccacctacgggccggatccggtgatccgctacaacggttatccggcggcggacctgattggcgatgccgatccgcgggtcctctcttcttcgcaggcgatgacgcatctggaggagctgtcaaagcagatcctgccgaatgggatgaatattgagtggacggatctcagcttccagcaggccacccagggcaacacggcgctgatcgtcttcccggtggcggtgctgctggcgttcctcgtgctggccgcgctgtatgaaagctggaccctgccgctggcagtgatccttatcgtgccgatgacgatgctctccgcgctgtttggtgtctggctgaccgggggcgataacaacgtcttcgtgcaggtggggctggtggtcctgatgggcctggcctgtaaaaacgccattctgatcgtcgagtttgcccgcgagctggagatccaggggaaaggcatcatggaagccgccctggaggcgtgccgcctgcgtctgcgcccgatcgtgatgacctccatcgcctttatcgccgggaccattccgctgatcctcggccacggcgcgggggcggaagtccgcggcgtcaccgggatcacggtgttctccgggatgctgggcgtgacgctcttcggtctgttcctgacgccggtgttttacgtgacgctgcgaaaactggtgacccgcaggaagccggtccaggaggatctgcccgcc

SEQ ID NO: 23860 - DNA, 637 bp, Klebsiella pneumoniae
atgcgcattattatttacactcgaaatgactgcgtgcagtgccatgccacccggcgagccatggagagccggggactggcctttgaaatggtcaacgtcgaccagcagccggatgccgccgacaccctgcgcgagcagggatttcgccagctgccggtggtgatcgccggtgagctgcgctggagcggcttccgcccggatatgatcaatcgcctgcgcccctcctttacggcggccagcgcatgagcctcatcgtctacttctccagccgttcggagaatacccatcgctttgtgcagcgcctggggctgccggcggtgcgcatcccgctgaacgagcgtgaacatctgcgggtagacgagccctatattctcatcgttcccagctatggcggcggcggcaccgccggcgcggtaccgcgtcaggcgatccgctttttaaacgacgtgcataaccgccagctgatccgcggagtgattgccgccggcaatcgcaactttggcgacggctgggggcgtgccggagatgtcatcgcgcaaaaatgcgccgtgccctatctctaccgcttcgagctgatgggaacccccgacgatatcaacaccgtgcgtaaaggagtcagtgaattttggcaacgaca

SEQ ID NO: 23861 - DNA, 2139 bp, Klebsiella pneumoniae
ttggcaacgacaaccgcagaacgtataaccgccgccgtggattttcacgccctcaacgcgatgctgaatttgtacgacagcgagggccgcatcccgtttgagaaagatcgccaggcggttgaggcctttatggcgacccaggttcagcccaacgccctcaccttccccagccaggaggataagctcagctggctcgtcagcgagggctattacgatccgcaggtgctggccggctatgaccgcgggtttgtgctggcgttgttcgcccatgcccggcgcgctccgtttcgctttcagaccttcctcggcgcctggaagttctataccagctatgcgctgaagacctttgacggcaagcactacctcgaggatttcgccgaacgcagcgtgatggtggccctgacgctggcccggggcgatgaacagcaggcgcggcagctgacggaggagatactcagcggccgctttcagcccgccacaccgaccttccttaacgctggcaaacagcagcgcggggagctgatctcctgcttcctgctgcgtattgaggataatatggagtccatcggccgggcggtgaactcggcgctacagctgtcgaagcgcggcggcggggtggcctttttactctccaacctgcgcgaggccggggcgccgatcaagcgcatcgaaaaccagtcttctggggtggtgccggtgatgaagatgctggaggacgccttctcctatgccaatcagctcggcgcccgccagggggcgggtgcggtctggctgcatgttcaccatcccgatattttacgctttcttgatacccggcgtgaaaatgccgatgagaaaatccgcatcaaaaccttgtcgctgggggtggtgatccctgatatcaccttccagctggcgaaagaagatgcgcagatggccctgttctcgccttatgacgtcgaacggctgtacggcaaacctttcgccgattgcgccatcggcgacctctatccgcagctggtggccgacgagcgggtccgcaagcgctggatccgcgcccgcgacctgttccagcgcctggcggagatccagtttgaatccggctacccgtacatcatgtttgaagacaccgtgaaccgcgccagtccggtggccgggcgggtcaccatgagcaatctgtgttcggagatcctgcaggtcagtacgccgtccgcctataatgaagacctcagctatgcccatatcggggaagatatctcctgcaacctcggctcgctgaacatcgcccataccatggactcgccggatttcggccgcacaatcgccaccgcggtgcgcgccctgaccgccgtgtccgacatgagccacattcagtcggttccctcggtggcggccggcaacgcggcctcccacgccatcggcctggggcagatgaatctgcacggttacctggcgcgggaaggcattgcctacggcagcccggaggggctggacttcaccaatatctacttctacaccgtgacctggcacgcgctgcacacctcgatgcagctggcccgcgagcgcggccagcgcttcgccggcttcgagcagtcgcgctacgccagcggggcgtacttcgacaaatatctgcaggaggagtggcagccgaaaaccgaacgggtgcgcgcgctgttcgcccgcgccggcatctctctgcccgaccgggaaagctggcgccagctgcgcgacgatgtcatgcgctatggcatctacaatcgctatctgcaggcggtgccgcccaccggctcgatctcgtacatcaaccatgccacctccagcattcacccgatcgtctcgaagattgagatccgcaaagaggggaaaaccgggcgagtgtactaccccgcgccatttatgaataacgacaatctggccctctaccaggatgcgtatgagatagggccggagaagatcattgacacttacgccgaggcgacgcgccacgtcgaccaggggctgtcgctgaccctgttcttccccgacaccgccaccacccgcgatatcaacaaggcgcaaatttacgcctggaagaaaggcatcaagacgctctactacatccgtctgcgccagctggcgctggaaggcactgaaattgaaggctgcgtgtcctgcgcgctg

SEQ ID NO: 23862 - DNA, 960 bp, Klebsiella pneumoniae
atgacccatttaacgcgcgtcagcgcaatcaactggaaccgcattgatgacgataaagatcttgaggtctggaaccgtctcaccagcaacttctggctgccggagaaagtgccgctgtcgaacgacattcccgcctggcaaaccctcagcgcggcggagcagcagttgaccattcgcgtctttaccggattgaccctgcttgacaccattcagaacaccgtcggcgccccggcgctaatggcggacgccttaaccccgcatgaggaggcggtgctgtcgaacatcagctttatggaggcggttcatgcccgctcttacagctccatcttttccacgctgtgccacagcaaggaagtggatgccgccttcgcctggagcgaaagctgcgatcctctgcagcgcaaggcgcagctgatgctgggttactatcaggccgacgagccgctgaagaaaaaaatcgccagcgtgttcctcgaatcctttctcttctactccggcttctggctgccgatgtacttctccagccggggaaagctgaccaacactgcggatctgatccgcctgatcattcgcgatgaagcggtgcatggctattacatcggctacaagtaccagaaaggactggagatcgtcagccccggcaagcgcgaagaattgaaaaatttcgccctcgatctgctgatggatctttacgacaacgaactggcctacagccgggagctgtacggcgagagcggctggttcgacgacgtcagcgctttcctgtgctacaacgccaacaaagcgctgatgaacctcggctacgaggcgctgttcccggcggagatggcggcggtcaatccggcaatcctcgcagcgctgtcgcccaacgccgacgaaaaccatgactttttctccggttccggctcctcctacgtgataggaaaaatggaagagaccgccgacgacgattgggacttt

SEQ ID NO: 23863 - DNA, 3120 bp, Klebsiella pneumoniae
atgcaggtgttacccccaggccgcaccggcggcccgtcccggctgtttattatgcgtccggtggccaccactctgctgatggtggctatcctgctggccgggatcatcggctatcgctttctgccggtctccgccctgccggaggtcgattacccgaccattcaggtagtcaccctctatccgggcgccagcccggacgtggtgacctccgccatcaccgccccgctggagcgccagttcggccagatgtcaggcctcaagcagatgtcgtcgcaaagctccggcggcgcctcggtagtcacgctgcagttccagctgaccctgccgctggacgtcgccgagcaggaagtgcaggcggccattaacgccgccaccaacctgctgccgagcgatctgcccaacccgccggtctacagcaaggtgaacccggcggatccgccgatcatgaccctcgccgtcacctcctccgccatcccgatgacccaggttgaggacatggtggagacccgggtggcgcagaagatctcccaggtttccggcgtcggtctggtgaccctcgccggcggccagcgcccggcggtgcgggtgaagcttaacgcccaggccatcgccgccctcggcctgaccagcgaaaccgtgcgcaccgctatcaccagcgccaacgttaactccgcgaaaggcagcctcgacggcccggcccgcgcggtgacgctttccgctaacgatcagatgcagtccgctgaggattatcgccggctgattatcgcttatcagaacggggcgccgatccggctcggcgatgtcgccagcgtcgaacaaggggccgaaaacagctggctcggggcatgggccaaccagcagcgggccatcgtgatgaacgtccagcgccagccgggggccaacatcatcgacaccgccgacagcattcgccagatgctgccgcagctcaccgagagcttgccgaaatcggtgaaggtgcaggtcctctccgaccggaccactaacatccgcgcctcggtgcgcgacacccagtttgagctgatgctggccatcgccctggtggtgatgatcatctatctgttcctgcgcaacgtgccggcgaccattattcccggcgtcgcggtgccgctatcgctggtgggcacttttgcggtgatggtgttcctcgacttctcgatcaacaacctgacgctgatggccctgaccatcgccaccggcttcgtggtagatgacgccatcgtggtgatcgagaacatctcgcgctatatcgaaaaaggcgagaagccgctggccgccgcgctgaagggcgcgggggagatcggcttcaccatcatctccctcaccttctcgctgatcgcggtgctgatcccgctgctgtttatgggcgatatcgtcggccgcctgttccgcgaattcgccgtcacccttgccgtcgctattcttatctcggcggtggtctccctgaccctgacgccgatgatgtgcgcccgcatgttaagccacgaatcgctgcgcaagcagaaccgattctcgcgggccagcgagcgtttcttcgaacgggtgatcgccgtctatggccgctggctgagccgggtgctgaaccatccgtggctgacgctcggcgtcgccctgagcaccctggcgctgtcgattatcctgtgggtctttatcccgaaaggctttttcccgatccaggataacggcattatccagggtaccctccaggcgccgcagtcggtctccttcgccagcatggccgagcgccagcggcaggtggccagcattatccttaaggatccggcggtggagagtctgacctccttcgtcggcgtcgacggcaccaacccggcgctgaacagcgcccgcctgcagatcaacctcaagccgctggacgaacgcgacgaccgcgtccagatggtgattagccgtctgcagcaggcggtggacggcgtccccggcgtggcgctctacctgcagccgacccaggacctgaccatcgacaccacggtgagccgcacccagtatcagttcaccctgcaggcaaactccctcgaggcgctgagcacctgggtgccgccgctgctcagccgcctgcaggcccagccgcagctggccgacgtcagcagcgactggcaggacaaaggcctggccgcctatatcaaggtggatcgcgacagcgccagccgcctcggcatctcaatggccgatgtcgataacgcgctgtacaacgccttcggccagcggctgatctccactatttacactcaggcgaatcagtatcgcgtggtgctcgagcaggataccgaggcgacgccgggcctggcggcgctggagaatatccgtctcaccagcagcgacggcggcatcgtgccgttgaccgccatcgccacggtggagcagcgctttaccccgctgtcggtgaaccacctcgatcagttcccggtgaccaccatctcgtttaacgtcccggacaactactcgctgggcgaagcggtggaggcgatcctcgccgccgaacagtcgctggatttcccgaccgatatccgcacccagttccagggcagctcgctggccttccagtcggcgctcggcagcaccgtctggctggtggtcgccgcggtggtggcgatgtatatcgtgctgggggtgctgtatgaaagctttatccatccgatcacgatcctctccaccctgcccaccgccggggtcggggcgctgctggcgctgtggctggcgggcagcgagctggacgtgatcgccatcatcggcatcattctgctgatcggcatcgtgaagaagaacgccatcatgatgatcgacttcgcgctggccgccgaacgcgaacagggcatgccgccgcgggaggcgatttaccaggcctgtctgctgcgttttcggccgatcctgatgactaccctcgccgccctgctcggcgccctgccgctgatgctgagcaccggcgttggcgccgagctgcggcgtccgctggggatcggtatggtcggcggtctgatgctcagccaggtgctgaccctgttcaccaccccggtgatctatctgctgttcgaccgcctgtcgctgcacctgaagcgccgcttcccgcgtcaggaagaggaggcg

SEQ ID NO: 23864 - DNA, 3075 bp, Klebsiella pneumoniae
gtgaagtttttcgccctcttcatttaccgcccggtggcgacgatcctcatctcgctggccatcaccctgtgcggcattctcggcttccggctgctgccggtagccccgctgccgcaggtggacttcccggtgatcatggttagcgcctcgctgccgggagcctcgccggagaccatggcctcgtcggtggccaccccgctggagcgctccctggggcggattgccggggtcaatgagatgacctcctccagctcgctcggcagcacccgcatcattctcgagtttaacttcgaccgcgatatcaacggcgcggcgcgcgacgttcaggcggcgatcaacgccgcgcaaagcctgctgccgagcggaatgcccagccggccgacctatcgcaaagccaatccgtcagatgcgccgatcatgatcctgacgctgacctcggacacctactcccagggtgagctgtatgatttcgcctccacccagctggcgcagaccatcgcgcagatcgacggcgtgggcgatgtcgacgtcggcggcagctccctgccggcggtgcgcgtcgacctcaacccgcaggcgctgtttaaccagggcgtgtcgctggacgcggtgcgcaccgccatcagcgacgccaacgtgcgcaaaccgcagggggcgctggaggacagtgcgcaccgctggcaggtgcagaccaacgatgagctgaagaccgccgccgactatcagccgctgatcgtccactatcaaaatggcgccgcggtgcggctgggagatgtcgccaccgtctcagattcggtgcaggacgtacgcaacgccgggatgaccaacgccaaaccggcgatcctgctgatgatccgcaaactgccggaagccaatattatccagacggtggacagcatccgcgcccgcctgccggagctgcagcagaccattccggcggctatcgacctgcagatcgcccaggaccgctcgccgaccatccgcgcctcgctggaggaagtggaacagacgctggtgatttcggtggcgctggtgatcctcgtggtgttcctgttcctgcgctcggggcgcgccacgctgatcccggccgtcgccgtcccggtttccttaatcggcaccttcgccgcgatgtatttgtgcggcttcagcctcaataacctgtcgctgatggccctgaccatcgccaccggcttcgtggtggatgacgctatcgtggtgctggagaatatctcccgccatctggaggcggggatgaaaccgctgcaggcggcgctgcaggggagccgcgaggtcggctttaccgtgctgtcgatgagtctgtcgctggtggcggtgttcctgccgctgctgctgatgggcggcctgcccggccgcctgctgcgcgagttcgccgtcaccctgtcggtggcgatcggcatctcgctggcggtctccctcaccctgacgccgatgatgtgcggctggctgctgaaaagcggcaagccccaccagccgacgcgcaaccgcggctttggccgcctgctggtggccgtgcagggcggctatggtaaatcgttaaaatgggtgctgaagcatagccggctgaccggcctggtggtgctgggcaccatcgccctcagcgtttggctctacatttcgatcccgaaaaccttcttcccggagcaggacaccggggtgctgatgggcggcattcaggccgaccagagcatctccttccaggcgatgcgcggcaagctgcaggactttatgaagatcattcgcgaagatccggcggtggataacgtcaccggctttactggcggctcgcgggtcaacagcgggatgatgtttatcaccctcaagccgcgcgaccagcgccacgagacggcgcagcaggtgatcgaccggctgcgcaaaaagctggccaacgagcccggggccaacctgttcctgatggcggtgcaggatatccgcgtcggcggccggcagtcgaacgccagctatcagtacaccctgctgtccgacgacctgtcggcgctgcgcgagtgggagccgaagatccgcaaagcgctggcggcgctgccggagctggcggacgtcaactccgatcagcaggacaatggcgccgaaatggacctggtctatgaccgggataccatgtcgcgcctcggcatcagcgtccaggacgccaacaacctgctgaacaacgcctttggccagcggcagatctctaccatctaccagccgctcaaccagtataaggtggtgatggaggtggatccggcctacacccaggacgtcagcgccctggataagatgttcgtcattaacagcgacggcaagccgattccgctggcctacttcgccaaatggcagccggccaatgccccgctgtcggtgaaccaccaggggctgtcggcggcatccactatctcctttaacctgcccaccggccgctcgctgtcggaagccagcgaggccatagaccgcgcgatgacccagctcggggtgccgtcgagcgtgcgcggctcctttgccggtaccgctcaggtgttccagcagaccatgaacgcgcaggtgatcctgatcctcgcggctatcgccacggtctatatcgtgctgggggtgctatatgagagctatgtgcatccgttgaccatcctctcgacgctgccctccgccggggtgggcgctctgctggcgctggagatcttcgatgccccgttcagcctaatcgccctgattgggattatgttattaattggcatcgttaagaaaaacgccatcatgatggttgattttgccctggaggcgcagcgcaacggcaacctgacgccggaagaggcgattttccaggcctgcctgctgcgtttccggccgattatgatgaccaccctcgctgcgctgttcggcgccctgccgctggtgctatccgggggcgatggctttgagctgcgccagccgctggggatcaccatcgtcggcggtctggtgatgagccagctgttaacgctctacaccacgccggtggtctatcttttctttgaccgtctgcggctgcgtttttcgcgtcactcctctcaaccggtaagcgaa

SEQ ID NO: 23865 - DNA, 1359 bp, Klebsiella pneumoniae
atgtttaaaccagaactcctctccccggcgggaacgctgaagaatatgcgttacgctttcgcctatggcgccgatgccgtttatgccggccagccgcgctactcgctgcgcgtgcgtaacaacgaattcaatcacgaaaatctgcagctcggcatcaatgaagcccacgcgctgggtaaaaaattctatgtggtggtcaacatcgccccgcataacgccaagctgaaaacgtttattcgcgatctgaagccggtggtggagatgggtccggacgcgctgatcatgtccgatccgggtttaatcatgctggtgcgggaacacttcccggagatgccgatccatctttcagtgcaggccaacgccgtcaactgggcgacggtcaaattctggcagcagatggggctcacccgcgtgatcctgtcgcgtgaactgtcgctggatgaaatcgaagagattcgccgccaggtgccggagatggagattgagattttcgtccacggcgcgctatgcatggcctactccggccgctgcctgctctccgggtatatcaacaagcgcgacccgaaccaggggacctgcaccaacgcctgccgctgggaatacaacgtggcggaaggcaaagaggacgacgtcggcaacatcgtccacaaatatgagccgatcccggtgcagaccgtggagcccaccctcggcatcggcgcgccgaccgataaagtctttatgattgaggaagccaaacgtccgggcgagtacatgaccgcctttgaggacgaacacggcacctacatcatgaactcgaaagatctgcgggctatcgcccacgttgagcgtctgacccagatgggcgttcactcgctgaagatcgaaggccgcaccaaatccttctactactgcgcgcgcaccgctcaggtttaccgcaaggcgatcgacgatgccgccgccggcaaaccgttcgataccagcctgctggagaccctggaggggctggcccaccgcgggtacaccgaaggcttcctgcgccgccatacccatgacgattatcagaactacgagtacggctactccgtctccgagcgccagcagtttgtcggcgaattcaccggagagcgtaacggcccgctggcggccgtggcggtcaaaaataagttcagcgtcggcgacagccttgagctgatgaccccgcagggtaacgtcaacttcacccttgagcatatggagaatggcaaaggcgaaaccatgccggtggccccgggcgatggctataccgtctggttgcctgtgccggacgacctgcccctgcagtatgccctgctgatgcgcaactttactggtcaaacaaccagaaatccgcacggtaac

SEQ ID NO: 23866 - DNA, 894 bp, Klebsiella pneumoniae
atgatgtctacgtttcctgccagcttactgatccttaacggcaaaggtgccaatgaaccgcagctacgcgaagcggttaacctgttacgcgatgaagggattgatattcacgtccgcgtgacctgggaaaagggcgatgccgctcggtttatcgatgaagccctgcagctgaacgttgaaacggtgatcgccggcggtggcgatggcaccattaatgaagtggcgaccgcgctggtggagcgcggcggcaagatggcgctagggattttaccgctgggcacggctaacgactttgccaccagcgtcggtatcccgcaggatctggccagcgccctcaagctggcgatcgtcggccgcgatgtgccgatagatatcgcccgggtgaatgataaaaccggctttattaatatggcgaccggcgggttcggcacccggatcaccaccgaaacgccggaaaaactcaaggccgcgctcggcggtgtctcttatttaatccacggtctgatgcgtatggatactctgaagccggaccgctgcgagatccgcggggagaactttcactggcagggcgatgcgctggtcatcggcatcggcaatggccgccaggccggcggcggccagcagctgtgcccggaggcgttgattaacgatggtctgctgcatctgcgcattttcaccggcgaagagctgatccctgccctgttcagcaccctggcgaatccggaaaactcgccgaatattgttgacggtgtctcctcgtggtttgagatcaccgccccccatgagatgacgtttaacctcgacggcgagccgctcagcggcaaaaccttccgtatggagctgttaccggcggccctgcgctgccggctgccgcccgactgcccgctgctacgc

SEQ ID NO: 23867 - DNA, 315 bp, Klebsiella pneumoniae
atgcgtaaaacaaaaatgatgcttctgggcgtacttcttgccaccgctggcgccagctggacggctactgccgcggggatcgatcagtatgcgctgaaagagttcaccgccgatttcacccagtttcacatcggcgacaccgttccggcgatgtatctcaccccggaatacaacattaaacagtggcagcagcgtaacctgcctgcgccggacgccggcagccactggacctatatgggcggtaactacgtgctgattaccgataccgaaggcaaaatcctcaaagtgtatgatggcgagatcttctaccatcgc

SEQ ID NO: 23868 - DNA, 2040 bp, Klebsiella pneumoniae
atgctcactatgactcaagtcgcgaagaaaattctggtaacgtgcgccctgccgtacgccaacggctccatccacctcggccacatgctggagcacatccaggctgatgtctgggtccgttaccagcgaatgcgcggccacgaggtcaacttcatctgcgccgacgacgcccacggcacgccgattatgctcaaagcgcagcagctcggtatcactccggagcagatgattggcgaaatgagtcaggagcatcagaccgatttcgccggcttcgacatcagctatgataactatcactcgacgcacagcgacgagaaccgcgagctgtcggagcttatctacacccgcctgaaagagaacggttttattaaaaaccgcaccatctctcagctctacgatccggaaaaaggcatgttcctgccggaccgttttgtgaaaggcacctgtccgaagtgcaaatctccggaccagtatggcgataactgcgaagtgtgcggcgcgacctacagccctaccgagcttatcgacccgaaatcggtggtctccggcgccacgccggtgatgcgtgactccgagcactttttcttcgacctgccgtcgttcagcgaaatgctgcaggcgtggacccgcagcggcgccctgcaggagcaggtcgcgaacaagatgcaggagtggttcgaatccggcctgcagcagtgggacatctcccgcgatgcgccgtacttcggcttcgaaattcccaacgcgccgggcaaatatttctacgtctggctggacgcgccgatcggctacatgggctccttcaagaacctgtgcgacaagcgcggcgacaccaccagcttcgacgaatactggaagaaagactccacggccgagctgtatcactttatcggcaaggacattgtctacttccacagcctgttctggccggcgatgctggaaggcagcaacttccgtaagccgactaacctgttcgtgcacggctacgtgacggttaacggcgccaaaatgtccaagtcgcgcggcacctttatcaaggccagcacctggttaaatcatttcgatgccgacagcctgcgctactactacaccgccaagctctcttcgcgcatcgatgacatcgacctgaacctggaagatttcgtgcagcgcgtgaacgcggacatcgtcaacaaggtggttaacctcgcctcgcgcaacgccggctttatcagcaagcgtttcgacggcgtgctggccgctgagctggccgacccggcgctgtacaaaaccttcaccgacgcggcggaaagcatcggcgaagcatgggacagccgcgagttcggtaaggccatccgcgaaatcatggccctcgccgacgtggctaaccgctacgtcgacgagcaggcgccgtgggtggtggcgaaacaggaaggccgcgacgccgacctgcaggccatctgcaccatgggcctgaatatgttccgcgtgctgatgacctggctgaagccggtcctgccgcagctggccgcgcgtgcggaagcgttcctcaacagcgaactgagctgggacgccattcagcagccgctgctggcgcataaggtgaatccgttcaaggcgctgtacaaccgtatcgagatgaagcaggtggaagccctggtagaagcttctaaagaagaggtgaaagccaccgcggcgccggtcaccggtccgctggcggacgatccgattcaggagaccatcacctttgacgatttcgccaaagtcgatctgcgcgtggcgctgattgaaaacgcggaattcgtcgagggctccgacaagctactgcgcctgacgctggatctcggcggcgaaaaacgtaacgtcttctccggcatccgctccgcctatccggatccgcagccgctgattggtcgcctgacggtgatggtcgccaacctggcgccgcgcaaaatgcgcttcggcatctccgagggcatggtgatggccgccggccctggcgggaaggatatcttcctgttaagccctgacgacggcgccaagccgggtcagcaggtgaaa

SEQ ID NO: 23869 - DNA, 1722 bp, Klebsiella pneumoniae
atggtacgcgctttcaggcatgtgtggtttgcgggtatgtacgagtttgatctggtgttgctgctgcttcagcagatgtgcgtatttttggtcatcgcgtggttgatgagcaaaacccgactgtttatccccctgatgcaagtcaccgttcgcctgccgcacaagctgttgtgctacgtcaccttctccattttctgcattatggggacctatttcggtctgcatatcgaagactccatcgccaacacccgcgccatcggcgccgtgatgggcggcctgctcggcgggccggtggtcggcgggctggtagggctcaccggcggcctgcaccgctactcgctggggggaatgaccgccttaagttgcatggtctccaccatcgttgaggggctgctgggcggtctggtgcacagcgtgctggtcaaacgcggccggccggacaaagtctttagcccgctgaccgccggggcgatcaccttcgtggccgagctggtgcagatgatgatcattctgctgattgcccgcccgttccaggacgccctgcatctggtgcagagcattgccgcgccgatgatggtcaccaataccgtcggtgcggcgctgtttatgcgcattctgctggacaagcgggcgatgtttgagaagtacacctccgccttttccgccacggcgctgaaggtggcggcgtccaccgaggggatcctgcgtcagggattcaacgaagagaatagcatgaaggtggcccaggtgctgatccaggagctggacatcggcgcggtggcgatcaccgatcgcgacaagctgctggcgtttaccggcatcggcgacgaccaccatctgccgggcaagcctatctcctcctcatatacgcaacgggcgattgagaccggggaggtggtctacgccgacggcaacgaggtgccttaccgctgctcgattcatccgcactgtaagctggggtcgacgctggtgatccccctgcgcggcgagaaccaacgggtgataggcaccattaaactgtatgaggcgaaaaatcgcctgttcagttcgatcaaccgcaccctcggggaggggattgcccagctgctgtcggcgcagatcctcgccggacagtacgagcggcagaaggcgctgctgacgcaatccgaaatcaagctcctgcacgcccaggtcaacccgcacttcctgtttaacgcgcttaacacgctgaaggcggtgatccgccgcgacagcgatcaggccggccaactggtgcagtatctgtcgaccttctttcgcaagaacctgaaacggccgacggaaattgtcactcttgccgatgagatcgagcatgttaacgcctatctgcagattgagaaggctcgctttcaggctaacctgcagatccagatggcggtgccggaagggctggcgcatcaccagctgccggcttttaccctgcagccgatcgtggagaacgccattaagcatggtacatcgcaacatcttggcgtcggcgaaattaccatccgcgccagccaggacgatcgctggctgcagctggatatcgaagataacgccgggctgtaccgggccaacccccaggccagcgggctggggatgaatctggtggacaggcggctgcgggcgcgttttggcgccgactgcggcatcagcgtcacctgcgagccggagcgctttacccgtgtcaccctacgtctgcccctggaggagaatgcatgc

SEQ ID NO: 23870 - DNA, 315 bp, Klebsiella pneumoniae
atgacggcgaaaacagcaccaaaaatcaccttatgggaatttttccagcagctgggaaaaaccttcatgctgcccgtagcgtgctctcgtttgcgggatcatgctggggatcggcagctcgctaagcagtcacgatgttttgactctgctgccgtggctggatatgccgctgctgcaggccatctttatctggatgagcaaggtcggctcctttgccttcagcttcctgccggtcatgtttgtatcgccatcccgctgggtctggcgcgagagaacaaaggcgtcgccgccttcgccggcttcgtggctctttcc

SEQ ID NO: 23871 - DNA, 1173 bp, Klebsiella pneumoniae
atgcaaaagctgattaacgccgtgcagaactatgcatggggaagccacaccgccttaactgaactgtatggcatcgccaacccggacaatctgccgatggcagagctgtggatgggggcgcatccgaagagcagctcgcagatcctggcggccgacggccagccgcgttcactgcgcgaggtgattgacgcggataaagccgctctgctcggcgacaaggttgccgcccgctttggtgaactgccgttcctgtttaaggtactgtgcgccgctcagccgctctcaattcaggtgcatcccaacaagcgggcctcggaagaaggtttcgcccgcgagaacgccgccggtatcccgctctccgccgccgagcgtaactacaaagatccgaaccacaaaccggagctggtttttgccctgacgccgttcctggcgatgaatgcatttcgcgagttcagcgagattgtcaccctgctgcagccggtggctagcgcgcatccggcaatcggcgccttcctgcagcagccggacgcgactcacctgagccagctgtttgccagcctgctaaatatgcagggtgaggaaaaggccaaggcgctgcaggtgctgcgcgacgtgctggcccgtgaacaaggcgaaccgtggcagactatccgcctgatcgcggaattctatccggacgacagcggcctcttctccccgctgctgctgaacgtggtgaagctgaacccaggcgaagcgatgttcctgtttgctgaaacgccgcacgcctatctgcagggggtggcgctggaggtgatggccaactcggataacgtactgcgcgccggcctgacgccgaaatacattgatattcctgagctggttgctaacgtcaagttcgaggctaaaccggcgggtgagctgttgacccagccgcagcgtcacggcgcggaactcgacttcccgatcccggtggaagattttgccttctccctgcatgacctctccgccgaggccagcgatctggcccaggcaagcgcggcgatcgtgttctgcgtcgacggcgaagccgtactgcgcaaaggcgaccagagcctgaccctcaagccgggcgagtcggccttcgtggccgccagtgaatcgccggtgcaggtcagcggccgcggccgcgtggcgcgcgttttcaataagctc

SEQ ID NO: 23872 - DNA, 2967 bp, Klebsiella pneumoniae
agaaaagtaaaccatcatcaaaaaccgatggaagggaaaactatgcgtattggtgtaccacaagaaaggctagcccaggagacccgggccgccgccacgccgaagaccgttgagcaattgctcaaactcggctttagcgtcgcggtagaaagcggcgccgggaagctggccagctttgacgatgaggcctttgccgaggcaggagctgaaatcgtgaccggcgacgaggtatggcagtctgatgtcatccttaaggtcaatgctccgaatgacgatgaaattgccctgctgaatccggggaccacgctgattagttttatctggccggcgcaaaacccgcagctgatggaaaaactggcggcccgtaatatcaacgtaatggcgatggattccgtgccgcgtatttcccgcgcccagtcgctggatgcgctcagctcaatggccaacatcgccgggtaccgcgctatcgttgaagcggcgcatgaatttggtcgattctttaccgggcagattacggcggcaggcaaggttccgcccgccaaggtgatggtcattggcgccggggtagccggtctggcggcgattggcgccgccaacagcctgggcgctattgttcgcgccttcgatacccgtccggaagtgaaggagcaggtgcagagtatgggcgccgagttcctcgagctggactttaaagaggaagcgggcagcggcgatggctacgccaaggtgatgtctgaggcctttattaaggctgaaatggcgctgttcgccgcgcaggcgaaagaggtcgatatcattgtcaccacggcgttaatcccgggcaaaccggcgccgaagctgatcacccgcgaaatggtcgactccatgaaatcgggcagcgtggtggtcgatctggcctcgcaaaacggcggcaactgtgagtacaccgtaccgggcgaagtggtgaccaccgccaacggcgtgaaaatcatcggttacaccgatcttcctggccgtctgccgacccagtcctcccagctctacggcaccaacctggtgaacctgctgaagctgctgtgcaaagagaaagacggcaatatcgttatcgatttcgatgacgtggtagtgcgcggcgtgaccgttgttcgcgaaggtgaaatcacctggccggcgccgccgattcaggtctccgctcagccgcaggccgcggcgaaaaaagtggaagcgccgaaagaagcggtgaaaccggcgtcgccgtggcgcaaatatgcgctgatggcgctggcgattattctcttcggctggctggccaacgtggcgccaaaagagttcctcggccatttcaccgtcttcgcgctggcctgcgtggtgggttactacgtggtgtggaacgtctcccatgcgctgcatacgccgctgatgtcggtgaccaatgccatttcgggcattatcgtggttggcgcgttgttgcagataggccacggcggctgggtcagcttcctgagctttatcgcggtgctgatcgccagcattaatattttcggtggttttaccgtgactcagcgcatgctgaaaatgtttcgcaaaggataaggggtagcacatgtctggtggattagtaacggctgcatacattgttgctgcaatcctgtttattttcagcctggcgggcctgtcgaaacacgaaacgtcgcagcagggcaactatttcggcatcgccgggatggccattgccctgatcgctaccatcctggggccggacgccggcaacgtcggctggattattcttgcgatggtgatcggcggggcgatcggtattcgtctggcgaagaaggtcgagatgaccgagatgccggagctggtggctatcctgcacagcttcgtgggtctggcagcggtgctggtgggtttcaacagctacctgcagcatgaaaccggtatggagcaattctggtcaatattcatttgaccgaagtgttcctcgggatcttcatcggcgcggtgaccttcaccggttcggtggtggcgtttggtaaactgcgcggcaaaatttcctccaggccgctgatgctgcccaatcgccataagctgaacctggcggcgctggtggtttccttcatcctgatggtgatttttgttcgctctgacagcaccggcacccaggtcctgtgcctgctggtgatgaccgcgatcgcgctggcctttggctggcacctggtggcctctatcggcggtgcggacatgccggtggtggtctcgatgctcaactcctactcgggctgggcggcagcggcggcgggctttatgctgagtaatgacctgctgatcgtcaccggcgcgctggtgggctcttccggcgccatcctctcttacattatgtgtaaggcgatgaaccgctcctttatcagcgtgatcgccgggggcttcggcaccgatggttcctccagcggcggcgatgaagaagtgggcgagcatcgcgagattagtgccgaagagacggcggagatgctgaaaaactcgcactcggtgatcatcaccccgggctacggtatggcggtggctcaggcgcagtatccggtagcagaaattaccgagaagctgcgggcgcggggtatcaaagtacgctttggtattcatccggtggccgggcgcctgccggggcatatgaacgtcctgctggcggaagccaaagtgccttacgacatcgtgctggagatggatgagatcaacgacgatttcagcgacaccgacaccgtgctggtgatcggcgccaacgataccgtcaacccggcggcgcaggacgatccgaagagcccgatcgccggcatgccggtgctcgaggtgtggaaagcgcagaatgtggtggtctttaagcgttcaatgaacaccggttacgccggcgtacagaacccgctgttctttaaagagaacactcatatgctgtttggcgatgctaaagccagcgtcgatgcgatcctgaaagcgctg

SEQ ID NO: 23873 - DNA, 1524 bp, Klebsiella pneumoniae
atgagtatgtcatccataccgtcatcttcccccggcggaaagcgctatggctgggtagagaagatcggtaacaaggtcccgcacccgtttttgctgtttatctatctcatcgccgtgctgatcgctgccacggcaatcctctccgccctcaacgttggggtacaaaacccaactgacggttcgcgggtggtggtcaaaaacctgctcagcgtggaaggattgcactggtttttgccgaacgtgattaaaaacttcagcggtttcgcgccgctgggggcgatcctcgccctggtgctgggcgccggctttgccgagcgggtgggcctgttaccggcgttgatggtcaagatggcctcgcacgtcagcgcccgctatgccagctatatggtgctgtttatcgcctttttcagccatatctcttccgatgcggcgctggtgattatgccgccgctgggagcgctgatgtttcttgccgtcggtcggcatcctgtcgctggtctgctggcggcgatagccggcgtgggctgcggctttaccgccaatctactgattgtcaccaccgacgtgctgctctccgggatcagcaccgaggcggcaaagtccatcgatgcctctttgcacgtcagtgtgatcgacaactggtactttatggcgacctcggtgatcgttctgacgctcgtcggcggactgatcaccgataagctggtcgagccgcggctgggccagtggcaaggcagtcgtgatgaaaagctgcagacgctgacgcccgcggagcggttcggcctgcgcatcgccggcgtggcgacgctggtattcgtggcggtcatcgccctgatggtggtccccgaaaacggtattcttcgcgatccggttcagcatacggtcatgccctcgccgtttatcaaaggcatcgtgccgctaattatctttttcttctttgtcgtgtcgctggcatacggcatcgccaccggcaaaattcgccgccaggccgacctgccgcagttgatgattgagccgatgaaagagatggccgggtttatcgtgatggtcttcccgctggcgcagttcgtggcgatgttcaactggagcaacatgggcaagtttatggccgtcgggctgacggatctgctggagagttcaggcatgaacggtgttccggcgtttgtcggtcttgcgctgctgtcggcttttctgtgtatgtttatcgccagcggctcggccatctggtcgattctggcgccgatcttcgtgccaatgtttatgctgttgggctttcacccggcgtttgcgcagatcctgtttcgtatcgctgattcatcggtgctgccgctggcgccggtgtcaccgtttgtgccgttgtttctcggctttctacagcgctaccggccggatgcccgcctcggcacctactactcgctggtgctcccttacccgctgatttttctcgccgtctggctgctgttgctggtgggctggtatctggtgggactgccgatcggccctggcatctatccgcggctgtct

SEQ ID NO: 23874 - DNA, 1443 bp, Klebsiella pneumoniae
atggaagccatttttcagtttgtggacgaggtggttgaggcacaacgcgacacttactgcgccatcgccgacgacatctgggaccaaccggagacccgctttgaggagttctggtcagcccaacggctggccgacgccctggaggcggaaggttttcagctcacccgcgatgccggcgggatcccgaatgcctttatcgccagcgtcggtgagggccaaccggtcattgccctgctcggcgaatttgacgccctggcgggactcagccagcaggcccacagcgcggaaccgacgcccttgacaccgggagccaacggccacggctgtgggcacaatctgctcggcaccgcggcattcgccgcggcggtcgccgccaaaggctggctgcagcagcacggcgacagcggcactctgcgcttctacggttgtcccggcgaggaaggcggttcgggaaaaacctttatggtgcgcgaagggttgtttgatgatgtcgatgcggcgctgacctggcatccggaagcctgggccgggatgttcagtacccgcaccctcgccaacattcaggcggcatggcgatttaccggcaccgcggcccacgccgctaattcgccgcacctgggccggagcgcgctggatgccgtcaccctgatgaccaccggcagcaatttcctcaatgaacatatcatcgagaaggcgcgcgtccattacgccattaccgataccggcggcgtctcgcccaacgtggtgcaggcgcaggcggaagtgctgtatttgatccgcgcgccggagatggccgacgctgagcaaatcttcgcccgcatagagaagattgcccagggggccgcgctgatgaccgagacccaggtcagctgccgctttgaaaaagcctgctccagctatctacccaaccgcacgcttgaggcggcgatgtatcaggcggtctgtcattacggtacccccgcctggagcgacgaggaacgcgcttttgccgcggcgatccgcgccaccctcagcgccaacgatattaacaacagcctgaacaatattgccggcaccagtggcgaggaaggcaaaacgttcgctcgtcgccaccgcgacaccttgctgattgatgaggtggcgccctgggcggccacggataacgtcctcgccggatccaccgacgtcggcgatgttagctggaaagcgccggtggcccagtgcttcagcccgtgcttcgcggtgggtaccccgctgcacagctggcagctggtgagccagggcagaacctccattgcccataaagggatgttgctggcggggaaagtgctcgcggcgaccgccatccgtttattcagcgacagcgccctgctggaggccagccagcaagagttcaggcaggtactggccgaacgcccctatcgttgcccgatcccggcggaggtgagtccgtccgttttacga

SEQ ID NO: 23875 - DNA, 1328 bp, Klebsiella pneumoniae
ttgttgaccccgatgctgcgcagcagtccgctaaccaactggttcagcgacgcgcagcgggtgcagggcatgctggattttgaagcggcgctggcgcaagcacaggccgcctgcgggatggtgccgccggaagcggtcgggccaattgtggcggcctgccgccacgaggccatcgattttgccgcgctgggcgaggcggcggtgggagccggtaacctggccatcccgctggtgaaacagctgacggcgcaggtaaaagcgcaagatcccgaggctgcgcgctacgttcactggggcgctaccagccaggacgccatcgacaccggactggtgctccagctgcgcggggcgctggatgccgctgagactctgcttgagcagctgttggcggcctggctctccaggcggatcgttatcgcgataccgtgatgcctggccggacctggatgcagcacgcgctgccggtgacctttggcctgaagctggcgggcaccctcgacgcgctcctgcgctggcagcagcggctgcgcgagatgcgtccgcggctgctggcgctgcagttcggcggcgccgcgggcactctggacgcgctaaaagagaaagggccggcggttggcctggcgctggcgcagatcctcggtctgtcgctgccggatactccgtggcacagccagcgcgatcggctgctggaggcgggcgcctggtttgccggtgtctgcggcacgctggggaaattcgctaacgacttttccctgctgatgcagaccgaagtggctgaggtgggcgagccggtggcggaaggccgcggcggttcgtcgacgatgccgcataagcgcaatccggtggcctgcgcggcgatcctgaccgccgcccagcgcacgccggggctgatggcgacgctctacgccagccaactccagcagcatgagcgggcgctgggcggctggcaggcggagtgggagaccctgccggagctaattaccctggtgggcggggcgttggcgcaaagcgaggcgctggtgcgcgacatgcaggttttcccgcagaaaatgcgcgccgatctcgatatcacccatgggctgattatggctgaggcggtgactctggcgctggcggaattcattggcaaagccgaggcgcatcatcatatcgaggcgctgtgccgccaggcgctggaccgtcactgcccgctggtcgatctgctcgcggctgacccacaggtcagtcagtatctctctcgtgaacgcttaaccacgctgctggacccggcaacggcgaccggcagcgccgaacgctttgtgcgccaggtgctggcgcgttatcaggag

SEQ ID NO: 23876 - DNA, 1463 bp, Klebsiella pneumoniae
atggaaaacaccctcttaaccgctaacgccacgctgccgacctacgatcgcagcgcactgatcccccgtatcgttcatcttggttttggcgcgtttcatcgcgctcatcaggctgtgtatgccgatatactggccagcgagcacggcagcgactggggctacaccgaagttaatctgattggcggcgagcagcagatcgccgatctccagcagcaggatctgctgtataccgtcgccgaaatgtccgccgacgcctggaccgcgcgcgtggttggtgtggtgaagcaggcgctgcacgccggggttgatggtctcgaagcggtgctggcggcgatgtgtcagccacaggtggccattgtctccctgacgattactgagaaaggctattgccattcgccagccagcggcgaactgcagctcgatcacccgctgatcgccgccgatctgcataacccgcaccagccaaaatcggcggtgggggtagtggtggaggccttatctcgccgccgggcggccggcctgcctgcttttaccgtgatgtcctgcgataacatgccggaaaatggtcacgtgatgcgcaacgtcgtctgcgcctacgcccgggctttagacgaggatcttgccgcatggatagagcagaatgtcacctttccgtcgacgatggtggaccggattgtcccggcggtgactgccgaaaccctcgataaaattacccagctgaccggggtgcgcgacccggccggggtggcctgcgaacctttccgtcagtgggtgattgaggataactttgttgccggacgtccgcagtgggagaaagcgggagcggaactggtcgccgacgtggtgcctttcgaagagatgaagctgagaatgctcaatggtagccattcgttcctcgcttatctcggctatctggccggttatcagcatatcaacgactgtatgcaggacgataactaccgtcgcgcggcgctgtcgttgatgctggacgaacaggcaccaacgctgaaggtgcagggggtggatctgtcacgctatgccagtttgctgattgaccgttactgcaatccggcgctgaagcaccgcacctggcagatagccatggacggcagccagaagttgccccagcgcatgctggactccatacgctggcatctggtgcatcagcgtgattttacactgctggcgctgggcgtggcagggtggatgcgttacgttggcggcgttgacgatgcgggccagtcaatcgagatatgcgacccgttgttgccggttatccagcaagcggtggctgccagcgccgatggcgaagcgcgagtcaaagcgctgctgggtattgaggctattttcggcgtcgaactgccgcaggagtcacgctttgtcacggcggtgacccgcgcctacttagcgctgcagcggcagggggctaaagctaccgtcgccgcgtgggccgccgcgcaata

SEQ ID NO: 23877 - DNA, 498 bp, Klebsiella pneumoniae; identical to SEQ ID NO: 17634

SEQ ID NO: 23878 - DNA, 273 bp, Klebsiella pneumoniae
atgaagaaactgtttgcctcccttgccctcgccgccgctgttgccccggtgtgggccgctacccagaccgtcacgctagcggttcccggcatgacttgcgccgcctgcccgatcacagtcaagaaagcgctctccaaggtcgaaggcgtgagcaaggtcgatgtgggcttcgagaagcgcgaggccgtcgtcacttttgacgacaccaaggccagcgtacagaagctgaccaaggccaccgcagacgccggctatccgtccagcgtcaagcag

SEQ ID NO: 23879 - DNA, 548 bp, Klebsiella pneumoniae
atcgttttccgccgacccaggctgaatccggattaattctgctcgaagaggggattgcctcgctatgccatgcggaaaacaacatggtgatatcaacgatatttgccccttcgctattgggattaatcgatggttacggcgtctttaacggtattccggaaaaacaccactgctctctgtttgctgagacagatttgcgcggacgctggataggacaccaggccgcggtcgagatcctcaatgcgcaaaacctgtggcaggagatggcccatgttctggcgcagcggctgatggtgttgagcatgcgttcgcaggagatggtgggggtggattcttatccgatggtgcgaaccctgctaacagagctggcggactacccggaggagtatcgtcgccaaattaatgcgttaagctttatacagcgccgcaccaacctgtcgcgcagccgtgttatgtcgattctggcagagctgcgcaaaggtggttacattacggtccatcgcggggtgctggaaaagataacccgcacgcttcccgcccacttttaa

SEQ ID NO: 23880 - DNA, 497 bp, Klebsiella pneumoniae
atgcaatttaatatccctacgttgcttactctgtttcgcgtcatcctgatcccgttttttgtgctggcgttttatctgccctttagctgggcgccgtttgcctgcgcgctgatcttctttgttgccgcggtaaccgactggtttgatggtttcctcgctcgtcgctggaatcagagcacccgttttggcgccttcctcgacccggttgccgataaagtcatggtggctatcgccatggtgctggttgccgaacactatcacacctggtgggtcacgctaccggcggcgaccatgattgcccgtgagatcattatctccgcgctgcgtgagtggatggcggagctggggaaacgcagcagcgtggcggtctcatggattggcaaagtgaaaacgaccgcccagatgaccgccctggtatggatgctgtggcgtccattatccgtgggtggagtgggccgggatcgcgcttttcctcgtggcggcggtgctgacgctgt

SEQ ID NO: 23881 - DNA, 495 bp, Klebsiella pneumoniae
atggctttaaatcttcaagacaaacaagcgattgttgctgaagtcagcgaagtagccaaaggcgcgctgtctgcagtagttgcggattcccgtggcgtaactgtagataaaatgactgaactgcgtaaagcaggtcgtgaagctggcgtatacatgcgtgttgttcgtaacaccctgctgcgccgcgtcgttgaaggtactcagttcgagtgcctgaaagacacgtttgttggtccgaccctgattgcatactctatggaacacccgggcgctgctgctcgtctgttcaaagagttcgcgaaagcgaatgcaaaatttgaggtcaaagccgctgcctttgaaggtgagctgatcccggcgtcgcagatcgaccgcctggcaactctgccgacctacgaagaagcaattgcacgcctgatggcaaccatgaaagaagcttcggctggcaaactggttcgtactctggctgctgtacgcgatgcgaaagaagctgct

SEQ ID NO: 23882 - DNA, 326 bp, Klebsiella pneumoniae
tggagctctggtctcatgcagaaccaaagaatccgtatccgcctgaaagcgttgatcatcgtctgatcgatcaatcaaccgcggaaatcgtcgagactgctaagcgcactggtgcgcaagtccgtggtccgatcccgctgccgacccgcaaagagcgctttaccgttctgatctccccgcacgtcaacaaagacgcgcgtgaccagtacgaaattcgcactcacaagcgtctggttgacatcgttgagccaactgaaaaaaccgttgatgctctgatgcgtctggatctggctgccggtgtagacgtgcagatcagcctgggttaa

SEQ ID NO: 23883 - DNA, 1134 bp, Klebsiella pneumoniae
atgattatcaataacgtaaaactggttctcgacgacgaggtggtccacggttcgctggaagtccaggacggtcgcatcctcgccttcgccgaaagccagagccggctgccacaggcgctggatggggaaggcggctggctgctgccgggccttatcgagctgcataccgataacctcgacaagttctttaccccgcggccgaaggtagactggccggcccactcggcgatgagcagccatgacgccatgatggtcgccagcggcatcaccaccgtgctggacgccgtggcgattggcgacgtgcgcgatggcggcgatcgtcttgagaatctggagaagatggtcaatgccgtggaggagacgcaaaagcgcggtctcaaccgcgccgaacaccgcctgcacctgcgctgcgagctgccgcatcacaccacgctgccgctgtttgaaaagctgatcgatcgcgagtcggtgagcatggtctctctgatggaccactcgccgggccagcgtcagtacgccgatcgcagcaagtaccgcgattattatcagggcaaatatcatctgacgcatgacgaaatggaccgttttgaagccgagcagatggctctggccgccacctggtcgcagcccaatcgccagaccatcgccgccatgtgccgcgcccgccgtatcgccctcgccagccacgacgacgccaccgaggcgcatgtggccgaatcccaccagctagggagcgtgatcgccgagtttcccaccacgctggccgcggcgcaggcttcacgtcagcacgggatgcacgtcctgatgggggcgccgaatatcgtgcgcggcggttcccactccggcaacgtcgccgcccaccagctggcgagccacggtttgctggacatcctctcatctgactattaccccgccagcctgctggatgccgctttccgcatcgccgacgccgaggacaatgccttcaccctgccacaggcgatccgtctggtcagtcagcatccggcgcaggcgctgggccttgacgatcgcggcgtcatcgccgaggggaaacgcgccgacctggtgctggcgcaccgtcgcggcgaacatatccagatcgaccatgtctggcgccagggaaagagggtcttt

SEQ ID NO: 23884 - DNA, 2823 bp, Klebsiella pneumoniae
atggataagatcgaagttcggggcgcccgcacccataatctcaaaaacatcaacctcgttatcccgcgcgacaaactcattgtcgtcaccgggctttccgggtctggcaaatcttcactcgctttcgacaccctgtatgccgaaggccagcgtcgctacgtcgaatcgctctccgcctatgcgcgacagttcctgtcgctgatggagaagccggacgtcgaccatatcgaagggctgtcgccggcgatttccatcgaacagaaatcaacctctcacaacccccgctcgacggtgggtactattaccgaaattcacgactatctgcgtctgctgtacgcccgcgtcggcgaaccgcgctgtccggatcacgacgtgccgctggcggcgcaaaccgtcagtcagatggtcgataatgtcctcgcccagccggaaggcctgcgcctgatgctgctggcgcccattattaaagagcgcaaaggcgagcacactaaaaccctggaaaacctcgccagtcagggctacatccgcgcgcggatcgacggcgaggtctgcgatctgtcggatccgccgaagctggagctgcagaagaagcacaccattgaggtagtcatcgaccgcttcaaggtgcgcgacgatctggcgcagcgcctggccgagtcgtttgaaaccgcgctggagctctccggcgggaccgccattgtggctaatatggatgatgagaaagcggaagaactgctgttttccgccaacttcgcctgcccgatctgcggctacagcatgcgcgagctggagccgcgtctgttctcctttaacaacccggcgggcgcctgcccgacctgcgacggcctcggcgtgcagcaatatttcgatcccgatcgcgtggtgcaaaatcccgagctgtcgctggcgggcggcgccatccgcggctgggatcggcgtaacttttactacttccagatgctgaagtcgctggcggagcactataaattcgacgtcgaagcgccatggggcaccctcagcgccaacgtgcagaaagtggtgctgtacggttcaggtaaagaaagtattgaattcaaatacatgaatgaccgcggggatacctcggtgcgccgccatccgttcgaaggcgtgctgcataacatggagcgccgttacaaagagacggaatccagcgcggtgcgcgaagagctggcgaagttcatcagcaaccgtccgtgcgccagctgcgacggcacgcgtctgcgtcgcgaggcgcgccacgtgtttgtggaaaacaccccgctgccgaccatctccgatatgagcatcggccatgcgatggatttcttcaacaatctgaagctctccggccagcgggcgaaaatcgccgaaaaagtgctgaaagagattggcgatcgtctgaaattcctcgtcaacgtcggcctcaactacctgacgctctcccgctcggcggaaacgctctccggcggcgaagcccagcgtatccgtctggcaagccagattggcgccgggctggttggcgtgatgtacgtgctggatgaaccctctatcggcctgcaccagcgcgataacgaacgcctgctcggcaccctgatccacctgcgtaatttaggcaacacggtgatcgtcgttgagcacgacgaagacgccattcgcgccgccgaccatgtgatcgatatcggtcccggcgctggcgttcacggcggccaggtagtagcggaagggccgctggaggccattatggcggtcccggaatccctgaccggccagttcatgagcggtaaacgcaaaattgaagtgccgaaacagcgcgtgcccgccaacccggagaaagtcctcaagctgaccggcgcgcgcggcaacaacctgaaggatgtaacgctcaccctgccagtgggcctgtttacctgcatcaccggcgtctccggttcgggtaaatccacgctgatcaacgataccctgttcccgattgcccagcgccagctcaacggcgcgaccatcgctgaaccagcgccgtatcgcgatatccaggggctggaacatttcgataaagtgatcgatatcgaccagagcccgatcggccggacgccgcgctccaacccggcaacctataccggggtgtttaccccggtgcgcgagctgttcgccggcgtaccggagtctcgctcacgcggctatacgccggggcgctttagctttaacgttcgcggtgggcgctgcgaagcctgccagggtgacggcgtcattaaggttgagatgcacttcctgccggatatctacgtgccgtgcgaccagtgcaaaggcaaacgctataaccgcgaaacgctggagattaagtacaagggtaagaccatccacgaagtgctggatatgaccattgaagaggcgcgtgaattctttgatgccgtaccggcgctggcgcgtaagctgcaaaccctgatggacgtcggcctgacctatatccgccttggccagtcggcgacgaccctgtccggcggcgaggcgcagcgcgtgaagctggcgcgcgagttgtccaagcgcggtaccggccagacgctgtatatcctcgatgagccgaccaccggtctgcacttcgccgatatccagcagttgctggaagtgctgcaccagctgcgcgatcagggcaataccatcgtggtgattgagcacaacctcgatgtgattaaaactgccgactggattgtcgatctcggcccggaaggcggcagcggcggcggcgaaatcctggtctccggtacgccggaaaccgtcgccgagtgcgaagcctcgcacaccgcgcgcttcctcaagcccatgctgaaa

SEQ ID NO: 23885 - DNA, 1677 bp, Klebsiella pneumoniae
atgagtaatgccatcacggagattgataacaccgatctggtgtttatcttcggttacaacccggcggattcccaccctatcgtggcgaatcacgtcattaacgctaaacgcaacggggcgaaaattatcgtctgcgacccgcgcaaaattgaaaccgcgcgcatcgccgatatgcacattgcgctgaagaacggctcgaacatcgcgctgctcaacgccattggccacgtgattattgaagaggatctgtacgataaatccttcgtcgccagccgttccgaaggcttcgaggagtatcgcaaaatcgttgaaggctatacgccggagtcggtggaggagatcaccggggtcagcgcccaggagatccgcgcctgcgcccggatgtatgccagcgccaaatccgccgccatcctgtggggcatgggcgtcacccagttctaccagggcgtggagacggtgcggtcgctgaccagcctcgcgatcctcaccggcaacctcggcaagccgagcgtcggcgtcaacccggtacgcggccagaacaacgttcagggcgcctgcgatatgggtgcgctaccggatacctatccgggctatcagtacgtcaagttcccggagaaccgcgagaaattcgccaaagcctggggcgtggaaagcctgcctgcgcataccggctatcgcatcagcgaattgccgcaccgcgcggcgcacggtgaagtgcgggcggcgtacattatgggtgaggatccgctgcagaccgacgccgaactctcggcggtccgcaaagcgttcgacgatctggaactggttatcgtccaagacattttcatgaccaaaaccgcctccgcggccgacgtcatcctgccgtccacctcgtggggcgagcacgaaggcgtgtataccgcagcggaccgcggcttccagcgcttctttaaagcggtggagccgaagtgggacctgaaaaccgactggcagatcatcagcgaaatcgccacccggatgggctatccgatgcattacaataacacccaggagatctgggacgagttgcggcatctgtgcccggacttctacggcgccacctacgagaaaatgggtgagctcggctatgtcatgtggccgtgccgcgatgagtccgacgccgatcagggaacgtcgtatctgtttaaagagaagttcgataccccgaacggactggcgcagttcttcacctgcgactgggtcgcgccgatcgataagcttaccgacgagtacccgatggtattgtcgacggtgcgcgaggtcggccactactcgtgccgttcaatgaccggtaactgcgcggcgctggcggcgctggcggatgaaccaggctatgcgcaaatcaacaccgccgacgccgaacggctaggcattgaagatgaagagctggtatgggtcaattcgcgtaaggggcgcatcatcacccgcgcgcaggtcagcgatcggccgaataaaggcgcggtgtacatgacctaccagtggtggatcggcgcctgtaacgaactggtctcagagaacctgagtccgataaccaaaacgccggagtacaagtactgcgcggtcaacgttgagcggattgccgatcagcgcgccgcggaacagtacgtgatcgacgagtacaacaagctgaaatcccgcctgcgcgaaagcgcgatgggt

SEQ ID NO: 23886 - DNA, 684 bp, Klebsiella pneumoniae
atgaaatacctctttttatttctactggttttcaccagcggcgcagcggtggccaccgaacctggcagtcagtatcaacagcaggccgaagccggcgatcgacgcgcacaatattaccttgccgatacctgggtcagctccggcgattatcaaaaagccgaatactgggcgcagaaggcggccgcccagggcgatggcgatgcgctggcgctgctggcgcagctcaaaatccgtaacccccaacaggcggactatccgcaggcccgccagctggcggaaaaagccgtcgaggccggcagtaaatccggagagatcgtcctcgcgcgggtgctggtcaaccgtcaggctggcgccaccgacgtagcgcacgccatcacgctgctgcaggatgctgcccgggatagcgaaagcgatgcggcggtagatgcccagatgctgctggggctgatctacgccagcggcgtacacggcccggaggatgatgtgaaagcaagtgaatactttaaaggcagttcatcactttcccgcaccggctatgccgaatactgggccgggatgatgttccagcagggagagaaaggctttatcgaaccgaataagcagaaggcgctgcactggctcaacgtcagttgcctggaggggtttgataccggctgcgaagagtttgaccggattagtaaagga

SEQ ID NO: 23887 - DNA, 1960 bp, Klebsiella pneumoniae
caccctattcccgctaatattgcggaacgttgcctgattaacccggatcagtacaaggcgcagtaccaacaatccataaccgaccctgatacattttggggcgagcaggggcaagatccttgactggatgcggccctatacccgtgtaaagaacacctccttcgcaccgggtaatatttccatcaaatggtatgaagatggcacccgtgaacctcgccggctaactgtctcgaccgccacctcgccgaacgcggcgatcaaaccgccatcatctgggaaggcgacgacgccagccagagcaagcacatcacctaccgtgaactgcatgccgacgtgtgccgtttcgcacaatgtgctgctcgacctcgggattaaaaaaggcgacgtggttgctatctatatgccgatggtgccggaagccgcggtggcgatgctggcctgcgcccgcatcggggcaatccactcggtcattttcggcggcttctcgccggaggcggtggccggacgcattatcgactccagctcacgcctggtgatcaccgctgacgaagggctgcgcgccggtcgcgccatcccgctgaagaaaaacgtcgatgacgcgctgaaaaacccgaacgtgaaaagcattgagcacgtggtggtcctgaaacgcaccggcggcaatatcgactggcaggaaggccgcgatctgtggtggagcgacctgattgcaaacgccagcgccgaacaccggcccgtcgaaatgaacgccgaagatccgctgttcatcctctatacctccggctccaccggtaaaccgaaaggggtgctgcacaccaccggcggctatctggtctatgcggccaccacctttaaatacgttttcgactaccatccgggcgatatttattggtgcaccgccgacgtgggctgggtcaccggccatagctatctgctgtacggcccactggcctgcggcgccaccaccctgatgttcgaaggggtgccgaactggcctacgccggcgcgcatgtgccaggtcgtcgataagcataaggtcagcattctctataccgccccgacggctattcgcgccctgatggcggaaggcgacaaagctatcgaaggcacagaccgctcctcgctgcgcattcttggctcggtcggcgaaccgattaacccggaagcctgggagtggtactggaagaagatcggtaacgagaagtgcccggtgatggacacctggtggcaaaccgaaaccggcggctttatgatcactccgctgccgggcgcgattgagctgaaggccggctccgcgacgcgtccgttcttcggcgtccagccggtgctggtggataacgaaggcctgccgctggatggcgccaccgagggcaacctcgccatcgccgactcctggcccggccaggcgcgtaccctgttcggcgaccatgagcgctttgagcaaacctacttctccaccttcaaaaatatgtactttagcggcgacggcgcgcgtcgtgatgaagatggctattactggatcaccggccgggtggatgacgtcctgaacgtctccggacaccgtctggggaccgccgagatcgaatcggcgctggtgtcgcacccaaaaatcgccgaagcggcggtggtggggatcccgcataacatcaaaggccaggccatctatgcctacgtgacgctcaatcacggcgaagaaccaacgccggagctgtatgccgaagtgcgtaactgggtgcgcaaagagatcggcccgctggcgacgccggatgtgctgcactggaccgattcgctgccgaaaacccgctcgggcaaaatcatgcgccgcattctgcgtaagattgccgcaggcgacaccagcaacctcggcgatacctcgaccctcgccgatcctggcgtcgtggaaaaactgctcgaagagaagcaggccattaccatgccatcgtaagtaaggaccgattcc

SEQ ID NO: 23888 - DNA, 207 bp, Klebsiella pneumoniae
atgaataaagacgaaatcggcggtaactggaaacagtttaaaggtaaagccaaggaacagtggggcaaacttaccgatgatgatatgaccgtaatcgaagggaagcgcgaccagctggtcggcaaaattcaggagcgttacggctatgagaaagatcaggctgagaaagaagtctcagactgggagcataagaacgactatcgctgg

SEQ ID NO: 23889 - DNA, 555 bp, Klebsiella pneumoniae
atggatatgggaataaatatgaagatgagtaaaaaatttctggcgggtgccctgattttctctgcctgcagcgcgctgtctaccgttgcgcaggctgataacaccattacctttaatggtattgtttccgataccacctgtacggcgaccattgatggcggtgtaacggctattgatatgggcaccacctcagtggcggatctgaaagcgtataccttcggcgctgccaagaacttctcctttagcttagctgattgcccgaccgcggaagaaggtggcaacagtatcgcccgcgtcacttttggcggtgtttccgataccgcgaacagcgattattttaaaaaccaggcaactgatgagccggcaaccggcgtcgctgtggcccttttcgacgaagcgggcaatgtgatgaagaataacgaagagggttctgatgttgatatctcttcgggtgcagcaaccattccgttcaccgttaaaatggtgaaatcgggtgatgccgatccgacgaaaggtaccgttcagacaaccgtgacttataacgtgacctatcat

SEQ ID NO: 23890 - DNA, 1643 bp, Klebsiella pneumoniae
atggaaatattctttaccatcctcatcatgacccttgtggtctcactctccggggtagtgacgcgcgtactgccctttcaggttccacttccactgatgcaaatcgccattggcgcgcttctggcgtggccgacctttggtttgcacgttgaatttgatccagagctgtttctggtactgtttatcccgccgctgctattcgccgacggctggaaaacgccaacccgcgaatttattgaacacgggcgcgagatcctcggcctggcgctagcgctggtggtcgtgacggtggtcggcatcggctttctgatctactggattgtaccgggcattccgctgatcccggcgttcgcgctggcggccgtgctgtcgccgaccgacgccgtggcgctttcgggcatcgttggggaagggcggataccgaagaaaatcatgggcattctgcagggggaggcgctaatgaacgacgcctccggcctggtctcgctcaagtttgccgtcgcggtggcgatgggcaccatggtctttaccgttggcggcgccaccgtagaatttctgaaggtggcgattggcggcgtgctggccgggtttgtggtgagctggtcgtatggccgctcgatgcgcttcctcagccgctggggcggggatgaacccgccacgcagattgtcctgctgttcctgctgccgtttgcctcctatctgattgccgaacatatcggtgtctccggcatcctggcggcggtggcggcggggatgaccatcacccgttccggcgtgatgcgcaccgcgcccttggccatgcgcctgcgcgccaacagcacctgggcaatgttggagtttgtcttcaacggcatggtcttcctgttgttgggcctgcagctgccggatatcctctccagttcgctggtggcggcggaggccgaccccaacgttgagacctggatgctgtttaccgacattatcctgatctatgccgcgctgatgctggtgcgtttggctggctgtggtcgatgcgtaagctcagtcagcgcttcctgaagaagaagccgatggagtttggctcctggactacgcgcgagctgctgatctcctccgttgccggggtgcgcggggcgattaccctcgccggtgtgctctccattcctctgctgctgcctgacgggaatgtctttccggcgcgctatgagctgattttcctcgccgccggggtgatcctgttctcgctgttcgtcggggtgattgcgctgccgatcctgctacgtcacattgaatcgagcgataatgtgcagcagcggaaagaggagcgtctggcgcgcgcggcaacggctgacgtggcgattgtggcgatccagaagatggaagagcgtctggcggcggataccaaagagaatatcgatacccagctgctgaccgaagtcagttcgcgggtgatcggtaacctgcgccggcgcgccgatgggcgtaacgacgtggaaacctctatgctcgaagagagtctggaacgccgcttccgcctggcggcgctgcgctctgagcgcggcgagctgtatcatctgcgcgccacccggcagatcagtaacgagacgctgcagaagctgctccacgatctcgacctgctggaagcgctgttaatcgaagatcaa

SEQ ID NO: 23891 - DNA, 1566 bp, Klebsiella pneumoniae
ttgtctattatccgcctcaccctgctggcgctgctcgcctgcgtccctctgctggctcaggccgcgccgtaccagctcaccaccgcctggccggttaacgtcggcccgctgaatccccatctctatacgcccaaccagatgtttgcccaaagcatggtctatgaaccgctggtgaagtatcaggctgacggcagcgtacagccctggctggcaacccgctggcgtcactccgccgacggcaaaacctggtggttcaccctgcgcgacgatgtggccttctccaacggcgaaccgtttaatgcccaggccgcggcggccaattttcaggcggtgctggccaaccgccaacgccacgcctggcttgagctcgccaaccaaataaccgacgtgcgggccctcagcgccaccgagctgcagatcaccctgaaaagcgcctacgcccccttactgcaagagctggccctgccccgcccgttccgcttcatcgccccctcgcagtttatcgatggcggcaccgccaggggcattaaagccccgatcggcaccggcccgtggcggctggcaagctcgcagctcaatcagcgcgatgtgctggtgcgcaatgagcgctactggggtcgcaaacccgcgctacagcaaatcaccatcaaggtgatccctgacgccaccagccgggcggtggcgttcgaaaccggggaaatcgatatgctctacggcgatgaagggctgctgccgctggacaccttcgaacgctttcgccatcaccccggctacgtggcgcgcctgtccgccccggcggagacggtaatgctggcgctaaacgccagccagggcccgacccgcgggcaggcggttcgtgaggcgctcaactacgccgtcgataaacagacccttgtcgatagcgtgttgtatggcacccagcaggttgccgacaccctgtttgccccctccgtcccttacgccccgcaggatctgacgccgcgccgttacgacccgacaaaagcccgcgccctgctggaacaggccggctggcagcagctggagggccagccctggcgacaaaaagccgggcaaccgttggcgattgagctggcgtttattggcaccgacgcgctggctaaatcgatggccgaaattattcaggccaatctgcggcaggtcggcgtgcaggtcaccctggtgggcgaggaggaaagcagcatttacgcgcgccagcgcgaaggccgcttcggcatgatcttcaatcgcacctggggcgcgccctacgatccgcatgcctttttaagctcgatgcgcgtcccttcgcatgcggattaccaggcccagcgcggcctgccagacaaggcactgattgataaagagattagtgaagtgctgaccaccggggacgaggcgcagcggagaaaactgtaccatgatgtgctgacccgtctgcatcaggacgcggtgtatctgcccatcagctatgtctcgctgatgtcggtcgcgcgccaggaggtcggggagatcccgttcgccccggtgaccagcgagatccctttcgaccagattaccccggtaacgcca

SEQ ID NO: 23892 - DNA, 1292 bp, Klebsiella pneumoniae
ttacgacatacagctttaggactggcgctgagcctggcttttgccggtcaggccctggcggttaccaccatcccattctggcactcaatggaaggcgagctgggtaaagaagtggattctctggcgcaacgctttaacgcggccaatcctgattacaaaatcgttccggtatacaaaggcaactacgagcagagcctgagcgccggtatcgccgccttccgtaccggcaacgcgccggctatcctgcaggtgtatgaagtcggcaccgccaccatgatggcgtcaaaagccattaagccggtctaccaggtgtttagcgaggcgggcatcaagtttgatgaatcgcagttcgtaccgacggtggccgggtattacaccgattcgaaaaccggccatctgctctcccagccgtttaacagctctaccccggtgctctactacaacaaagacgccttcaaaaaagccggcttagatccggatcagccgccgaagacctggcaggatctggcggcctataccgcgaagctgaaagccgccgggatgaagtgcggctacgccagcggctggcagggctggatccagattgaaaacttcagcgcctggcacggtctgccggtggccacgaagaataacggcttcgacggtaccgacgcggttcttgagttcaacaagccggagcaggtgaagcatatcgcgctgctcgaagagatgaacaagaagggcgatttcagctacttcgggcgtaaagacgagtctaccgaaaagttctataacggcgactgcgccattaccactgcctcgtccggatcgctggccgatatccgccagtacgccaaatttaactacggcgtcggcatgatgccttacgatgccgacgtgaaaggcgcgccgcagaacgccatcatcggcggggccagcctgtgggtgatgcagggcaaagacaaagagacctacaccggcgtggcgaagttcctcgacttcctgaccaaaccggaaaacgccgccgagtggcaccagaaaaccggctacctgccgattactaccggcgggctacgatcgtgacgcgtcagcaggggcttctatgataagaacccgggcgccgatatcgctacccgccagattgctgaacaagccgccgttgccgttcaccaaaggtctgcgcctgggcaacatgcggaaatccgcacccatcgtcgatgaagagctggagagccgtcgtgggacccggcaaatgatattacccccctgccagccaggcgctggattccgccgtgcagcgcgggaaccagctg

SEQ ID NO: 23893 - DNA, 663 bp, Klebsiella pneumoniae
atgaatccgtttactaccgtacagcgcaaaaaagcgctcgtctggctttcgctatttcatttgctggtcatcacctccagcaactatctggttcagctgccgatctccatctttggtttccataccacctggggcgcgtttagttttccgtttattttcctcgccaccgacctgacggtgcgaatttttggcgccccgctggcgcgacgcatcattttcgcggtgatggtcccggcgctggccatctcttacggcatctccgcgctgttctacatgggcgaatggcagggctttgccgcgctgggcacctttaatctcttcgtcgcgcgcatcgccgtcgccagctttatggcctatgcgctggggcagatcctcgacgttcacgtctttaaccgcctgcggcagagccgccgctggtggttggcccctaccgcctcgacgctgttcggcaacatcagcgataccgtggcgtttttctttatcgctttctggcgcagcccggacccgtttatggccgcccactggggggaaatcgccctcgtcgactacagctttaaagtgcttatcagcatcattttcttcctgccgatgtacggcgtgctgttaaatatgctgttgaaaagactggcggataaatctgatttgtcggcattacagccgagt

SEQ ID NO: 23894 - DNA, 915 bp, Klebsiella pneumoniae
atgctacatttatttgccggtctggatttacataccggactattattattgcttgctttagcttttgtactgttttacgaagcgattaacggtttccatgataccgcaaacgcggtggctacggttatctacactcgcgcaatgcgctcacagctcgctgtggcgatggcggcgctcttcaacttcttcggcgttctgctgggcggtctcagcgtagcctatgccatcgtgcatatgctgccgaccgatctgctgcttaacatgggttccgcacatggcctcgccatggtgttctctatgctgctggcggcgatcatctggaacctcggcacctggtacttcggtcttccagcttccagttctcataccctgattggcgccatcatcggcattggtttaaccaatgcgctgatgaccggtacttccgtggttgatgcgctgaatatcccgaaagtcatcggtatttttgcttcgcttatcatctcgccgatcgtcggtctggtgatcgcgggcggcctgattttcctgctgcgtcgctactggagcggaaccaaaaaacgcgcgcgtatccacctgacgcccgcagagcgtgaaaagaaagacggtaagaaaaagccgccgttctggacccgtatcgcgctgatcctgtctgctattggcgtgtcgttctctcacggtgctaacgatgggcagaaaggcattggcctggtgatgctggtgctgatcggcgtcgcgccggcgggtttcgtggtgaatatgaatgcctctggttacgaaatcacccgtacccgcgatgcggtcaacaacgtggaaaccttcttccagcagcgtcctgaactgctgaaaaaagccaccggcgtcgatcagctggtgccttctccggataccaataccgcgtgcaatggcgagttccac

SEQ ID NO: 23895 - DNA, 378 bp, Klebsiella pneumoniae
atgggctttttctgggcattactcagcgtcggcctcgtcagcgccgcgcagttgctgctgcgcagcgccatggtggccttgccgccgctgaccgatattgtggcatttctccagcatctgctgcatttccagcccgggactttcggcctgtttttcggcctgctgggctacctgctgtcgatggtctgctggtactttgccctccatcgcctgccgctgtcgaaagcgtatgcgctactgagcctgagctatatcctcgtgtgggccgccgccatctggctgcccggctggcatgagccgttctactggcaatcgctgctgggcgtggcgatcatcgtcgccggcgtattgaccatcttctggccggtgaaacgccgc

SEQ ID NO: 23896 - DNA, 1983 bp, Klebsiella pneumoniae
atgaaagcagtagtcttcgcttatcacgatatgggttgcgcaggtattcagtcactgctggatgccgggtatgatatcgctgctattttcacccacccggataaccctggcgaaaaccatttctttggctccgtggcgcgccttgccgccgagcagggtattccggtgtgggcgccggaagacgtgaaccatccgctgtggattgagcgtatccgcgagatgaagccggacgtgctgttctccttctactatcgcaacctgctgggcgatgagatcctcaatctggcgccgaaaggggcgttcaacctgcacggttcgctgctgccaaaatatcgcggccgcgcgccgctgaactgggtgctggtcaatggcgaaagcgaaaccggcgtcaccctgcaccggatggtgaaccgcgcagacgcgggcgatatcgtcgcccagcaggccgtggcgattggcgcggatgacgccgccctgacgctgcatcgtaagctgtgcgccgccgccactgagctgctgagccgggcgctgccggcgatcctcgccggcaccaccgatgagcgtccgcaggatcacagccaggcaacctatgtggggcgtcgtaccccggaagatggccggctggactgggagctgccggcgcagaccctgcacaatctggtgcgtgcggtctcggatccgtggccgggcgccttcggctacgccggagcgaacaagtttatcgtctggaaatcctgcgttcgccacgatttgccagcagctaaaccgggcaccgtgctctccattgcgccgctgatcgtcgcgtgccaggacggggcgctggagattgtcaccggccagaccgaacgcggcgtgtacatgcagggcgctcagctggcgcaggcgctgggcctggtgtccggggcggtgatcagcagcaaaccggtggtggcgattaagcgtcgcacccgggtgctgatcctcggcgtcaacggctttatcggtaaccacctgaccgagcgcctgctgcaggacgacaactatgagatttacggtctggatatcggctccgacgccatcagccgttttctcgactgtccgcgtttccactttgtggaaggcgatatcagcattcactccgagtggatcgagtatcacattaagaaatgcgacgtggtgctgccgctggtggccatcgccacgcctatcgaatacacccgcaacccgctgcgcgtgttcgagctggatttcgaagagaacctgaaaatcatccgcgactgcgtaaaatacaataagcgcattatcttcccgtcgacctcggaagtgtacggcatgtgcaccgacaaaaatttcgacgaagatagctccaacctggtggtggggccgatcaacaaacagcgctggatctactcggtctccaagcagctgctggatcgcgtgatctgggcctatggcgataagaacggcctcaagttcaccctgttccgtccgttcaactggatggggccgcgtctggataaccttaatgccgcacgtatcggtagctcccgcgccatcactcagctgatcctcaacctggtggaaggttcgccgattaagcttatcgaaggcggcaaacagaagcgctgcttcaccgatatcagcgacggtatcgaagcgttgttccgcatcattgagaacaaagacggtcgctgcgatggtcagatcatcaacatcggtaacccggaaaacgaagcgagcatcaaagagctggcggaaatgctgctcgcctgcttcgagcgccatccgctgcgcgatcgcttcccgccgttcgccggcttccgcgaagtggaaagcagcgattactacggtaaaggttaccaggacgttgagcatcgtaaaccgagcattcgcaacgcgaaacgctgcctgaactgggaaccgaccgtcgagatggaagagaccgttgaacacactctggacttcttcctgcgcaccgttgagctcacggacgataaaaactca

SEQ ID NO: 23897 - DNA, 1530 bp, Klebsiella pneumoniae
atggctacgattgactccatgaacagggacaccacccgtttaagcgatggacccgactggacgttcgagttactggaaacctacctggccgaagtggaccgggtcgccaagctctatcgtcttgacacctacccgcaccagatcgaagtcattacttccgagcagatgatggacgcctactccagcgtcggcatgcccatcaactatccgcactggtcgtttggcaaaaaatttattgagaccgagcaggcctataagcacggtcagcagggtctggcgtatgagatagtcatcaactccaacccctgtatcgcctacctgatggaggaaaacaccatcaccatgcaggcgctggtgatggcccatgcctgctacgggcataactcgttttttaaaaataactatctgtttcgcagctggaccgacgccagctcgatcatcgactatctgatctttgcccgtaagtacatcaccgagtgcgaagagcgctatggcgtcgacgaagtagagaaactgctcgactcctgccacgcgctgatgaactacggcgtcgaccgctataaacgtccgcaaaaaatctctctgcaggaggagaaagcgcggcagaaaagccgggaagagtatctgcaaagccaggtgaatatgctgtggcgcaccctgccgaagcgcgaggaagaaaaagcgattgaatccgctcgtcgctacccttccgaaccgcaggagaacctgctgtactttatggagaagaacgccccgctgctcgaaccgtggcagcgcgagatcctgcgcatcgtgcgtaaagtcagccagtatttctacccgcagaaacagacccaggtgatgaacgaggggtgggccaccttctggcactacaccatcctcaaccatctctacgatgaagggaaagtgactgagcgctttatgctggagtttctccacagccataccaacgtggtgttccagccgccgtacaacagtccgtggtacagcgggattaacccctacgcgctgggcttcgccatgttccaggacatcaagcgcatctgtcagtcgcccacggaagaggataagtactggttccccgatatcgccggttctgactggctggaaacgctgcatttcgccatgcgcgactttaaggatgaaagctttatcagtcagttcctgtcgccgaagatcatgcgcgatttccgcttctttaccgtgctcgacgacgatcacaacaattatctggagatctcggcgattcacaacgaagagggttatcgcgagatccgcaataagctctccgcgcagtataacctcagcaatcttgagccgaacatccaggtgtggaacgttgacctgcgcggcgaccgatcgctgaccttgcgctatgtgccgcacaaccgcgtcccgctggataaaggccggcgcgaagtgctgaagcatgtgcatcgtctgtgggggttcgatgtgctgctggagcagcagaacgccgacggcagcattgagctgttggaccgctgcccggcgcggccgaacgcgcta

SEQ ID NO: 23898 - DNA, 279 bp, Klebsiella pneumoniae
atgttttgtgtgatctatcgaagtactaaacgtgaacaaacctatttatacgtcgaaaaaaaggacgatttctcgcgcgttcctgacgagctaatgcgcagctttggcacgccgcaaatggcgatgctgctgccgctggatgggcgcaaaaaactggttaacgccgatctggaaaaagtgaaacaggcgttaagcgaacagggctattacctgcaactgcctccgccgtctgaaaatctactaaagaaacacctggcggaacaggggaaacaatccgat

SEQ ID NO: 23899 - DNA, 792 bp, Klebsiella pneumoniae
atgagtgctgtcccctcccgtttgcgcggcgagcagttaaccctggcctacgggaacaagaccatcgccgagtcgctgaacgtgaccatccctgacggccacttcaccgccattatcggccccaacggctgcggcaagtcgacgctattgcgcaccctcagtcgcctgatgacgccggccagcggccacgtctggctcgacggcgcgcagatccagcagtacgccagtaaagaggttgcccgccgcatcgggctgctggcgcagaatgccaccacccctggcgatatcacggtgcaggagctggtggcccgcgggcgctatccgcaccagccgctgtttacccgctggcgcaaagaagatgaagaggcggtgaacaaggcgatgcgggcgaccgggatcagcgatctggcgctgcagagcgtcgacacgctttccggcggccagcggcagcgggcgtggattgcgatggtgctggcccaggagacggcgattatgctgctggatgagccgaccacctggctggacatcagccatcagatcgacctgctggagctgttgagcgagctgaatcgcgagaagggctacaccctggcggcggtgctgcacgatcttaaccaggcctgccgctacgccacccacctgatcgccctgcgcgacggcaggatcgtcgccgagggggcgccgaaggagatcgtcaccgccgatctgattgaacggatttacggtctgcgctgcacgatcattgaagatccggtggcgcatacgccgctggtggtcccgctgggccgccgg

SEQ ID NO: 23900 - DNA, 957 bp, Klebsiella pneumoniae
gtgaacttcttttctttctgccgccgcggtgcgctgaccggcatgctgttgcttttaggaattacctcagcccaggcggcggactggccgcgccaggtcaccgacagctacgggacgcataccctgccgagtcagccgctgcgcattgtctccaccagcgtgacgcttaccggttcgctgctggcgattgacgctccggtggtcgccagcggcgcgaccacgccgaacaaccgcgtcgccgatagccagggctttctgcgccagtggagcgaggttgccaaagcccgcaagctggcgcggctgtacatcggcgaaccaagcgccgaagcggtggccgcccagatgccggatctgatcctggtgagcgcgaccggcggcgactccgccctgccgctgtacgatcagcttaaaaccatcgccccgacgctggtcatcaactatgacgataaaagctggcaaaccctgctcacccagctggggcagatcaccggtcatgaacaacaggccagcgcgcgcattgccgacttcaataaacagctcgtttcgttaaaagaaaaaatgaaactgccgccgcagccggtgaccgccctggtctataccgccgccgcgcacagcgccaatatctggacgccggaatcggctcaggggcagatgctcgaacagctgggctttagcctggcgacgctgccgggcggcctgcccgccagccatagccagggtaaacgccacgatatcgtgcaactgggcggggagaacctcgcggccggtctgaacggccagagcctgttcctgttcgccggcgaccagaaagatgcggatgccatctacgctaacccgctgctggcgcatctcccggcggtcgcaggcaaacgcgtctacccgctgggcaccgagaccttccgccttgactactacagcgctctgctggtgctccagcgtctctccagcctgttcggc

SEQ ID NO: 23901 - DNA, 3900 bp, Klebsiella pneumoniae
atgcgtcataaggagctgacaatgaccactcgtttaccgctggttgccgcgcagccggggatctggatggccgagcgcctctccactctgccaggcgcctggagcgtagcccactatgttgaactacgcggcgccctcgatccgacgctgctgggaaaagcgattgtcgccggtctgcagcaggcggacaccctcagcctgcgctttgaggaagaggagggggaagtctggcagtggctggcggccgaccgcacctttgccgaaccgtcgatcattgacctgcggacggcgccggatccgcatcgcgccgctacggagcggatgcaggcggatctggcgcaggatctgcgcgtcgacggcggcaacccgctggtgtgccatcagctgctgcgcgtcggcgacgaccgctggtactggtatcagcgttatcaccacttgctggtggatggcttcagcttcccggcgataactcggcagatcgccgccatttaccgcgcctggcagcgtggggaagccactcctgagtcgcctttcacccccttcgccgaggtggtggacgagtaccagcgctacgccggcagcgaggcctggcagcgggataaagctttctggcaggcccagcgccaggcgttaccggcgcctgcctcactctctgccgcgccgctgggcgggcgcgccgccgggagcgatatctggcggatgaagctggagatgaacgccgagggcttccgccgcctggccagccatgcgccgcagtgtcagcccgctgacctggcgctggcgctcaccacgctgtggctgggccgcctgtgcaaccggatggactacgcggcgggctttatctttatgcgccggatgggttcagccgcgctgacctcgacagggccggtgctcaatgtcctgcctctggcggtgcatattgacgcccgggagacgctggcggacctggcgatgcgcctcgccgctcagctgaaaaagatgcgccgccatcagcgctatgacgccgagcagatcgtccgcgacagcggcaaagcggcaggggacgaaccgctgttcggcccggtgctgaacgtcaaagtctttgattaccagctggatatcgacggcgtcgaggcagtgacccacaccctcgccaccggcccggtcaacgatctcgagctggcgctgttcccggatgagaccggcgggctgtcgctggagatcctcgccaacaaggcccggtacgacgaagccgagctccgtcgccacatggcgcgactgaccgcgctgctggcgcagttcgccgccgatccggcgctgcgctgcggcgaagcagagatgctctccgccgacgagctggcccggctggcggcggtcaacgataccgctgtgccgctgcctgccaccaccctcagcgcgctggtggccgaccaggcgcggaagaccccggatgcgccggcgctggcggacgcccgctggcagttcagctatcgcgagatgcgtcagcaggtggtggcgctcgcgcagctgctgcgtcagcgcggcgtgaagccgggcgacagcgtggcggtggccctgccgcgctcggtgttcctgaccctggcgctgcacggcattgtcgaagcgggggccgcctggctgccgctggacaccggctacccggacgaccgcctgcggatgatgctggaagacgcccggccgtcgctgctgatcgccacggaggaccagctggcccgcttcagcgatattccggggctggaaagcctctgctaccagcagccgctggccgccggggatgaggcgccgctggcgctgtcaaaaccagaccataccgcctacatcatctttacctccggctccaccgggcggccgaaaggggtgatggtcggccagaccgccatcgtcaaccgcctgctgtggatgcaggatcgctatccgttatctgccgacgacgtggtggcgcagaaaacgccgtgcagtttcgacgtgtcggtgtgggaattctggtggccgtttatcgccggcgcgcagctggtgatggccgagccggaggcgcaccgcgacccgcaggcgatgcagcagttcttcgcccgctacggcgtgaccaccacccactttgtgccgtcgatgctggcggcgtttgtcgcctcgctggatgccgacagcgtcgctgcctgccgcacgctgcggcgggtattctgcagcggcgaagcgctgccgacggaattgtgccgcgagtgggagcgcttgaccggcgcgccgctgcataacctgtacggcccgacggaggcggcggtggacgtcagctggtatccggcctgcggccctgagctggcggccgtgaccggcagcagcgtgccgattggctggccggtgtggaacaccgggctgcgcattctcgatgccgcgatgcgcccggtaccgccgggggtggcgggggatctttatctcaccggtatccagctggcgcagggctatctggggcgcccggatctcaccgccagccgctttatcgccgacccgtttgcccccggcgagcggatgtatcgcactggcgacgtagcgcgctggctgacgaacggcgcggtggagtaccttggccgcagcgacgatcagctgaagatccgcgggcagcgcatcgagcttggcgagattgatcgggtgatgttggccctgccggacgtggggcaggcggtgagtcacgcctgcgtcttcaaccaggcggcggcgaccggcggtgatgcgcgacagctggtgggctatctggtctctgactccggcctgccgctggataccgcggcgctgaaagcgcggctggcggaacagctgccgccgcatatggtgccggtggtgctgatgcagctcgctgagctgccgctgagcgccaacggcaaactggaccgcaaagcgctgccgctgccgaccctcggcggcgagcgcagcggccggccgccggagcccggcatggaaactcttgtcgccgccgccttcagccagctgctgggctgcgaggtgaacgatatcgacgccgatttcttcgcccttggcggtcattcgctgctggcgatgcgcctggcggcacagctcagccgccagctggcgcggcaggtgaccccggggcaggtgatggtggcctcgacggtgggcaaactgagcgcgctgctggccgccgatctcagcgatgagcaggcccagcgcctggggctggatacgcttctgccgctgcgcgagagcgacggcccgacgctgttctgcttccatcccgcctccggcttcgcctggcagttcagcgtgctggcgcgctatctcagcccgcgctggtcgattaccggtattcagtcgccgcgcccgcaggggccgatggccagcgccgccagcctcgacgaggtgtgcgagcatcatctgcgcacgctgctggcgcagcagccgcacggcccttattacctgttcgggtattcgctgggcggcaccttagcccaggggattgccgcccgcttgcgccagcgcggcgaagcggtggccttcctcggcctgctggatacctggccgccggagacgcaaaactgggcggagaaagaggccaacgggctggatcccgaggtactggcggagatcgaccgcgagcgcgaagcgttcctcgccgcccagcaggggcaagcctccggcgagctgttcagcgctatcgaaggcaactatgccgatgcggtgcggctgttaactactgcccacagcgcgaagtttgacggcaaggcgacgctgttcgtggcggagaagacgcggcaggaggggatggatccgcaggtcgtatggggcccgtgggtgggggaactggaggtgttcagccagaactgcgcccacgtcgatatcatctccccgcaggcctttgaggccatcggtccggtggtcagggagattctgggg

SEQ ID NO: 23902 - DNA, 1605 bp, Klebsiella pneumoniae
atgattgcatttacccgttggccggaagagtttgcggcccgctatcgtcaaaaaggctactggcaggatctgccgttaaccaatctgatcacccgtcacgcggaaaacgacgccgtggcgattatcgatggcgagcggcagattagctaccgccagtttaaccagctggtggacaacctcgcctgctcgctgcagcgccagggactgaagcgcggggagaccgcgctggtgcagttgggcaatgtcgccgagttttacatgaccttctttgcgctgctgcgcatcggcgtcgcgccagtgaacgctttgttcagccaccagcgcagcgaacttaacgcctacgccgcgcagattaaaccggcgctgctgattgccgatcgcgagcacgcgctgtttgctgacgatagctttctccacgcgtttatcgcggaacatccttccctgcgcgtcgcactgttgcgtaacgacggcggcgagcgcgatctggcgacggagattaaccgcccggcggataactttatcgccaatccaacccctgccgacgaagtggcctttttccagctctccggcggcagcactgggacgccgaagcttatcccacgcacccataacgattacgactacagtatccgccgcagcaacgagatctgcgggattaacgctgaaacgcgctacctcaacgcgctgccggcggcgcataactatgcgatgagttccccgggttcgctcggcgtcttcctcgccggcgggcgggtgatcctcgccgctgacccgagcgccacgctctgtttcccgctgatcgaaaaacatcagattaacgtcgcgtcgctggtgccgccggcggtcagcctgtggctgcaggcgattcacgaatggggcagcaacgcccagctgcaatcgctgcagctgctgcaggtcggcggcgcgcgcctgtcagcgaccctcgccgcgcgcattccggcggaaatcggctgccagctgcagcaggtgttcggcatggcggaggggctggtaaattacacccgccttaacgatagcccggagcggatcatcaatacccaaggctgtccgatgtgcccggacgatgaagtgtgggtagcggatgccgacggcaacccgctgccgcgcggcgaagtgggccgcctgatgacccgcgggccgtacactttccgcggctactacaacagcccgcagcataacgcggaagcctttgacgccgaggggttttattgctccggcgatctgatttcgatcgacgaagacgggtatatcaccgtccagggccgggaaaaagatcagatcaaccgcggcggcgagaagatcgccgctgaagagatcgaaaacctgctgctgcgccatgaggcggtgatccacgccgcgctggtcagcatcgaagacaatctgctgggcgagaaaagctgcgcttatctggtggtgacctcgccgctgcgcgccgtcgccgtgcgccgcttcctgcgcgagcagggggtggcggaatttaaactgccggaccgcgtggagtgcgttgccgcgctgccgctgacgccggtgggcaaagtcgataaaaaacaattacgtcagtggctggccgaaggcaagctgggc

SEQ ID NO: 23903 - DNA, 1353 bp, Klebsiella pneumoniae
atgttgtcccccgcgattattaccctgccctggcgcccggatgcggccgaacactattttgcgccgttaagcgccctgccctgggcgatgctgctgcattccggctttgccgaccatccgcataaccgctttgatattctggtggctgccccgcgcgccacgctactgacgcgcgatgaacagacgtgggtcgacgacggcgaaaccgttgttgtctcagcggaagatccgctgcagctcctgcagcagcagttggatcgtcagccgttcacgccgcaaccccatgacgatctgccgtttctcggcggcgcgctgggattattcggttacgacctgggccgtcgctttgagcgtctcccttcgcacgcgcaggccgatatcgcgctggcggatatggcggtggggatctatgactgggcgcttatcgtcgaccaccagcgccaacagatattgctgctcagctatgacgacccgcagcagcgtctacagtggctggaggcgcaaacgccgacgccgggtgaaaccttcgccctgacctctgcctggcagtcaaatatgagccgccagcagtacggcgaaaaatttcgccaggtacaggcctatctgcacagcggcgactgctatcaggtcaacctcgcccagcgttttcaggccagctacgtcggtgatgaatggcaggccttccgccagctgaacgccgtcaaccgcgccccctttagcgcctttattcgcctcgatgaaggggcgattttaagcctgtcgccggagcgctttatccagctgcgccagggggagatccagacgcggccgataaaaggcaccctgccgcggctcgattcgccgctggcagatgcgcagcaggctgagaagctggcgaattcgccgaaagatcgcgccgagaatttaatgattgtcgacctgatgcgcaacgacatcggccgcgtcgccgtcccgggcagcgtgcgggtccccgagctgttcgtggtggagccgttcccggcggtccatcatctggtcagcaccatcaccgcccgcctgccaatgacgctgcacgccagcgacctgctgcgcgccgcctttcccggcggctcgatcaccggcgcgccgaaagtgcgggcgatggagattatcgatgaactggagccccagcgacgcaatgcctggtgtgggagcattggctacctgagctattgcggcaatatggataccagcatcaccattcgcaccctgacggcatggcagggacagctgtactgctccgccggcggcggaattgtggcggatagcgaggaagcggcggaatatcaggaaacttttgataaagttaatcgtatcctgcagcaactggagaac

SEQ ID NO: 23904 - DNA, 576 bp, Klebsiella pneumoniae
atggcggatcgcgcccttaatctggatgattttctgtcccgctttcagcttctgcgcccgcagccttcgcgccatgcgctcaatcagcggcaggcggcggtactggtgccgatcgtgcgccggccgcagcccggcctgctgctgacccagcgttcgccgctgctgcgcaagcacgccggccaggtcgcctttcccggcggcgcagtagataataccgacgcgacgcttatcgccgccgccctgcgcgaagctcaggaagaggtggcgatcccgccggaggcggtcgaggtgatcggcgtcctgccgccggtggacagcgtcaccggctttcaggtgacgccggtggtgggcattattcccccggatctgcactaccacgccagccaggacgaagtctccgcggtatttgaaatgccgctcgccgaagccctgcgccttgggcgctaccatccactcgatatccaccgccggggcaacgaccaccgcgtctggctctcctggtaccagcattattttgtctggggaatgaccgccgggatcattcgcgagctggcgctgcaaattggcgcacgtcct

SEQ ID NO: 23905 - DNA, 1362 bp, Klebsiella pneumoniae
gtgattagtctattcgacatgttcaaggtggggattggtccctcatcttcccacactgttggcccgatgaaggccggaaaacagttcgtcgatgacctggtcgaaaaaggattgcttaatgcagtgactcgtgtggcggttgacgtctacggttcactgtcattaaccggcaaaggccaccatacagacatcgccattatcatgggactggcgggcaatcagcccgatacggtcgatattgacgcgatcccggcttttatccgtgacgtcgaagcgcgcggtcgtctgctgctggccaacggccagcatgaggtcgacttcccggcggatgacggcatgcgttttcgcagcgacaacctgccgctgcacgaaaacggcatgaccattcacgcctgggccggcgagaaagagatctactgcaagacctactactcgatcggcggcggctttattgtcgacgaagagcacttcggcaaggaaaacgccaacgaactgcaggtgccctacccatttaaatcggcgcaggaaatgctggcctactgcaaagagactggcctgtcgctctccgggatggtgatgcagaacgagttggctctgcacagcaaaaaagagatcgaggattatttcgccaacgtctggcagaccatgcgcgcctgtatcgaccgcgggatgaacaccgagggcgtgctgcctggcccgctgcgcgtaccgcgtcgcgcctcggcgctgcgtcgtctgctggtggccagcgataagctctccagcgatccaatgaacgttgttgactgggtcaatatgttcgcgctggcggtcaatgaagagaacgccgccggcggtcgcgtggtaaccgcgccgaccaacggcgcctgcggcatcgttccggcggtactcgcctattacgatcactttatcgagtccgtcagcccggagatctatattcgctactttatggcctgcggggcgatcggcgcgctgtataagatgaatgcgtccatttccggcgcggaagtcggctgtcagggcgaggtgggcgtcgcctgctcgatggcggcggcgggcctggctgaactgctcggcgccagcccggaacaggtttgcgtggcagcggagatcggcatggaacacaacctcggcctgacctgtgatccggtcgccggtcaggtgcaggtgccatgcattgaacgtaacgccatcgcctccgtcaaggcgatcaacgccgcgcgaatggcgatgcgccgcaccagcgaaccgcgcgtctcgctcgataaggtgatcgagaccatgtatgaaaccggtaaagacatgaacgccaagtaccgcgaaacctcgcgcggcggcctggcgattaaagttcagtgtgac

SEQ ID NO: 23906 - DNA, 971 bp, Klebsiella pneumoniae
gtgacgattgctattgtaatagcacacatggttgggctgcagaacagctgctgaaaacagcagaaatgctgttgggcgagcaggaaaacgttggctggatcgatttcgttccgggtgaaaatgccgaaacgttgatcgagaaatacaacgcccagttggcaaaactggataccagtaaaggcgtgctatttctcgtcgatacatggggaggtagccctttcaacgctgcgagccgcattgtcgtcgataaagagcattacgaagttatcgccggcgtcaatatcccgatgctggtggaaaccttcatggcccgcgacgacgatccttcctttgatgaactggtcgccttagcggttgaaaccggcagcgaaggcgtgaaagcgcttaaagccaaaccggtggaaaaagcggcccctgcgcccgcgcctgccgcagcgccaaaagccgccgctccggccaaacccatgggcccggacgactacatggtaattggccttgcgcgtatagacgaccgtctgatccatggtcaggtcgccacccgctggaccaaagagaccaacgttacccgcatcatcgttgtcagtgatgaagtggccgcggataccgtgcgtaaaactctgctgacccaggttgcgccgccgggcgtcaccgctcacgtggtggatgtggccaaaatgatccgcgtctacaacaaccccaagtatgccggacagcgcgttatgctgctgtttactaacccgaccgacgttgaacgtatcgtcgagggcggcgtgaaaatcaccagcgtcaacatcggcggtatggcgttccgccagggtaaaacccaggttaacaacgcgatttcagtcgatgccaaagatattgaggcgtttaaaaagctgaacgcccgcggtatcgagctggaggcacgtaaagtgtccaccgacccgaaactgaaaatgatggatctgatcgctaaggttgataaataa

SEQ ID NO: 23907 - DNA, 858 bp, Klebsiella pneumoniae
gtgagcgaaatggttgatatgactaaaaataccaccgagaaaaaactcacacagagtgatattcgtggcgtgtccattcgttctaacctgttccagggttcatggaacttcgaacgtatgcaggcgctggggttctgcttctctatggttccggcgattcgtcgtctgtacccggagaacaacgatgcgcgtaagcaggcgattaagcgtcaccttgagtttttcaacacccacccttacgttgccgctccggtactgggcgtaacgctggcgatggaagagcagcgcgccaatggcgcagagattgacgatggcgctatcaacggcatcaaagtcggtctgatgggaccactggccggcgttggcgacccgatcttctggggtaccgtgcgtccggtgtttgcagccttaggcgccgggatcgcgatgagcggtagcctgctcggtcctctgctgttctttatcctgttcaacgcggtgcgtctgctgacccgttactacggcgtcgcctatggttatcgcaaaggcgtggatatcgttaaagatatgggcggcggcttcctgcagaaactgactgagggggcgtcaatcctcggcctgtttgtcatgggggcgctggttaacaagtggacgcatgtgaacattccgatggtggtgtcaaaaatcaccggctctgacggacaggttcacgtcaccacggtgcagactatccttgatcagctgatgccgggtctggtgccgctgctgttgaccttcgcctgtatgtggctgctgcgtaagaaagttaacccgctgtggatcatcgttggcttcttcgtcatcggtatcgccggctacgcggtcggcctgctgggtctg

SEQ ID NO: 23908 - DNA, 1428 bp, Klebsiella pneumoniae
atggagatgacaaaagtgaaattaagcgccctgtttattgccctgattcctctactgggctcgccggttattcatgcagaaactactgctgcgccggttctggaaaatcgcgctgcgcagggagatatcaccactcctggcggcgcgcgtcgtttaacaggcgatcaaaccgaagcgctgcgcgcctcgttaatcaataagccagctaaaaacgttattttgctgattggcgatggcatgggtgattcggaaattaccgctgcgcgaaactatgccgagggggcgggcggtttctttaaaggaattgatgctctgccgttaaccgggcagtacacgcattattcgctggataaaaaaaccgggaaaccggactacgtgaccgactcggcggcctccgccaccgcctggaccaccggcgtgaagacttataacggcgcgctgggcgtcgatattcatgagaatgcgcatcagaccatcctcgagctggcgaaagcggcggggctggccaccggcaacgtttccaccgccgagctgcaggacgccacccccgcggcgttggtagcgcatgtgacatcgcgtaaatgctatggcccgacggtcaccagcgaaaaatgccccagcaatgcgctggaaaaagggggcaaaggctccattaccgaacagctgctgaacgcccgaccggatgtcaccctgggcggcggcgcgaagacctttgccgaaacggcgacggcgggcgagtggcagggcaaaaccctgcgcgagcaggcgcaagcgcgcggctaccagattgtgaccgacgcggcttctcttgccgccgcgacggaagccagtcaggataaaccgctgctgggactctttgccgatggcaatatgccggtacgctgggaagggccgaaggcgtcttatcacggtaatatcgataagccgccggtgacctgtacgccaaacccgaagcgtgacgcctcggtgccgacgctggcgcagatgaccgagaaagcgattgacctgctgagtcgcaacgagaaaggtttcttcctgcaagtcgaaggcgcgtcaatcgataagcaggaccatgcggccaatccgtgcggccagatcggcgaaacggttgatcttgacgaagcggtgcagaaggcgctggaattcgcgcgaaaagacggtaataccctggtgatcgtcaccgccgaccatgcgcatgccagccagatcatcccggcggatagcaaagccccggggctgacccaggctctgaacacgcacgatggcgcggtgatggtgatgagttatggcaactctgaggaagagtcgatggagcacaccggcacccaactgcgcattgcggcctacggtccgcatgcggctaacgtcgtcggcctgaccgatcagaccgacctgttcacgaccatgaaagctgccctgagtctcaaa

SEQ ID NO: 23909 - DNA, 189 bp, Klebsiella pneumoniae
atgccaaacaggcccccatatccgagagaagcgcgcgtggttgcggtagagaaaggtcctcagggtcagacggtgacctggtatcagctccgtgcggattatcctgagcctgattcgcttatcagcgaacatcctaccgagcaggaagccgtggatgccaaacggcgttatgaagatcctgacaagtcg

SEQ ID NO: 23910 - DNA, 750 bp, Klebsiella pneumoniae
gtgacgccgatgcttgactggcacggcgtcctgagcgggcagccgttgcaatggattatctctggttttctcaccaccgtctgggtcagcgtcgccgggatcctgctcgccaccctgctggcggtcctgctgctggccctgcgcctcggcggcggacgcgcggggcgcggactggtggccgcgtgggtctcgttgtttcgcaataccccgctgctggtccagctgctgttctggtactttgccgcctggaacctgctgccgctggcggtgaaggaggtggtgaacgacgaacacgcctggtccattctgccgggcaacgtctggtggctgacgccggagttcctctgctcgatgtgggggctgggggtctttacctccgcctttctggtggaagagatcgcctccggactgcgcgccgtcagccacgggcagcgggaagccgcgctgtcgcagggctttacgccgtggcaggagctgcgctttatcctcctgccgcaggggctggccaacgcctggcagccgattgtcggccagtatcttaacctgatgaaactctcatcgctggccagcggcatcggctttgcggaactgacctatcaggtgcggcagattgagagctataacgcgcacgccctggaggcgtttgccgtcggcaccgcgctgtacctggcgctgggggtggcgatgggcgtggcgctcacgcgtctcggcccgggaagaaaactgcaacggagcgcccgacatgaacgc

SEQ ID NO: 23911 - DNA, 1293 bp, Klebsiella pneumoniae
gtgctggaacggctgtcatggaaaaggctggcgctggagctctttttagcgtgtattccggccctgattctgggggcgtttgtgggtcatctgccgtggtttttactggcggcagtgaccggtttgctgatctggcatttctggaatttgatgcgcctgtcgtggtggctgtgggtggaccggagcatgactcctccgcctggccgcggcagttgggagccgctgctgtatggtctgcaccagatgcagatgcgtaataaaaagcgtcggcgcgagctgggaagcctgattaaacgctttcgcagcggggcggaatcgctgccggatgcggtcgtcctgaccacggaagagggggctattttctggtgtaatggcctggctcagcagattctaaacctgcgctggccggacgacagtggccaaaacattcttaaccttctgcgctatcccgagttcgccaactatctgaaacagcgcgatttttcaaagccgctcaatctggtgctgaataacgcccgtcatctggaaattcgcgtgatgccctacagcgacaagcagtggctgatggtggcgcgcgacgtgacgcagatgcatcagctggaaggggcgcggcggaactttttcgccaacgtcagccatgagttgcgcaccccactgacggtgctgcagggctatctggagatgatgcaggagcaggtgctggagggggcgacccgagaaaaagccctgcacaccatgcgggagcaaactcagcgtatggaaggtctggtgaagcagctgctgacgctgtcgcgtattgaagccgcgccggcgctggcgatgaatgatcgcatcgacgtgccgatgatgctgcgggtggtggagcgcgaggcgcaaactctcagccaggagaaacagacgctgatcttcaccgtcgatgagcagctcaaggtgctgggtaatgaggagcaactgcgcagcgccatctccaacctggtctataacgcggtgaaccacaccccgccggggaccgaaattcgcgtcagctggcagcggaccccgcagggagcgctgttcagcgtcgaggataatgggccaggcattgcgccggagcatattccccgtctgaccgagcgtttttatcgggtggataaagcccgttcccggcaaacggggggcagtggcctgggactggcgatcgtcaaacacgcggttaaccatcatgacagccggctggaaatcgacagcacggtgggcaagggaacccgctttagcttcctgctcccggaacgattaattgccaaaaatgacgcc

SEQ ID NO: 23912 - DNA, 1317 bp, Klebsiella pneumoniae
atgacccatcagttaaaatctcgcgacatcatagcgttgggctttatgaccttcgcgttgttcgttggcgcaggcaacattattttccctccgatggttggcttacaggcgggcgagcacgtctggacggcggcgatcggcttcctgatcactgcggtgggtctgccggtgctgacggtggtggcgctggcgaaagtcggcggcggcgttgaaagcctgagcaccccgattggtaaagtggccggtatcctgctggcggtggtgtgctatctcgcggtaggaccgctgttcgcgacgccgcgtaccgcgaccgtctcctttgaggtcggtattgcgccgctgaccggcgacggcccgctgccgctgctgatctacagcgttatttacttcgcgctggtgattctggtctccctctatccgggcaaactgctggacaccgtgggcaatttccttgcgccgctgaaaattatcgccctgattgtgctggcggtcgccgccatcatctggccagcgggcccgatcagcgacgcgctggaagcgtatcgtacggcgccattctccaatggcttcgtcaacggctacctgaccatggataccctcggcgcgatggtatttggcatcgtgattgttaatgccgctcgctcacgcggcgtcagcgaagcgcgtctgttgacccgttataccgtctgggctggcctgatggcgggcgtcggcctgaccctgctgtatctggcgctgttccgtctgggctctgacagcgctactctcgtggatcagtccgccaacggcgcggcgatcctccatgcctacgtgcagcacaccttcggcggggcgggcagtttcctgctggcggcgctgatcttcatcgcttgcctggtgacggcggtgggcctgacctgcgcctgcgctgagttctttgcccagtatctgccgttctcctatcgcacgctggtctttgttctcggcctgttctccatggcggtctccaatttgggccttagccatctgatccaggtatcgattccggtgctgaccgctatctatccgccgtgtatcgcactggttgtattaagctttacccgcagttggtggcataattcgtcccgcgttatcgcgccggccatgtttatcagcctgatgtttggtatcattgacgggattaagtcatcggcatttgccgcgattctgccggactggaccgcgcgtctgccgctggcggagcagggcctggcctggctgatgcccaccgccgtgatgaccattctcgcggtgatctgggatcgcgcagccggacgtcaggtgacttccagcgcgcat

SEQ ID NO: 23913 - DNA, 1371 bp, Klebsiella pneumoniae
atggaaagtagtaacaagcttaagcgcgggctaagcacccggcacattcgctttatggccctgggttccgccatcggcaccgggcttttttacggctcggccgacgccattaaaatggccggacccagcgtactgttggcctacattatcggcggcgtcgcggcatatatcattatgcgggcgctcggtgagatgtcggtgcataaccctgccgccagctcattctcccgctatgcccaggaaaacctcggcggactggcgggctatatcaccggctggacctactgctttgaaatcctgatcgtcgccatcgccgacgttaccgccttcggcatctacatgggcgtctggttcccgacggtgccgcactggatctgggtgctcagcgtggtgctgatcatctgcgccgtcaacctgatgagcgtcaaggtgtttggcgagctggagttctggttctcgttcttcaaagtggccaccattatcatcatgatcctcgccgggttcggcatcattatctgggggatcggcaacggcggccagccgacggggattcataatctgtggagcaacggcggcttcttcagcaacggctggctgggaatggtgatgtcgctgcagatggtgatgttcgcttacggcggcatcgaaatcatcggcattaccgccggtgaggcgaaggacccggagaaatccattccgcgcgccatcaactcggtgccgatgcgcattctggtgttctacgtcggcacgctgttcgtcattatgtccatctacccgtggaatcaggtgggaaccgacggcagccccttcgtcctgaccttccagcatctgggtattaccttcgcggccagtattcttaacttcgtggtcctgacggcttcgctgtcggcgattaactccgacgtgttcggcgtgggccgtatgctgcacggcatggctgagcagggcagcgcgccgaaggtgttcgctaaaacgtcgcgtcgcggtattccgtgggtgacggtgatggtgatgaccattgcgctgctgtttgcggtatacctaaattacatcatgccggagaacgttttcctggtgatcgcctccctggccaccttcgccacggtgtgggtgtggattatgatcctgctgtcacagatagccttccgccgccgtctgtcgcccgaagaggttaaggcgctgaaattcaaagtccctggcggggtggtgaccacggtgatcggcctgctgttcctggcctttattatcgcccttatcggctatcatccggacacccgcatctcgctgtacgtcggtatggcgtggattgcgctgttgctgctcggctgggtctttaagacccgccgtgagcgccgcctggcgcaggctcag

SEQ ID NO: 23914 - DNA, 1815 bp, Klebsiella pneumoniae
atgttgaaggcatggcaccttccggttgcaccctttatcaaggtgcaacaggaccgactgtttattactctgtggttaagcggtgagtcgctgccgcagcggatcacgctgcgcgcggaagaggataacgaagagctgtcgctgccgatgcagcggctccgccaggcgccgcagccaggcgtggtggcatggcgcggcgaaatctctctcgccagcggccagccgcgccgccgctacagctttaagctgctgtgggccgaccatcagcgctggtttacgccacaaggcttcacccgattcccgccggcccgactggagcagttcgccattgacctgccggacgccggcccgcagtgggtggccgatcaggtgttctatcaaattttccccgatcgctttgcccgcagcgccgcgcgtgacgccgaccaggatgcggtctattaccatcacgcggcgggacgggagattgtgcgcaaggcgtgggacgacccgcttaccggcgaggcgggcgggtcgacgttctacggcggggatctcgacggcatcagcgaaaaacttccctacctgaagcagctcggcgtaaccgctctgtatctgaacccggttttcgccgcccccagcgtgcataaatacgataccgaggattatcggcgcgtcgatccgcagtttggcggcgacgcggcgctgctccggctgcgccacaacacccagcgggcgggaatgcgcatgatcctcgacggcgtgttcaaccataccggcgattcccatccctggttcgaccgtcaccagcagggcagcggcggcgccggccacgatccggactccccgtggcgcgactggtttaccttctcagaggaggggcaggcgcacaactggctgggctatgccagtctgccgaagctcgactatcggtcgaccagcctggtcaacgagatctatgccggtgaagacagtatcgtacgccactggctgaaggcgccatggagcatggacggctggcgtcttgacgtggtgcatatgctgggcgaaggcggcggggcgcggaataacctgcagcatatcgccggcattacccaggcagcgaagcaagcgcagccggaagcttttgtctttggcgaacattttggcgacgcgcgccagtggctgcaggcggatgccgaagacgcggcgatgaactatcgtggcttcaccttcccgatctggggattcctcgccaataccgatatctcttacgatccgcagaaaatagatgcccagacctgtatggcgtggatggataattatcgcgccgggctgtcgcatcagcagcagctgcggatgttcaaccagctcgacagccatgatacggcgcgttttaaatctcttcttggcaaagacgtagcgcgcctgccgctggcggtggtgtggctgttcagctggccgggggtaccgtgcatctactatggcgacgaggtgggcgtggatggcaataacgatccgttctgccgcaaaccgttcccgtgggatccggcgctgcaggatacccagctgctggcgctgtatcagcggatggcgaaactgcgtaaggcccaccaggcgctgcgctacggcggctgtcaggtgatttacgccgaggataacgttgtggtgtttgtccgtgtctacaaacagcagcgggtgctggtggcgattaaccgcggggaagcctgcgaggtggttatcgaagattccccgctgctgaacgtggccgggtggacgctgcaggagggcgccggcgccttccaggacggggtgctgaccctcccggccatctccgccaacgtctggtccggccgt

SEQ ID NO: 23915 - DNA, 1407 bp, Klebsiella pneumoniae
atgcaaagcacaacacaacaacaaggtgggcagctgaagcgcaccatgaaaacgcgccatctgatcatgctgtcgctcggcggcgtgattggcaccggcttattctttaataccggctatatcatctccaccaccggcgcggccgggacgctgctggcgtatctgattggcgccctggtggtctggctggtgatgcagtgccttggcgaactgtcggtggcgatgccagagaccggcgccttccacgtttacgcggcgcgctatcttggcccggcgacgggctataccgtggcgtggctctactggctaacgtggacggtggcgctggggtcgagcttcaccgcggcgggattctgcatgcagtactggttcccgcaggtgccggtctggatctggtgcgtggtgttctgcgcagtgatcttcggccttaacatcatttcgacgcgcttcttcgccgaaggcgagttctggttctcgctggtgaaagtgatcaccatcgtcgcgtttattattctcggcggcgcggccattttcggcatcattccgatgcaggatggctccccggcgccgggcctgcgcaatatcaccgccgaaggctggttcccgcacggcggcctgccgatcctgatgaccatggtggcggtgaacttcgccttctccgggacggagcttatcggcattgccgccggagagacggaaaacccgcataaagttattccggttgccatccgcaccaccatcgcccggctgattattttctttatcggcaccgtgtttgtgctggcggcgctgatcccgatgcagcaggcgggagtggagaaaagccccttcgtgctggtgttcgagaaggtgggcatcccttatgcggcggacatgttcaacttcgtgatcctgacggcgatcctgtcggcggctaactccggcctgtacgcttcggggcggatgctctggtcgctatcgaacgagaagacgctgccggcctgctttgccaaagtcaataaacggggcgtgccggtgaccgccctgtcggtgagtatgctgggcggcgtgctggcgctgttctccagcgtggtggcgccagatacggtgtttgtcgcgctgtcggcgatctccggttttgcggtggtggcagtgtggttgagcatctgcgcctcgcactttatgttccgccgccgccatctgcagcagggtaaggcgctgagcgatctccagtatcgcgctccctggtatccggtggtgcccgttctgggctttgtgctgtgcctggtggcctgcgtgggcctcgcttttgacccgagccagagaattgcgctgtggtgcgggatcccctttgtggccctgtgctatggtgcctggtatcttactcgttcacggaatatgactcaggagccccaacatgtcgcagac

SEQ ID NO: 23916 - DNA, 1062 bp, Klebsiella pneumoniae
atgcgcgttaccgattttgcttttgaactacccgaatctctgatcgcccactatccgatgcctgagcgcagtagctgtcgcttgctctccctggacgggccgacgggcgcgctgacgcatggcaccttcaccgacatcctcgataagctcaatcccggcgatctgctggtatttaacaacacccgggtgatcccggcgcgtctgttcggccgcaaggccagcggcggcaagattgaagtgctggtggagaggatgctggatgataagcgcattctggcccatattcgcgcctcgaaagcgccgaaaccgggcgccgaactgctgctgggcgatgacgaaagtattaaggccacgatgctggcgcgccacggcgcgctgtttgaagtggagtttaacgacgagcgcccggtgctggagatccttaacgggatcggccatatgccgctgccgccctatattgaccgcccggacgaagacgccgaccgcgagctctatcaaaccgtctacggcaccaggccgggcgcggtagccgccccgaccgccggtttgcatttcgacgaaccgctgctggacaaactgcgcgccaaaggcgttgagatggcgtttgtcaccctgcatgtgggcgcgggcaccttccagccggtgcgcgtcgacagcattgaagagcacaccatgcactccgaatatgccgaagtgccgcaggaggtggtcgatgcggtgctggcggcgaaagcgcgcggcaaccgcgtgatcgcggtgggcaccacctcggtacgttcgctggagagcgcggcgcaggcggcgaaagacgcgctgatcgcgccgttcttcgacgatacgcagattttcatctacccgggttatcagtaccaggtgatcgatgcgctggtgactaacttccatctccctgaatccacactgattatgctggtgtcggcgtttgcgggttatcagcacaccatgaacgcctataaggtggcggttgagcagaaatatcgcttttttagctacggggatgcgatgtttatcacgtacaatccgcaggctatttctgagcgtccc

SEQ ID NO: 23917 - DNA, 900 bp, Klebsiella pneumoniae
atgatgaccacggcagagggggggctggcgtatcagcgctggctggcgacgatcaatcaggtctgcggccatttcgccgcccggccgctgaaggagagtttccacggcgagattgacgcccgctacgccggcagcctcaaggtcagtaccgtcaccgccgccggcgtcaatctctaccgcacgcgcaatgagataaaacgcgataacgacgcctggttctataccgtgtttcagctcgccggcgaagccatcatcgaacaggacgatcgccaggtgacgctggcggcaggcgatatcacgttaatcgacgccgcccgcccatgctccatcgtctggcagcagacctcgcgtcaggcctcgctgctgctgccgcgccagcgggtggcgcccacaggggacatcactaccgcctgccggctggacaaatctctgccaatggtccagctcagccagcgactgctgctggaaagcatgggcggcacgacgctctccgccagcgagagcgaagccgcgctggaggcgatcgcctgcctgttgcgccccgtgctgcatcagcgcgatcctgccccttcccggcgggaaaagcagtttcagaagattattgcgttaatcgatgcgtccattcagtcggagcatctgcgtccggagtggctggccagcgagacgggcatgtcggtacgcagcctgtaccggctgtttgccgaccaggggctggtggtggcgcagtatattaagaaccggcggttggatctgtgtgcccaggcgttacagaacgtccatgacgatgaaaagctggcggggatcggctaccgctggggcttcagcgaccacagccatttctccaccgcctttaagcagcgctttggcgtcaccccgggggaataccgcaagcgctgtcgc

SEQ ID NO: 23918 - DNA, 996 bp, Klebsiella pneumoniae
atgaaaacacgttatcttggaaaagagaagtttcaggtttccgcattaggtctcggatgtatggggatgagttttgcctatggcggcgctgaaacgtcgcaggcgataaatacgatccatgccgccatggacatgggcgtgaccttcctggataccgccgaagtatatggtcctttcgataatgaagttctggtcggaaaagcgattaaaggttttcgcgataaggtgcagattgccaccaaatttggatttcgtattttgccgaccggccagggtctggagcggatggccggcgttgacagccgtccggcacatattcgcgaatcagtggaagggtcgctgaagcgactgaatgtcgagaccatcgatctgctctatcagcaccgcgtcgatcccgcggtaccggtggaagaggtggtgggcactatggccgatctggttaaagagggtaaaattcgccatatcggtctgtcggaagtatctgctcagacgctgcgccgggcctgcaaggtacatccgatcgctgccgtgcagacggaatattcgctatggagccgcgagccggaggccggtattctccacacctgccgcgagctgggggtcggctttgtgccatacagcccgcttggccgcggcttcctgacggggacaattaccgatcccggcgttttggcagcggatgatttccgccgccatctgccgcgcttccaggccgaaaccatgcgcaaaaaccagctgctgcttgagcgcctgcagcaggtggccacccgctatgacgcgacccttgcgcagattgcccttgcctgggtgatgagcaaaggcgaggatatcgtgcctatcccgggggcgaggaaaattgctcacctgcgcgacaatgccggcgccgcgaatattaccctcgcggcggaggacatcctcaccatcgaacatattttcactgccgacaacatcactggcttacgctatacccagggcgactttgatttaatcgaaaaa

SEQ ID NO: 23919 - DNA, 1257 bp, Klebsiella pneumoniae
atgactgaacagattaccgagatcgataccctggtggtcggcgcggggcaggcgggcgtcgccatgagcgagcatctgacccggctggatatcccccacctggtgctggagaaacagggtattgcccaggcctggcgcagcgggcgctgggattcgctggtggccaacggcccggcctggcacgatcggtttccggggatggtgttcccggactgcccgccggacagctttgtcggcaaagagcaggttgcggactattttgccgcctatgcccgcagcttcaatgcgccgatccgtaccggggtggaggtgtacagcgccgaacgcctcgccggacggccgggctttcgtatcgacacctcgcagggagtgattgaagcgcagcggatcgtagcggccaccgggccgtttcagcggccagtgatcccggccattgccccacagagtccggctattcagcagctccactccgcgcactattttaacccgcagcagctgccggagggcggtgtgctggtgattggcgcaggatcctccggcgtgcagattgccgatgagctacagcgggccggacgcgcggtgtggctgtcggtgggagcgcacgaccgcccgccgcgtcgctatcgtcagcgcgatttttgctggtggctcggggtgctggggatgtgggatgccgcggccaatgcgccgggtaaagagcatgtcactatcgcggtgagcggcgcgcgcggcggccataccgtcgattttcgccagctggcgcatcagggggtcacgttagtggggcagacccgcggctttgacggtgacaaagcactgtttcaccccgacctggcggagaatatccgccgcggcgatgcctcctaccttgcgctgctcgacgccgcggacgcgtgggtggcccgcaacggcatggacctgcccgaagagccctccgcccgcgaatttctgcccgatccggcctgcgttaccgacccgctgctcagtctcaatctggccgaggccgggatcggcaccatcatctgggcgacgggctacaccactgactatcgctggctgaaggtcaacgccttcgatgacgcacagcggccacagcatcaccgcggcgtatcgacggagccgggcgtctatttcctcggcttgccgtggctctcgcggcgcgggtccacctttatctggggcgtctggcacgatgccaaatatattgccgaccagatcgccattcagcgccagtaccagcgttaccagccgtcctgt

SEQ ID NO: 23920 - DNA, 912 bp, Klebsiella pneumoniae
atgaaccgatttaccctgaagcagctcaaatatttcgtcaccgtggtggagacggagagtatcgccgaggcctcccgccagctgcacattgcgcagccgtcgatttcgattgccatcaagaatctggagagcaccttcgaccagcagctgtttattcgccaccatgcgcagggcgtttcgctcacctccagcggtcggcggatctacgataaagcgaaagagctgctgcgcctgtcctgggagttcgaacagaattcgcgagcggataaagagctggtttctggcatgatctccatcggttgcttcgaatcggtggctccgctgtatatgccgaagctggtggccgggtttaagaaatgctatccggaaatcaccctgcatctgtacgacggcgaacagcatgagctgatgcatggcctgcaccgcggccgcttcgacctggcgctggtttacgatctggagctcggccattcgatcaataaagagcggctcaatgccccgcataaaccctacgcgctgctgcccgccgcgcatccgctggcgcagaaggcgcaggtgacgctgcaggagctgagccgcgagccgatgatcctcctcgatgcggtccccagtaaaaattattttatctccatctttaaggaaaagggttatcacccggaagtggcttacagttccccctccattgaaatggtgcgctgtatggtgggtcaggggttgggtttttcggtgctggtcacccggccctgctgcgatatgacctacgatggcgaaagagtggtgcagcgggatattgccgacgagatgcccgcctcgaccttaattatggcgcatctcgcgaataatgagcccacgcggccgacgcaactgtttatggattattgtcgcagcatcgaattaaccccaactcacgcc

SEQ ID NO: 23921 - DNA, 1590 bp, Klebsiella pneumoniae
atgacggcgaaaacagcaccaaaaatcaccttatgggaatttttccagcagctgggaaaaaccttcatgctgcccgtagcgttgctctcgttttgcgggatcatgctggggatcggcagctcgctaagcagtcacgatgttttgactctgctgccgtggctggatatgccgctgctgcaggccatctttatctggatgagcaaggtcggctcctttgccttcagcttcctgccggtcatgttttgtatcgccatcccgctgggtctggcgcgagagaacaaaggcgtcgccgccttcgccggcttcgttggctacgcggtcatgaacctggcggtcaacttctggctgaccgcgaagggtattctgcccaccaccgacgccgcgatcctgaaggccaacaatatccagaacattatcggcattccgtcaatcgataccgggatcctcggggcggtgatcgccgggattatcgtctggctgctgcatgaacgcttccataacattcgcctgccggacgccctagccttcttcggcggcacccgcttcgtgccgatcgtcaccaccgtggtgctggggctggtcgggctggcgatcccgctggtgtggccagtcttcgctatggggatcaacgccctcgggaaaatgatcaacagcgccggggattttgggccgatgatcttcggcaccggcgagcgactgctgctgccgtttggcctgcaccatattctggtggcgctgatccgctttaccgaagccggtggcaccctcgacgtctgcggccacagcgtcagcggcgcgctgaccatcttccaggcgcagctgagctgtccgacgacccacggcttcgccgaaagcgccacccgtttcctgtcgcagggtaaaatgccggcattcctcggcggcctgccgggagccgcgctggcgatgtaccactgcgcccgtccggaaaaccgacataaaattaaaggcctgctgatctccggggtcatcgcctgcgtggtcggcggcaccaccgagccgctggagttcttgttcttgtttgtcgcgccggtcctgtatgtcatccacgcgctgctgaccggtctcggctttaccatcatggcggtgctcggggtaaccatcggcaacaccgacggcaatatcatcgacttcgtggtgtttggcattctgcatggcctggccaccaagtggtatctggtgccggtggtggcggctatctggttcgcggtctactatgccatcttccgcttcgccatcacccgcttcaatctgaaaacgccgggccgcgacatcgacactgccgccagcgtggagaaagccgtcgccggtaccatcggcaaatccgggtataacgtaccggcgattctggcggcgctcggcggcgcagagaacattgtttcgctggataactgcattacccgtctgcgcctgtcggtgcacgatatgagcaaagtggacgccgccgcgctgaaagcccatcgcgccatcggggtggtacagctcaaccagcataatctgcaggtggttattggcccgcaggtacagtcggtaaaagatgagatggccacgctgatgaataccgtgcaggcc

SEQ ID NO: 23922 - DNA, 390 bp, Klebsiella pneumoniae
atggaactgctggtcaggctgggtcatttttttgagcaagcgcgttctgacgccgactatgccaccttcgccaatgaactgcgtcggcatcaggtctcctactacatctattttgtttccaccggcaatatgaatttcgtaatggcaaacgacgaggtagtctcggtaaaaagcgcccgcgggctgctgcgcgttcgcgctgaggccagccattgtctgaccagggccgccgttatccgccactttgcccgggccattaactttgaacagtactgccgggatcttgccagcgccggggtatttaagtggatcgtcgatctggaagaggagacccggcactactggtcgaaggataatacgctgttatataaagagtgcctgatgcccccc

SEQ ID NO: 23923 - DNA, 955 bp, Klebsiella pneumoniae
atgagtaaactcgacgcctttattcaacaagcggtgacggcgatgcccatcagcggcacgtcattaattgcctcgctgtatggcgacgctttattacaacgcggtggggaagtgtggctgggcagcgtcgcggcgctgctggaaggattaggcttcggcgagcgcttcgtacgcaccgcgctgtttcgcctcaataaagaagagtggcttgatgttgtccgcatcggccggcgcagcttctatcgcctgagtgataaagggttgcgcctgacccggcgcgcggagcataaaatttatcgcgccagtgccccggaatgggacggtacctggctgctgctgctttcggaaggcctggagaaaaatgtgctcgccgacgttaaaaagcagctgctgtggcaggggtttggcgcgctggcgccgagcctgctggcctcgccgtcgcaaaagctggccgatgttcagtctctgctccacgaagtgggcgtcgctgaaaatgtcatctattttgaagcccattcgccgctggcgctctccagggcggccctgcgcagccgggtggaggagtgctggcatctcaccgaacaaaatgagatgtacgaggcgtttatcgccttgttccgacctctactgccgctgctgcgcgattgcgacccgtcagagttgacgccggatcgctgtttccagatccaactgctccttatccatttctatcgccgggtggtgctcaaagacccgctgctgccggaagagctcctgccggcgcattgggcagggcaaaccgcccgccagctgtgtatcaatatttatcaacgcgtgagtcccggtgcgctggcgtttgtcagcgagaaaggtgagagctcggtgggcgagctcccggcgccgggtccgctctattatcagcgctttggcggtttgccgggcgcataaggaggttgcatgccgatatatcagattg

SEQ ID NO: 23924 - DNA, 996 bp, Klebsiella pneumoniae
atgagtaaacttgggattaatggatttggtcgtatcggacgtctggtgttacgtcgtttattagaagtcgacagcagcctggaagtggtggctatcaacgacctcacttcgccaaaggtgctggcctacctgttgaagcatgattcaaactacggccccttcccgtggagcgtcgactttaccgaagatgcgctgatcgtcaacggcaaaaccattacggtgtatgccgaaaaagaggcgcagcatattccatggcaggcggcaggcgccgaggtgattgtggagtgtaccgggttctacacctcggccgagaaatcgcaagcccatctccaggccggcgcgcgcaaagtgctgatttccgcccccgccggcgagatgaaaaccatcgtctacaacgtcaacgatgacaccctgaccccggatgacaccatcatctccgtggcctcctgcaccaccaactgcctggcgccgatggccaaagttctgcaggatgccttcggcatcaccgtaggcaccatgaccaccatccacgcctataccggcacccagtctctggtggacgggccgcgcggaaaagatctgcgcgcctccagggcggcggcggaaaacgttatcccgcacactaccggcgcggcaaaagccattggcctggtgatccctgccctgagcggtaagctgaaaggccatgcccagcgcgtaccgaccaaaaccggctcagtgacggagctggtatcggtgctggagaaaaaggtgactgcggatgaggtcaatcaggcgatgaggcaggcggccgagggtaacgaatcctttggttacaccgaagaggagatcgtctcttccgatatcatcggcagccatttcggttcgatctacgatgctacccagctggagattgtggaggccggcggcgtacagctggtgaaaaccgtcgcctggtacgataacgaatacggctttgtcacccaactgatccgcgtgctggagaaatttgcccgc

SEQ ID NO: 23925 - DNA, 1314 bp, Klebsiella pneumoniae
atgataactactacaaaattagatccgattgaaaccgcatcgcgtgacgaactgcaggccctgcaaacccagcgcctgaaatggacgctgaagcatgcgtacgaaaatgtgccgatgtatcgccgcaagttcgacgccgccggcgtgcaccctgacgactttcgggaattaaacgatctgcaaaaattcccctgtaccaccaaacaggatctgcgcgacaactatcccttcgataccttcgcggtgccgatggagcaggtggtgcgcattcacgcctcttccggcaccaccggcaaaccgacggtggtgggatatacgcaaaacgatattgataactgggccaatattgtcgcccgttcgctgcgcgcggccggtggttcagcaaaagataaaattcacgtcgcctacggctacggcctgtttaccggcggccttggcgcgcactacggcgcggaacgtttgggcgcgacggtgatcccgatgtccggcggacagaccgaaaaacaggcgcagctgatccgcgatttccagccggatatgatcatggtgacgccgtcctactgtctgaatctgattgaagagctggagcgccagatgggcggcgatgcccgcggctgttcattgcgggtcggcgtctttggcgctgagccgtggacgctggcgatgcgcgcggaaatcgagcgccggctggggatcaccgccctggatatttacggtttgtcggaagtcatgggaccgggcgtagcgatggagtgtctggaaaccgttgacggcccgactatctgggaagaccacttcttcccggaaatcgtcaacccggacgacggtacgccgctggaagatggcgagcatggtgagctgctgtttaccaccctgaccaaagaagcgctgccggtgatccgctatcgtacccgcgatctgacgcgcctgctgccgggaaccgcgcggaccatgcgccgcatggatcgcatcagcggacgcagcgacgatatgctgattatccgcggggttaacgtcttcccctcgcagctggaagaggagatcctcaagtttgaacacctggcgccgcactatcagttagaggtcaatcgccgcggtcatctggattcgctggcggtgcgcgttgagctgaaagagagcgggctggcgctgagtcatgaacaacgctgccagatttgccatcagttgcgtcaccgcattaagtcgatggtcgggatctccaccgatattactatcgtcaactgcggcagcattccgcgctcggaagggaaagcctgtcgggtattcgacctgcgaaaagcggtggttagcggt

SEQ ID NO: 23926 - DNA, 1511 bp, Klebsiella pneumoniae
atcagcgtctggccgggcgcagcgatgattaccgcgaaggggtcagcgcgtttctggccaaacggccaccacagttcagcgggaaatagatgatgacgacatccttagccaccgtggcggtgatcggcagcggcaccatgggggccggcatcgccgaagtggctgccgccgccgggcatccggtgcgtatttttgatattaaccctaaggctgtagacctggcgatagagggtatcgccgggcgtctggcgtcacgcgttgcgcggggcaaactggcgtcagagcaggccgacgcgctgctggcgcgcctgcatccggcccacgatttagccgcgcttgccgatgcggatttagtgatcgaagcggcctctgaacggttggaggtcaaaacggcgctgttcacgcagctggcggagatctgcgcgccgtcaacgctgttgaccagtaatacctcgtctatttcgattaccgctatcgccgccggggtcaaaaacccggagcgggtggccggactgcacttttttaatccggcgccggtgatgaagctggtcgaggtggtgagtggtcttgcgacctccacagaagtggtggagcagctgtgccagtgcgtaagcggctgggggaaacagccggtacgctgccgctcaacgcccggttttatcgttaaccgcgtagcgcgtccgttctacgctgaggcctggcgcgcgctggaagagcaggtcgccgccccggaggttatcgatgccgctttgcgtgacggcggcggttttcctatgggagcgctggcgctgacggacctgattggccaggacgtcaacttcgccgtgacctgttcggtgtttaacgccttctggcaggaccgccgctacctgccatcgctcctccagcaagagctggcgctggccgggcggctgggtaaaaagagcggccacggcgtctatcgctggcccgcggagacgcagccggacgcggcgctgcctccggtatctattggcgctcaatccattacggctataagtgacggtgtcacagaactcgatgacctcttgttgctggagaccgaaggcgagaccgcgctggcgttaagcgttaagcatcaccgcccggtggtggtgtatgacctgtgcgccagcgaaacggtggtgctggccgcagcggccaccaacgcgcctgcggccactgataaggctgtgcattacttccaacagcagggcaagaaagttctgcgtattgccgattatcccggcctgctggtgtggcgcacggtggcgatgctgattaacgaagcgctggatgcggtgcaaaaaggggtcgccagcccgcatgatatcgataccgcgatgcgccttggcgtcaactatccgcatggcccgctggcatggggagaacgccttggctggcggcgggtgctgcaactgctggagaacctgcaacaccattatggcgaggagcgctatcgccccagttccctgctgcgccagaaggcgctgatggagaagcaccatgagcaa

SEQ ID NO: 23927 - DNA, 249 bp, Klebsiella pneumoniae
atcaccatcaaagaagcaattccgcgtggtaaggtcaaaaaaggtgatgtgctgaaggcggtagtggtgcgcaccaagaagggtgttcgtcgcccggacggttctgtcattcgcttcgatggtaatgcatgcgttattctgaacaataacagcgagcagcctatcggtacgcgtatttttgggccggtaactcgtgaacttcgtaccgagaagttcatgaaaattatctctctggcaccagaagtactc

SEQ ID NO: 23928 - DNA, 312 bp, Klebsiella pneumoniae
atggcagcgaaaatccgtcgtgatgacgaagttatcgtgttaaccggtaaagataaaggtaagcgcggtaaagttaagaatgtcctgtcttccggcaaggtcattgttgaaggtatcaacctggttaagaaacaccagaagccggttccggctctgaaccaaccaggcggcatcgttgaaaaagaagctgcaattcaggtttctaacgttgcaatcttcaatgcggcaaccggcaaggctgaccgtgtaggctttagattcgaagacggtaaaaaagtccgtttcttcaagtctaacagcgaaactatcaag

SEQ ID NO: 23929 - DNA, 582 bp, Klebsiella pneumoniae
atgaaaatcaaaactcgcttcgcgccaagcccaaccggctatctgcacgttggcggtgcgcgtactgctctctattcctggctttttgcccgtaaccacggcggtgagtttgtgctgcgtattgaagacaccgatctcgaacgctccaccccggaagcaattgaagccatcatggatggcatgaactggctgaatctgcaatgggacgaaggcccctatttccagaccaaacgtttcgatcgttataacaacgtaatcgatgagatgctggaagccggtaccgcttacaaatgctattgctcgaaagaacgtctggaagcgctgcgcgaagagcagatggcgaagggtgagaagccgcgttacgatggccgctgccgccatagccacgagcaccatgctgatgatgagccgtgcgtcgtgcgtttcgccaacccgcaggaaggttcggttatttttgacgatcagatccgcggacctatcgagttcagcaaccaggaactggacgatctgatcattcgccgtaccgatggttccccgactataacttctgcgtggtggtagatgactgggatatggggatca

SEQ ID NO: 23930 - DNA, 560 bp, Klebsiella pneumoniae
ctgataggacgtaatggggcaggaaagagtacctctcttggtctggttgccggcgtgattaagccaactaagggaaccgtcaccactgaaggacgggtggcatcgatgcttgaactcggcggaggctttcatccggaacttaccgggcgtgagaatatttacctgaatgctactctgctgggccttaggcgtaaagaggtccagcaacgtatggaacgtattattgaattttcggaacttggagaattcatcgacgagcccatcagagtatattcaagcggaatgctagctaagttaggtttttcggtcatcagtcaggttgaaccggatattttaattatgatgaagttctggcagtaggtgatatcgcttttcaggctaaatgtattcagaccatcagagattttaagaaaagaggcgtgacgatactctttgttagccacaatatgagtgacgttgaaaaaatctgcgatagagtcatctggatcgaaaatcatagactcagagaagtgggatctgccgatcgaattattgaactgtacaagcaagcaatggcttaa

SEQ ID NO: 23931 - DNA, 876 bp, Klebsiella pneumoniae
atggagaaaaagagagccacgacgatcggcttcgccgccattatcttatggagcacgatggtcggattgattcgcggcgtcagcgaaggactgggagcggtcggcggggcggcgatgatttacagccttagcggcctgctgctgatctttaccgtcggctttcccaacctgcgccagatcccgcgtcgctatctgctggccggcagcgtgctgtttgtcagctatgaaatctgcctcgcgctgtcgctgggctatgccgccagccgccagcaggccattgaggtggggatggtcaattacctgtggcccagcctgacgattttattcgccattctctttaacggccagaaaagcagctggctggtgatccccggcctgattctcgccctgctgggcgttggctgggtgttgggcggtgagcatgggctacagcccgatgagattatcagtaacgtcatttccagcccgcttagctatctgctggcctttgtcggggcgtttatctgggccgcctactgcacggtgacggccaaatatgcccgcggtaaaaacgccattacgctgttcgtcctgttaaccgccctgacgctatggctgaaatttctcgccagcgaccagccgccgatgctgtttagctggccggtggtcattaagctgatgacggtctccgtggcgctggggctggcctacgcggcgtggaacgttggcatcctgcacggcaacgtcagcctgctggcggcggcctcctacttcacgccggtgctctcctctgcgctggcggcgatcctgctgagtgcgaccctgtcgtggtccttctggcagggggccgggatggtatgtctcggctccctgctctgctggtacgccacccgccgt

SEQ ID NO: 23932 - DNA, 2175 bp, Klebsiella pneumoniae
atgagcacgtctaacgacccatccaacaatgcatccgccgggaagtgccctttccacgccgagacgccaaaacagagcgccggcagcggcaccgccaaccgcgactggtggccgaaccagctgcgtgtcgatctgttaaaccagcactccaatcgctccaacccgttgggtgagaattttaactacagggaagagtttaaaaagctcgattactccgcgctgaaggctgatctcagagcgctgctgaccgattcgcaagagtggtggccggcagactggggtagctatattggcttgtttattcgtatggcctggcacggcgccggcacctaccgcaccgttgacggtcgcggcggcgcaggtcgtgggcagcagcgctttgcccccctgaactcctggcctgacaacgtcagcctcgataaggcccgccgtctgctgtggccggtgaaacagaaatatggccagaaaatctcctgggccgacctttacatgctagcgggtaacgtcgctctggaaaacgccggcttccgcacctttggctttggcgccggtcgcgaagacgtctgggaaccggatctcgacgtcgactggggcgatgagaaagagtggctggcccaccgtcatccggaaagcctggcgaaacaggccatcggcgccaccgaaatgggtctgatttatgtcaacccggaaggtccgaacgccagcggcgagccgctgtccgccgcggcggccattcgcgccaccttcggcaatatggcgatggacgatgaagagatcgtcgcgctgatcgccggcggccatacgctgggcaaaacccacggcgccgcagaaaccagccacgtcggcgccgagccggaagccgcgccgctggaagcgcagggtctgggctggcactccagctacggcagcggcgcaggcgcggacgccatcacctccggtctggaagtggtctggacgcagacgcccacccagtggagcaactactttttcgaaaacctgttcaaatacgaatgggtgcagacccgcagcccggctggcgcgatccagttcgaagccaaagacgcgccggagattatcccggatccgtttaacccggagaaaaagcgcaaaccgaccatgctggtcaccgacctgaccctgcgcttcgacccggagtttgaaaaaatctcccgtcgcttcctcaacgatccgcaggcctttaacgaggcgttcgcccgggcgtggttcaagctgacccaccgtgatatggggccaaaatcccgttacctcgggccggaagtgccgaaagaagatctgatttggcaggatccgctgccggcagcgacccatcagccgagcgcggaagatatcgccagcctgaaaagcgccatcgccggcgccggcctgtcggtcagtgagctggtctcggtcgcctgggcgtccgcctccaccttccgcggcggcgataaacgcggcggcgctaacggcgcgcgtctggcgctggccccgcagaaagactggccggttaacgccatcgccagccgggtgctgccgaccctgcaggcgatccagcgcgcctccggcaaagcgtcgctggccgatattatcgtgctggccggcgtggtcggcgttgagcaggcggccgctgccgccggcgtcagcgtcaatgtgccgtttaccccaggccgcgtcgacgctctgcctgagcagaccgacgtcgagtcgtttgatctgctgcagccgctggcggatggcttccgcaactatcgccgtatcgaaggcggtgtctcgacggaaaccctgctgatcgataaagcgcagcagctgacgctaaccgccccggaaatgaccgtgctggtcggtggcttgcgcgtactgggcgcgaactacgacggcagcaaacacggggtgtttaccgaccgcgtcggcgtgctcagcaatgacttcttcgttaatctgcttgatatggctaccgtctggaaagcggccgatgataacgcggagctgtttaccggcagcgaccgtaaaaccggcgaagcgaagtacagcgccacccgcgtggatctggtgtttggctccaactcggtactgcgcgccctggcggaagtgtacgcctgcgccgacgggcagcagaagctggtgcatgacttcgttgccgcctggacaaaggtgatgaacctcgaccgcttcgatctg

SEQ ID NO: 23933 - DNA, 429 bp, Klebsiella pneumoniae
atggcgattcataagaaagggctagcgcactgggaaggcgacctgaagcatggcaaaggcaccgtgtcgacagaaagcggggcgctgagccagcagccctacggatttaacacccgttttgagggggtgaagggcaccaaccctgaggagctgatcggcgctgcacatgccgcctgcttttcgatggccctgtcgctgatgctcagcgaagagggatataccgcaacgtccatcgacactaccgcagtggtcaccctcaataaaaccgacggcggctttgcgattaccgatatcgcgctgcaaagccagatcgtcctgccggacgtctctccagcggcgttcgatgagatcatccagaaagcgaaagcaggctgcccggtatcgcaggtgctgaaggccaacattaccctcgattaccagctgaatccg

SEQ ID NO: 23934 - DNA, 3738 bp, Klebsiella pneumoniae
atgagtaaacttctggatcgctttcgctactttaagcagaagggcgagacctttgccaacggccacggccaggtctacaacaacaaccgtgactgggaagatagctaccgtcaacgctggcagttcgacaaaattgtccgctccacgcacggtgtgaactgcaccggctcctgcagctggaaaatttacgtcaaaaacggtctcgttacctgggaaacccagcagaccgattatccgcgcacccggccggatctgccaaatcacgaaccgcgcggctgcccgcgcggcgccagctactcctggtatctctacagcgccaaccgcctgaagtacccgctggcgcgtaaacgactgattgagctgtggcgcgaagccctggcgaagcatcccgacccggtgctggcatgggatagcatcatgcaggatccggcaaaaacccgcagctataaagcggcgcgcggcaaaggcggttttgtccgctccagctggaaagagctgaaccagctcatcgccgccgccaacgtctggaccatcaaacactatggcccggaccgcgtcgccggcttctcgccgatcccggcgatgtcgatggtctcctacgccgcgggcactcgctatttatcgttgattggcggcacctgcctgagcttttatgactggtactgcgatctgccccccgcctcgccgatgacctggggcgaacagaccgacgtgccggaatccgccgactggtacaactccagctacattattgcctggggctccaacgtcccgcagacccgaaccccggacgcccacttctttaccgaagtgcgctacaagggcaccaaaactatcgccatcacgccggactattcggaagtcgctaagctctgcgaccagtggctggcgccgaagcaaggcaccgacagcgcgctggcgatggccatgggccatgtgatcctcaaagccttccacctcgataacccgagcgattactttctcaactactgccggacctacaccgacatgccgatgctggtgatactcgagccgcgcgacgacggcagctatacgccgggccgtatgctgcgtgcttccgacctgcttgacggtctcggggaaagtaataacccggaatggaaaaccgtggcctataacagcgacggcgaactggtggcgccgaacggctccatcggctttcgctggggcgaaaaaggcaaatggaatctcgaacaacgggcagacggcaaagatgtcgagcttaagctgtcgctgctggatattcgcgacagcgtggtgtcggtgggcttcccctactttggcggcaacgaaaacccgcattttcgcagcgtatcgcagtcaccggtgacccttcacccgctaccggctaaacagctgacgctggccagtggcgaaagcggcctggtggtcagcgtctatgacctgattctggccaactacggtctggatcgcgggcttgacgatgtcaatgcggcgaaggatttcgccgaggtcaaagcctataccccggcatgggcggagcagatcaccggcgtaccgcgtcaacatatcgaacaaatcgcccgcgagtttgccgatacggcgcataagacccacggccgctcaatgattatcctcggcgccggggtgaaccactggtaccacatggatatgaactaccgcgggatgattaatctgctggtattttgcggctgcgtcggccagagcggcggcggctggtcgcactatgtcggtcaggagaaactgcgcccgcagaccggctggctgccgctggcgttcgccctggactggagtcgtccgccgcggcagatgaacagtacctcttatttctacaaccacgccagccagtggcgctacgaaaaactgaccgcgcaggagctgctgtcgccgctggccgacgccagcaaatttagcggcagccttatcgacttcaacgtccgtgcggaacggatgggctggttaccttctgcgccccagctcaacgtcaacccgctgaccattaagcagcaggccgaggccgccgggctctcccccgcggagttcaccgtccagtcgttaaaatcaggcgatattcgctttgccgccgagcagccggatagcggcaaaaaccatccgcgcaacctgtttatctggcgctcaaacctgctgggatcgtccggtaaggggcatgagtacatgttgaaatacctgctcgggaccgacagtggtattcagggtgatgaactgggcgccagcgatgaggtaaaacctgaggaagtcgagtggcagaccgcggcgattgagggcaaactcgatctcctggtgaccctcgatttccgcatgtccagtacctgtctcttctccgatattgtcctgccgaccgccacctggtatgaaaaagacgatatgaacacctcggacatgcacccgtttatccacccgctctccgctgccgtcgacccggcctgggaggcgaaaagcgactgggagatctacaaggatatcgctaaatccttctcgcaggtctgcgtcggccatcttggcaaagagaccgatgtggtgctggtcccgctgcagcatgattcccccggcgaactgtcgcagccgttcgaggtgcttgactggcgcaagggcgaatgcgatctgatccccgggaaaaccgcaccgtccattgccctggtggaacgcgactacccggccacctgggaccgcttcacctctctcggcccgctgctcgataagctcggcaacggcgggaaaggcattgcgtggaatacgcaaagcgaagtcgatttcctcggcaagcttaactacgtcaagcccgacggtccggccaaaggccggccgcggatcgacagcgccattgacgcctccgaagttattcttagtctcgccccggaaaccaacggccaggtggcggtgaaagcctggcaggcgctgggagagtttaccggccgcgatcatacccatctggcgctcaataaagaggatgagaagatccgctttcgcgatattcaggcgcagccgcgcaaaattatctccagcccgacgtggtcgggactggaaagcgagcacgtctcctacaatgccggttataccaacgtgcatgagctgatcccatggcgcaccctctccggccgccagcagttgtatcaggaccatccgtggatgcgcgcttttggcgaaagcctggtagcctatcgcccgcccattgatacccgcagcgtcagccagatgaaggccgtgccgccaaacggctttccggaaaaagcgctgaatttcctgacgccgcaccagaagtgggggatccactccacctatagcgaaaacctgctgatgctgacgctgtcgcgcggcgggccgatcgtctggcttagcgaaaccgacgcgaaagagctgggcattgaagataacgactggattgaagcgttcaacgccaacggggctctcaccgcgcgggcggtggtgagccagcgggtgccgccggggatgaccatgatgtaccacgctcaggaacggattatgaatatcccgggttcggaagtgaccggtcgtcgcggcggcattcataactcggtaacccgcgtctgtccgaagccaacgcacatgattggcggctacgcccagctggcctatggctttaactattacggcaccgtcggatcgaaccgcgacgagttcatcatgatccgcaaaatgaagaatattgcctggctggatgacgaaggtcgcgatcaggtacaggaggcgaaaaaa

SEQ ID NO: 23935 - DNA, 1542 bp, Klebsiella pneumoniae
atgaaaatccgttctcaggttggaatggtgctgaatctggacaaatgcatcggctgtcacacctgctcggtcacctgtaaaaacgtctggagcagccgcgaaggcatggagtacgcgtggttcaataacgtggagaccaaaccgggcattggctaccccaaaaactgggaggaccaggatcagtggcaaggcggctggatccgcggcattagcggtaagctgacgccccgcctcggcaatcgggtcagcgtgttatcgaagattttcgccaacccggtgctgccggcgatcgacgattactacgaaccctttacctacgactaccagcacctgcacaacgcgccggagggcaaatatctgccgaccgcccgcccgcgctcgctgatcagcggcgagcgtatggataagattagctggggcccgaactgggaggagctgctcggcggcgaattcgagaaacgcgcccgcgaccgtaacttcgaagccatgcaaaaagagatgtacggccagttcgaaaataccttcatgatgtatcttccgcgcctgtgcgagcactgcctcaacccgagctgcgtggccacctgcccgagcggcgccatctacaagcgtgaggaagatggcatcgtactgatcgatcaggacaaatgccgcggctggcggatgtgcatcagcggctgtccgtacaaaaaaatctactttaactggaagagcggtaagtcggaaaaatgcatcttctgctatccgcgcattgagtccgggcagccaacggtctgctcagaaacctgcgtcgggcgcatccgctatcttggcgtactgctgtatgacgccgaccgcattgaagaggcggccagtaccgaacatgaaaccgacctctatgagcgccagtgcgaggtgttccttaatccaaacgatccggcggtcatcgaggaagcgctaaagcaaggcatcccgcacaacgtcattgaggcggcgcagaaatcgccggtctataagctggcgatggactggaagctggctctgccgctgcatccggagtatcgcaccctgccgatggtctggtacgtgccgcccctgtcgccgatccagtcggttgccgacgccggcggcttaccgagcaacggcaacatcctgccggcggttgagagtctgcgcatcccggtgcaatacctggcgaatctgctgagcgccggcgataccggaccggtcttgcgcgcgctgaaacggatgatggcgatgcgccactacaagcgctcgcaaaccgtcgagggcgtcaccgatacccgcgccattgaagaggtgggcctcagcgttgagcaggtcgaagagatgtatcgctatctggcgatcgccaactacgaagaccgcttcgtgatccccaccagccatcgcgaactggcggaggatgcctttccggaacgtaacggctgcggctttaccttcggcgatggctgccacgggtcagatacgaaattcaacctgtttaacagccggcggatcgacgccatcgacgtcagcggcgtgcgtaagcatggggagggcgag

SEQ ID NO: 23936 - DNA, 678 bp, Klebsiella pneumoniae
atgatccagtatctgaacctcttcttttacgatatctacccttacctgtgcggcaccgtctttctggtgggcagctggctgcgctacgattacgggcagtatacctggcgcgcctcatccagccagatgctggataagcgcgggatggtgctatggtcgaacttatttcatatcggcattctcggcatcttctttggccatctctttggcatgctgaccccacactgggtctactcgtggttcctgccgatgtcccagaagcagctgatggccatgatccttggcggcatctgcggcgtgctgaccctggtaggcggtatcggcctgctgatgcgccgcctgaccaacccgcgaattcgcgccacctccacgaccgcggatattttgatcctgtgcattctgctgattcagtgcgcgctggggctgacgaccatccccttctccgcccagcatccggacggcagcgaaatgctcaagctggtggactgggcgcaggcggtggtcaccttccacggcggcgcctcggcgcatctggacggtgtcgcatggatttaccgcgtccacctggtgctcggaatgaccatctttctgatcttccccttcacccgcctggttcacgtctggagcgcgccggtggaatatttcacccggcgttaccaggtggtacgctcccggcgc

SEQ ID NO: 23937 - DNA, 918 bp, Klebsiella pneumoniae
atgactatgcaagatgaaaaaccgccaatgaagaagttacccacctccatgttgccagaagagacggctccacgtccggagttcccggagcaagaacaaaccccgccgggtctggatgcggaaatggagccatccccggaccacggtgaaaccagctacaccggctccgggcgactggccggtaagaaagcgttaattaccggcggcgactccggtattggccgtgcggtggcgatcgcctttgcccgcgaaggcgccgacgtcgcgataaactatctgcccgaagagcaaaaggatgcggatgaagttatcgccctgatcaaagccgaagggcgcaccgcggtggccctcccgggtgatattcgctccgaatccttctgccagtcgctggtggccgacgcggtggaacagctgggaggtctgagcatcctggttaataacgccgggcgtcagcaatactgtgaaacccttgaggaactcactaccgaagatttcgacgctacctttaaaaccaacgtctacgcgccgttctggatcacccgcgccgcactgcctcacctccaggccggaagcgcgattatcaataccacctcggtgcaggcgtataaacccagcccgatcctgctcgattatgcgcagaccaaagcctgtctcgcgatcttcactaaatcgctggctaaacaggtggcgaaacgaggcattcgcgtgaacgccgtagcgcctggcccttactggacggtgctgcaatccagcggcggccagccggacgagaaggtgaaacagtttggcaaagacacgccgatggggcgcccgggacaaccggtagagatcgccccgctgtatgtcaccctggcatccgatgcctgctcatatacctccggacaggtgtggtgttctgacggcggggatggtgtggtc

SEQ ID NO: 23938 - DNA, 1008 bp, Klebsiella pneumoniae
atgaaggcagctgttgttacccacgaccatcaggttaacgtcacggaaaaaacgctgcgcccgctggaatacggcgaagcgctgttgaaaatggaatgctgcggcgtgtgtcatactgacctgcacgtgaaaaacggcgattttggcgataaaaccggcgtcattctcggccatgaagggatcggggtggtacaaaaagtcggcccgggcgtcacctccctgaagccgggcgaccgcgccagcgtggcgtggttcttcgaaggctgcggccactgcgattactgtaacagcggcaacgagacgctctgccgctcggtgaaaaacgccggctataccgtcgatggcggcatggcggaagagtgcatcgtcaccgccaactacgcggtaaaagttccggacggcctcgactccgccgccgccagcagcatcacctgcgcgggcgtcaccacctacaaagcggtcaaggtctcccacatcaaaccgggccagtggatcgccatctacggcctcggcgggctgggtaacctcgcgctgcagtatgcgaagaatgtgtttaacgccaaagtgatcgctatcgacgtcaacgacggacagctggagctggcggcctcgatgggcgccgacctgaccatcaactcccgcaatgaagatgcggcgaaagtgattcaggaaaaaaccggcggcgcccacgctgcggtagtaaccgcggtggctaaagcggcctttaactcggcggtggatgccgttcgcgccggtggccgcgtggttgcggtgggcctgccgccggaggcgatgagcctcgatattccgcgtctggtgctggacggcatcgaagtggtcggttcgctggtcggcacccgtcaggatctggtggaagccttccagtttgccgccgaaggcaaagtggtgccgaaagtcaccctgcgtccgctggaagatatcaatgctatcttcaaagagatggagcaaggtcagatccgcggccgtatggttatcgatctgcgtagc

SEQ ID NO: 23939 - DNA, 1725 bp, Klebsiella pneumoniae
atgaaagtttgtggcgtcacgcatgttcgggtatactactttcccgtcctggttattccatcgttttaccctaacttctcagggttcagcatgacaacgaactatatttttgtgaccggcggggtcgtatcctctctgggtaaaggcattggcgcagcctccctggcagccattcttgaagcccgtggtctcaacgtgaccatcatgaaactggatccgtatatcaacgtcgatccgggcaccatgagcccaatccagcatggggaagtgttcgttactgaagacggcgcagaaaccgatctggacctgggccactatgagcgttttatccgcaccaagatgacgcgccgcaataacttcaccaccggccgtatctactccgacgtgctgcgcaaagagcgccgtggcgactacctgggcgcgaccgttcaggttatcccgcacatcaccaacgctatcaaagagcgcgtactggcgggcggcgaaggccatgacgtcgtgctggtggaaatcggcggtaccgtaggcgatatcgaatccctgccgttcctcgaagcgattcgtcagatggcggtagagatcggccgcgagcataccctgttcatgcacctgactctggtgccgtacatggccgccgcgggcgaagtcaaaaccaagccgacccagcactccgtgaaagagctgctctccatcggtattcagcctgatattctgatctgccgctccgatcgcgcggttccggccaacgaacgagccaaaattgctttgttctgtaacgttccggaaaaggctgtgatttctctgaaagatgtcgattccatttataaaattccgggcctgttgaaatctcaggggctggacgattatatttgtaaacgattcagcttaacttgtccggaagcaaacctggccgaatgggaacaggtaatctatgaagaagctaatccggcaggcgaagtcaccatcggtatggtcggtaagtacattgaactgccggatgcctacaagtcggtgattgaagcgctgaaacacggcggtctgaaaaatcgcgttaccgtcaacatcaagctgatcgattcgcaggatgtggaaacgcgcggcgtcgaaatccttaaggatttagacgctatcctgatcccgggcggcttcggctaccgcggcgttgaaggcaagatcgccaccgcgcgctatgcgcgtgaaaacaatattccttatctgggcatctgcctgggtatgcaggttgcgctgattgagttcgcgcgtaacgtagcgggtatggaaaacgccaactcgacggaatttgtgccagactgtaaatacccggtcgtggccctgatcaccgaatggcgtgacgaagatggcaacgttgaagtccgctctgagaagagcgatctgggcggcaccatgcgcctgggcgcgcagcagtgccagctgagtgatgattctctggtacgccagctttacggcgagccgaccatcaccgagcgtcatcgtcaccgctacgaagtcaacaacatgttgttgaaaccgattgaagctgccggtctgcgcgttgcgggccgttccggggatgatcagttggtcgagatcatcgaagtgccgaaccatccgtggtttgtggcctgccagttccacccggagtttacttcgacgccgcgtgatggacacccgctgtttgccggctttgtgaaagccgcgagcgagtaccagaaacgccaggcgaag

SEQ ID NO: 23940 - DNA, 1296 bp, Klebsiella pneumoniae
atgtccaaaatcgttaaagtcatcggtcgtgaaatcatcgactcccgtggtaacccgactgttgaagccgaagtacacctggaaggtggtttcgtcggtatggcagctgctccgtcaggtgcttctactggttcccgcgaagcgctggaactgcgcgatggcgacaaatcccgtttcctgggtaaaggcgtaaccaaagctgttgctgcggtaaacggcccgatcgctcaggcaatcctgggcaaagatgctaaagatcaggctggcatcgacaagatcatgatcgacctggacggtactgaaaacaaatctaacttcggtgcgaacgctatcctggccgtttctctggcgaacgccaaagcagcagctgcgtccaaaggcctgccgctgtacgcgcacatcgctgaactgaacggcactccgggcaaatactccatgccggttccgatgatgaacatcatcaacggcggtgagcacgctgacaacaacgtcgacatccaggaattcatgattcagccggttggcgcgccgaccctgaaagaagcagtacgcatgggttctgaagtgttccatcacctggcgaaagtgctgaagtccaaaggcatgaacactgccgttggtgacgaaggcggctacgcgccgaacctgggttccaacgccgaagcgctggctgttatcgctgaagcggttaaagctgcaggctacgagctgggcaaagacatcaccctggcgatggactgcgcggcgtctgaattctacaaagacggtaaatacgttctggctggcgaaggcaacaaagcgttcacctctgaagagttcactcacttcctggaagagctgaccaaacagtacccgatcgtctccatcgaagatggtctggacgaatctgactgggaaggtttcgcttaccagaccaaagtactgggcgacaaaatccagctggttggtgacgacctgttcgtaaccaacaccaagatcctgaaagaaggcatcgaaaaaggcatcgctaactccatcctgatcaagttcaaccagatcggttctctgaccgaaactctggctgctatcaagatggcgaaagacgctggctacaccgctgttatctctcaccgttctggcgaaactgaagacgctaccattgccgacctggctgttggtaccgctgcaggccagatcaaaactggttctatgagccgttctgaccgcgttgctaaatacaaccagctgattcgtatcgaagaagcgctgggtgagcaagcgccgttcaacggtcgtaaagagatcaaaggtcaggct

SEQ ID NO: 23941 - DNA, 771 bp, Klebsiella pneumoniae
atggctgagacttttgatccccattgcgtgtggttcgtcggcgccggtccgggcgatcgcgaactgattactctcaaaggctaccgtctgctacagcaggcgcaggtagtgatatacgccgggtcgctgatcaacaccgagctactggcctactgtccgccacaggcggagtgccacgacagcgccgcgctgcatctggagcagatcctcgacctgatggaggcgggggtgaaggcgggaaaaacggtggtgcgtctgcagacgggcgacgtctcgctatatggctcggtgcgcgagcagggcgaagagctgacccgccgcgggatccgctggcaggtggtgccgggcgtcagcgctttcctcggcgcggcggcggagctgggggtggagtacacggtacccgaagtctcgcagagtctgattattacccgtctggaagggcgcacgccggttcccgcgcgcgaacagctggaagcctttgccagccatcaaacctcgatggcgatttacctgtcggtgcaacgtattcaccgggtggcggagcggctggtggagggcggctaccccgcgaccaccccggtcgcggtgatctacaaggccacctggccggaaagccagaccgtccgcggtaccctcgcggacatcggcgacaaagtacgcgacgccgggatccgcaaaacggcgctgatcctggtcggccccttcctcggcgatgagtatcactactcaaaactgtacgcagcggattttagccatgaataccgtaaagcc

SEQ ID NO: 23942 - DNA, 2883 bp, Klebsiella pneumoniae
atgccccgcagtttatggttcaaggtttttgttgtgctggccgccctctgggcgccgtttagtcaggccgacaccggatggcagccgattcaggagacgatccgcaaaagcgaaaaagatacgcgtcagtatcaggcgatccgccttgataacgacatggtcgtgctgctggtttccgatccgcaggcggtgaaatcgctgtcggcgctggtggtgccggtgggatccctgcaggatccggcagatcatcaggggctggcgcattttctggaacatatgacgctgatggggtcgcaaaaatatccccagcctgacagccttgcagagtttcttaagctgcacggcggcagccataacgccagtaccgcgccctaccgcaccgcgttttatcttgaagtggaaaatgatgcgctggacggggccgtagatcgcctggccgacgccatcgccgcgccgctgctggataaaaaatatgccgaccgcgaacgtaacgcggtcaacgccgagctgacgatggcccggacgcgagacgggatgcgcatggcccaggtcagcgcggagaccatcaacccggctcacccggcggcccacttctccggtggcaacctcgagacgctcagcgataagcccggcagcccggtgcttgatgcgctgcacaccttccgcgatagctggtactccgccaatctgatgaaagcggtgatctacagcaacaagccattgccggcgctggcgcgcatggctgcggacacctttggccgcgtgccgaatcgtcagatcagcaggccggaaattaccgtcccggtggtcacggatgcgcaaaaaggcatcattattcactatgtgccggcgatgccgcgtaaagtgctgcgcgtcgagtttcgcatcgacaacaacagcgatcgcttccgcagcaaaaccgatgagctggtcacctatcttatcggcaaccgcagcccgggcacgctctctgactggttgcaaaaacagggcctggcggaaggtatccgcgccgattccgatccggtggtaaacggcaacagcggcgtactggcgatctcagccaccctcaccgacaaaggcctggcgcaccgcgatgaagtgacggcggccattttcagctacctcgacctcctgcgtactcagggcatcgacaaacgctatttcgacgaactggcgcatgtgctggcgctggatttccgctatccgtcgatcaaccgcgacatggactacgtggaatggctggcggataccatgatccgggtgccggtcgagcatgcgctggacgtggtgaatattgccgaccagtacgacccgcaggcgatcaaagaccggctggcgatgatgaccccgcagaacgcccgtatctggtatatcagcccccaggagccgcataacaagacggcctactttgtcgatgcgccgtatcaggtagataagattagcgagcagacgttcgctgactggcagcacaaatcgcaggccatccagctgcagctgccggcgctcaacccctatattccggatgacttcacccttatcaaaagcgataaagcctggccgcatccgcagctgatccttgatgaaccgacgctgcgggtggtgtatgccccgagccagtattttgccagcgagccgaaggcggacatctccctggtgctgcgtaatccccaggcgatggacagcgctcgccggcaggtgatgtttgccctcaacgattatatcgccggcatcgccctcgaccagctcagtaaccaggcggcggtcggcggcatttcgttctctaccggcgctaataacggattaatggtcaatgccaacggctatacccagcatcttccggcgctgttcagcgatctgctgcagggatacttcagctatacgccgactgaggagcagctggagcaggccaaatcctggtatgcgcagatgatggattccgccgagaaaggcaaagcctacgatcaggcgataatgccgatccagatggtctcgcaggtgccgtacttccagcgcgaagtgcgccgggcgctgctgccctccattacccttaaagaggtgctcgactaccgcgccaacctgaaaaccagggggcgtcctgaactgatggtgataggcaatatgaccgccgatgccgccacgacgctggcccgccagatccagcagcagctgggcgccgacggcaacgaatggtgccgtaataaagacgtggtggtgaaccggcagcagctggcgatcttcaacaaagcgggcaacagcaccgactccgcgctggccgcggtgttcgcgccgcccaatgttgatgagttcagcagcaccgccgccagcaccctgctgggacagattattcagccgtggttctacaaccagctgcgtactgaagagcagctcggctacgcggtctttgccttcccgatgaacgtggggcgccagtggggcatgggcttcctgctgcagagtagcgataagcagccggccttcctctggcagcggttccaggccttcttccccaccgcggaggcgaagctgcgggcgatgaagccggaagagtttgctcagctccagcaggcggtgataagccagatgctgcaggcgccgcagacgctgggcgatgaagcctcgaaactgagcaaagatttcgatcgcggtaatatgcgttttgattcacgtgataaagtagtggctcagattaaactgctgacgccgcaaaaacttgccgacttcttccatcagacggtggtggatccgcagggcatgacgatcttgtcccagatttccggtagccagaatggcaaagcggactatgcccagccgaaaggcggcaaagtgtgggaaaacgtcagcgcattgcagcaatccttacccctgatgcgagagaatgaa

SEQ ID NO: 23943 - DNA, 792 bp, Klebsiella pneumoniae
atgaaacagtatcttgatttgatgcagaaagtgctcaccgagggcacgccaaaaaatgaccgcaccggcactggcacgatctccattttcggccatcagatgcgttttaacctgcaggaaggcttcccgctggtgaccaccaagcgctgtcatttacgctccatcatccatgaactgctgtggttcctgcagggcgacaccaacatcgcctatctgcacgagaacaacgtcaccatctgggacgagtgggcggatgagaatggcgacctggggccggtctacggcaaacagtggcgttcctggcctgcgccggacggccgccatatcgaccagatcagcacggtgatgaaccagctgaaaaacgacccggactcccgccggatcatcgtctcggcatggaacgtcggcgagctggataaaatggcgctggcgccgtgccacgccttcttccagttctacgtcgccgacggcaagctctcctgccagctgtatcagcgttcctgcgatgtgttcctcggcctgccgttcaatatcgccagctatgcgctgctggtgcatatggtggcgcagcagtgcgatctgcaggtcggtgatttcgtctggaccggcggagacacccatctgtacagcaaccatcttgagcagaccaacctgcagctaagccgcgaaccgcgtccgctgccgaagctggtcatcaaacgcaagccggcgtcgatcttcgactaccgctttgaagacttcgagattgaaggttacgatccgcacccgggcattaaagcgccggtggcgatt

SEQ ID NO: 23944 - DNA, 3534 bp, Klebsiella pneumoniae
atgaccgacaccgctgagtctttggatcccctgcgcttgcccctgatcggcgagcgcctgatagaagcctctgcgggaaccggaaaaacctttaccatcgccgcgctgtatctgcggctgctgttggggctgggcggtgaggccgcctatccccgcgccatcagcgttgaagaactgctggtggtgacctttaccgaggcggcgaccgaagagctgcgcggtcgtatccgcagcaacatccacgaactgcgcatcgcctgcctgcgcggcgaatccgacaatccgctctacagcgcgttgttggcggagatcgccgataaagacgacgccgcgaagacgctgctgctggctgaacggcagatggacgaggcggcggtattcaccatccacggcttttgccaacggatgctgagccttaacgccttcgagtcgggcatgctgttcgagcaacagctgatcgaggatgaatcccgcctgcgttatcaggcctgcgccgatttctggcgccgccactgctatcccctgacccgcgatatcgcggcggtgatccacgacgtctggaaagggccgcgcgatctgctgaagtcccttgaccgctggctgcagggcgaagcgccgcagcttaagtcgccgccagcccctaacgagacgctggccgaacgccatcagcagatcatcgcccgcattgactcgctcaagcagcagtggcgcgagcaggtgggcgagatcgaaggcgtgctggataattccggccttgaccggcggaagtttaatcgcggcaaccagggcaagtggatggagaaagtgaacgcctgggcgcaggaagagacgttaagctaccagctgcccgacgcgctggagaaatttgcccagtcgtttctgctcgagcgcaccaaagccggtggcgaaccgccggtgcatcccctgtttagcgccgtagagtcgttgctggcctcctcgctgacgctcaccgatctggtgctggcgagagcgatggtcgagatccgcgatgcggtcgcccgcgaaaagcgccgccgcggcgagctggggtttgacgatatgctcagccggcttgacgaggcgctgcgcggcgacagcggcgagacgctggccagcgccattcgccagcgttttccggtggcgatgatcgatgaatttcaggacaccgaccctcagcagtaccggatttttcgccgcatctggcgccggcagccggagacggctctgctgctgatcggcgatccgaagcaggccatctacgcctttcgcggcgccgatatctttacctatatgaaagcgcgcggcgacgttgccgcgcactacaccctcgataccaactggcgctcctcgccgggcatggtgggcagcgtcaatcggctgttcagcctcagcgataaccccttcatgttccacgagatcccgttcctgccggtgaaggcggcggcgaagaacaaggggctgcgctttaccgttgacgcggcggacgtaccggcgatgaacgtctggctgatgcccggcgacactgtcgggtctggcgattatcagacctttatggcgcagctctgcgccacgcagatccgcgactggctgagcgccggtcagcaggggcgcgcgctgctgtggcgcggggaaacctcgcgcccggtacaggcttcggatattaccgtgctggtgcgcaaccggctggaggcggcgcaggtgcgtgaagcgctgcagacgctgggtattccctcggtctacctctccaaccgcgacagcgtttttgagacgctggaggcccaggagctgctctggctattgcaggcggtgctggccccggagcgggaaaataccctgcgcagcgcgctggcgacgtcgatgtttggcctgaccgcgctggatattgaaaacctgaaccaggacgagcaggcgtgggacgcgctggtggaagagttcagcgaataccgccagatttggcggcagcgcggggtgatgccgatgctgcgggcgttgatgacagcccggcatatcgccgagaacctgctggcgacccgcggcggcgagcggcgtttaaccgacattctgcacatcagcgaactgctgcaggaggcggccagccagctggaaagcgagcatgccctggtgcgctggctggcgcagcatatcgccgagccggacagcaacgccgccagccagcagatgcgtctcgaaagcgataagcacctggtgcaaattgtcaccattcacaagtcaaaagggctggaataccccctggtctggctgccgtttatcgcccggtttcgtaaacaggaccaggcgttttaccacgatcgcgagacgttcgcggcggtgctggatttgggccaggatgaggccagcctcgagctggcggaggcggaacgactggcggaagatctgcgcctgctgtacgtggccctgacccgcgcggtctggcactgcagcctcggcgtggcgccgctcagcagccggaaatccggcaacagcgatttccacctcagcgcgctgggacggctgctgcaggcgggcgaagccatggacgccgccgggctggctgcgcggctggcagacttctgtcatggcgatattgcattacagattccgggcgaactggatctcaccccgtggcaggcgcccgcggcgaccatcccgcgattgtcggcgcgcgagctgcagcgccgcatcgccgacgactggcgggtgaccagttactccggactgcagcagcatggtttcagcggcgggcaggatttgctgccgcgtctggatgttgatgccgccggcgtcggcgaagtcgtggaagagccgcagctgactccgcaccagttcccgcgcggcgccgcgccggggaccttcctgcacagcctgtttgaggagctggacttcacccagccggtgccggaagggtggatggcggagaagctgcagctgagcgggtttgacgcgcagtgggcgccggtgctgaccgactggctggggggcgtgctgaagacccgcctgccggggccggatatcgcgctcaatcagcttgcggcgcgggataaacaggtggagatggcattttacctgcccatcgcccagctgctgacggcggagcgccttgacgcgcttatccgccagtacgatcccctctctgccgacacgccgccgctggatttccgccaggtgcgcggcatgctgaagggctttatcgatctggtcttccgtcacgaaggccgttattacctgctggattacaaatccaactggctgggggaagatcgcgaggcctacacccggccggcgatggagcaggcgatgcgtgcccaccgctacgatctacagtatcagctgtatagcctggcgctgcaccgctatctgcgccaccggctggccgattatgactatgaccgccacttcggcggcgtgatttatcttttcctgcgcggcatggacgggcaggagggggggcaggggatcttcaccacccggccggtgcgaccgctgattgacggtctggatcagctttttgccggagaaactcaggaggaggcctca

SEQ ID NO: 23945 - DNA, 549 bp, Klebsiella pneumoniae
atgcaaagcttttttgcgtatctggccgggaaagctattttccgtcgtcgcgccagggccaatcgccgcggcatactcgacgccatgaacagagaacatggctacaccctgatggaaaccctggtaacgctgacactgatgatgatcctcagcgtcggcggcctgtacggctggcagcgctggcagcagcagcaacgactgtggcaaaccgccgtccaggtgcgggattttctgctctttctgcgcgatgacgccaacgcctacaaccgggaccgcgtgcttcgcgtcggccaggacgaagtgggctggtgcctgagcgcggatggggaggggcctgactgcgcctcggggacatccttcacgctgcgcccgcgctggccggggatcacgctggctggcgttacgcctggtctggggttttatggtctgcgcagcaccgcctgggcggggaatctgcggctgcagagcgcggccggcagctggagcattgtgatctcacactgggggcggattcgtttatgccgcagcgacagcgcaggagggtgtcag

SEQ ID NO: 23946 - DNA, 1842 bp, Klebsiella pneumoniae
atgactttcgaacaactactgctggcggcggtggagcagcgtctgctgcggccgctggacgtccagtttgccctgatggtggcgcaaaacgacccgccggcggtcaagctggcggcggccttgctgagccgggatgccggcgaggggcacgtctgtctgccgctctcgcggttgagcggcgacgaggcgctgagcggtaaagcgggggagatccgcgatcggctgctggccgaagccggcgcgccggaggactggcccgggctactgctcgcttcgtcggcggtgagctgcggcgatgctccggcgccgatgattttgtgcggcgaccggctctatctgaatcggatgtggcgcaacgagctgaccgtcgcccgcttcttcaatgaagccaaccgggtgctggagatggatgaggcccggctggcgtcaaccctgaatgccctgttccctgccaccggcgaaaccgactggcaaaaagtggccgcggcggtggcgctgacccgccgcatctcagtgatctccggcggtcccgggaccgggaagaccaccaccgtggcgaagcttctggcggcactgatccagatcgaagacagcccgcgctgtcgtattcgcctggcggcgccaaccgggaaagcggcggcgcgtctgaccgaatcgctgggcgcggcgctgagaaaattgccgctgaccgacgcgcagaaagcgttgattcccaccgaggccagcacgctgcatcgtctgctgggcgcccagccaggcagccagcggatgcgctatcacgccggcaacccgatgcatctggacgtgctggtggtggatgaagcctcgatgatcgacctgccgatgatgtcgcggcttatcgacgcgctgccggcccacgggcgggtgatcttcctcggcgaccgcgaccagctggcctccgtagaagcgggggcggtgctgggggatatctgcgcctgggcgagttcgggctataccgccgcgcgggcgcaggagctgacccggctgaccggttcgccggtaccggcgggcgagggggctatcgcgggcgcgctgagagacagtttgtgcctgttgcaaaagagctatcgcttcggcagtcactccggcatcgggagcctggcgcgggcggtgaacgctggcgcgcgcgcggaggtgaaggccacgctgcgccagccgtttgacgatatcgcgcttcatcccctcagcacgactgaagagtacgaagccatgctcggcgcggcccagcagggctatgaacgctacctgcaactgcgccgcgagcgggccgaaccgcaggccatgctggccgctttcagcgaattccagctgctgtgcgcgctgcgcgaagggccgtacggcgtgagcggcgtcaatgagcggctggagcagcggctcaaccgccagcgagcgatcgccctgccgcgccactcccgctggtatgacggccgaccgatcatgatatcgcgcaacgacagcgcgctggggctgtttaacggcgatatcggcatagcgctggagcgcaacggcgagctgcgggtgtggttcctgatgcccgacggcgccatcaagtcggtgcagccgagccgtctgccggagcatgataccgcctgggcgatgaccgtgcataaatcgcagggctcggagttcgaacacgcggcgctgatcctgccggcgcgcagcgtcccgctggtgacccgcgaactggtctacacggcgatcacccgcgcgaaacggcggttgtcgctctatgccgacgagcaggtgctctcccaggccattgtgacgcgcaccgaacggcgcagcggcctggcggagattttcgccgggcgcgaaacccca

SEQ ID NO: 23947 - DNA, 1251 bp, Klebsiella pneumoniae
atgtcgggaaacaactcaggattaagccgtcgccgtctgttgcagggcgcgggcgccatgtggttaatgagcgtgagccctgtcgggttggccgccgccgcgcgggtggtcgccgttcgcgtctggccagcatcgacctacacgcgtgtcacggtagaatcgaatcatgtgctgaaataccggcagtttgccctcagtaatccggaacgagtggtagtggatctggaaggggttaacctgaactctgtgctgaaaggcatgggcggccagatccgcgatgacgatccctttattaagtccgcccgcgtgggccagtttgatccacaaaccgtgcgcatggtctttgagctcaagcagaacgtcaagccgcagctgtttgccctcgcgccggtggctggctttaaagagcgtctggtgatggacctctaccccgccaacgccaccgatgttcaggatccgctgctggcgctgctcgaggattacaacaaaggcgacctggagcgtcaggtgccgccggcgcaaagcgggccgcagccgggcaaagccgggcgcgaccggccgattgtcatcatgctcgatcccggacacggcggcgaagactccggcgccgtgggaaagtatcgcacccgcgaaaaagacgtggtgctgcagattgcccgtcgcctgcgggcgctgatcgacaaagaaggcaatatgaaggcctatatgacccgcaacgaagacgtgttcatcccgttgaaagtgcgtgtcgccaaggcgcagaagcagcgcgccgacctgttcgtgtcgattcacgccgatgcctttaccagccgccagcccagcggctcttcggtgtttgccctctccactaagggggccaccagtaccgcggcaaaatatctcgcccagacgcagaacgcctcggatctgatcggtggggtcagcaagagcggcgaccgctatgtcgaccacaccatgttcgatatggtgcagtccctcaccatcgccgacagcctcaaattcggaaaggcagtgctggagaaaatgggcaatatcaataatttgcacaagaatcgggtagagcaggcgggctttgcggtactgaaggcgcctgatatcccctccattctggtggagacggcgtttatcagtaacgtggaagaagagcggaaactgaaaacggccaaattccagcaggaggtggccgagtcgatcctcgccgggattaaagcctacttcgccgacggcgcgacgctggcccgccgcgga

SEQ ID NO: 23948 - DNA, 675 bp, Klebsiella pneumoniae
atgaccgggtttgaccgactcagctaccagagccgctggctgcaggtggcgccagagcggaagtttctgctctggctgctgctgatggcgctggcctttacgctgccggcgtggggccaggcgctgacgctggcgctgaccgccgcgctgacctgctggctgctgcgggtctcattctggcgctggtgccgctggatggcgctaccctttggctttttgctggtcggcgtgctgaccattctgttcagcgtcagccgcgatccgcagatgctgttagcgagctttcggctgggcgctttctcgatagggatttccgccccggggctggccgtggccggggagaccttctggcgcagcctggcggcgatggcggcgacgctctggctggtgcttaatctgcctttcccgcagttgattattttactcaagcgcggtcgcgtaccgcggctgttgacggagcagatcctgctgacctggcgcttcatttttattctgttagacgaggcgatggcgattcaccgcgcgcaaactttgcgttttggctatggtagcgtgccgcagggctatcgctcgctggcgatgctggtgggactgctgttcacccgcgtcctcctgcgctatcaacagatgagcacggcgctggatatcaaattgtaccagggtgattttcacctc

SEQ ID NO: 23949 - DNA, 1521 bp, Klebsiella pneumoniae
atgacgctggcagtgatgttgcagggcacggcttccgacgttgggaaaagcgtgctggtggcgggattgtgccgcatttttcatcaggatgggctgcgtaccgcgccgtttaaatcacagaatatggcgctgaactccggcattacgccggatggcaaagagatgggccgggcgcagattttccaggccgaagcggccgggattgcgccggatgtccgcatgaatccgattttgctcaagcccaccagcgaccgtcaggcgcaggtggtgctgatggggcaggtggcgaccagcatggatgcggtgagctatcaccagtacaagccgcgcctgcgcgagcagatcctcgcggtctaccagagcctggccggagagtatgaggcgctggtgctggaaggcgccggcagtccggcggagattaacctgcgcgaccgcgatatcgtcaatatgggcatggccgagatggcgcaatgcccggtgatcctggtggccgatatcgaccgcggcggggtgtttgccgcgatttacggcacgctggcgctgctgcagcctcaggagcgggcgcgggtgaaaggggtgatcatcaataaattccgcggcgatgtggcgctcctgcgctccgggatagagcaaatcgaggcgttgaccggggtgccggtgctgggcgttatgccatggcttgacgtggatctcgaggatgaggacggcgtcgcgctgcaggccgggaaataccatcgcaccgaccggagcgatatcgacatcgccgtggttcacctgccgcatattgccaattttaccgactttaacgccctggcggcacagccagacgtccgggtgcgctatgtccgcgatccgcaggcgctggccgacgccgacctggtcattcttccgggcagtaaaaataccctcggcgatctgtgctggctgcgcgagagcggcatggcgcacgcggtcgagcaggcccggcagcgcaaggtgccgctgctggggatctgcggcggctatcagatgctgggcgaaaccattatcgatgaggtggagtctggccttggcacccagcccgggctgggggtgctgaagaccgtgacccacttcgcccagcacaaaaccaccacccaggtgcaggcgaccctggggtctgcgctcccggattggttagccgacgcggcggggctgcgcgtcagtggctatgaaattcatatgggcgagacgcgccgcgaggcaggctgcccgccgctgctgcagctgcataaagcggggcaggcagtggacgacggggcgataagcgacgacggcctggcgttcggcacctatctccatggcctgttcgacagcgatgcctttacccgggcgctgctcaacggcctgcgccagcgcaaagggctggcgccgctggacagcgccctggagtatgcccgctataaaacccggcagtttgatcggctggccgaggccatgcgcgaacatatcgccatcgataaaatttacgccatcatgcgccaacatcaggagcccctatgc

SEQ ID NO: 23950 - DNA, 2235 bp, Klebsiella pneumoniae
atggttgcggtaagaagtgcacatcttaataaagctggtgaatttgacccgaagaaatggatcgcgagtctgggaatttccagccagcagtcgtgtgagcgcttagccgaaacctgggattattgtcgcgaaaaaacgcaaggacacccgcaggcggacctgctgctgtggcggggcgtcgaaatggtggagatcctctccaccctaagtatggacatcgatacgctgcgcgcggcgctgctgttcccgctggccgacggcgaagttgtcagcgaagaggtgatgcaggagagcgtaggtaaatcggtcgtgaccctgattcacggggtgcgggacatggccgctatccgccagctgaaggctacccataccgactcggtctcttccgagcaggtggataacattcgccgtatgctgctggcgatggttgacgatttccgctgcgtggtcatcaaacttgctgagcgtatcgcgcatctgcgcgaggtcaaggacgcgccggaagatgagcgcgttcttgcggcgaaagagtgcaccaatatctatgctcccctggcgaaccgcttaggtatcggccagctgaagtgggagctggaagattactgcttccgctatctgcacccggcggaatacaagcgcattgccaaactgctccacgagcgccgtatcgaccgcgagcattacatcgaagagtttgtcggccacctgcgttcagagatgaaagccgaaggcgtcaaggcggaagtctatggccggccgaagcatatctacagtatctggcgcaaaatgcagaaaaaacacctcgctttcgacgagctgtttgacgttcgcgcggtgcgtattgtggctgagcgtttgcaggattgctatgccgcgctggggatcgtccatactcactaccgccatctgccggatgaattcgacgactacgtggccaacccgaaacccaacggttaccagtctatccataccgtggtgctggggccgagcggcaagacggtggaaattcagatccgcacccggcagatgcatgaagacgccgagctgggcgtggccgcacactggaagtacaaagagggcgcgggagccggcaccagcggcggccgcggctatgaagaccgcatcgcctggctgcgtaagctgattgcctggcaggaagagatggccgactccggcgagatgctcgacgaagtgcgcagccaggtcttcgacgaccgggtgtatgtctttacgccgaaaggcgacgtggtggacctgcctgcggggtcgacgccgctcgactttgcctatcatattcacagcgatgtcggccatcgctgcatcggcgccaaaattggcggccgcatcgtgccgttcacctaccagctgcagatgggcgatcagatcgaaattattacccagaagcagccgaacccgagccgtgactggctgaaccctaacctcggctatgtgaccaccagccgcggacgttcgaagatccacgcctggttccgtaagcaggatcgcgacaagaacattctcgccggtcggcagatcctcgacgacgagctggagcatttgggcatcagcctgaaggatgcggaaaagcacctgctgccgcgctataacttcaacgagctcgatgaactgctggccgccatcggcggtggcgatatccgtctcaaccagatggtcaacttcctgcaggcgcagttcaataaacctagcgccgccgagcaggatgcggccgcgctgaagcaactgcagcagaaaacctacacgccgcaaaatcgcaccaaggacaatggccgggtagtggtggaaggggtaggcaacctgatgcaccatattgcccgctgctgccagccaatcccgggcgacgagatcgtcggctttatcacccaggggcgcgggatctccgtgcatcgcgcggactgcgatcagctggctgaactgcagtcgcatgctccggagcgcatcgtcgatgcggtatggggcgaaagctactcggcgggctactcgctggtggtcagggtggaggcgaacgatcgcagcggtttactgcgcgatatcactaccatcctcgccaatgagaaggtgaacgtgctgggcgtcgccagccgcagcgatacccgtcagcagctggcaaccatcgatatgaccatcgagatttacaacctgcaggtgctgggccgggtgctcggtaagctcaaccaggtgccggatgtgatcgacgcgcgccgtctgcacggcggt

SEQ ID NO: 23951 - DNA, 795 bp, Klebsiella pneumoniae
atgactcaaattgaccgcttgctcggcatcatgcgccgcctgcgcgacccggaaaacggctgcccatgggataaagagcagacctttgccactatcgccccttacacccttgaggagacctatgaggtcctcgatgctatccagcgggaagattttgacgatctgcgcggtgagctgggcgatctgctgttccaggtggtgttctatgcgcaaatggcgcaggaagagggacgctttaactttgacgatatctgcgccgccatcagcgacaagctggagcgtcgccacccgcatatcttcggcgaggcatcggcgggcaatagcacggaagtcctggctcgctgggagcaaatcaaaagcgcggcagcgggcggaaaaagcccagcattcggcactggacgatattccccatagcctgccggcgctgatgcgcgcgcataaaatccagcgccgctgctcggcagtgggtttcgactggacctcgctgggcccggtgctcgacaaagtgcatgaagaaattgatgaagtgatgcatgaagcgcagcaggcggtggtggatgaagcgaaactggaagaggaagtgggcgatctgctgtttgccacggtgaatttatcccgtcatttgggcgtcaagccgaggtggcgctgcagaaagcaaacctcaaatttgagcgtcgtttccgcgaggtcgagcgtattgtcgccgcccgaggcctggaaatgaccggcgtcgacctcgataccatggaagaagtgtggcaggaagtaaaacgccaggaaactgatctctaacgg

SEQ ID NO: 23952 - DNA, 228 bp, Klebsiella pneumoniae
atgaaaatgactaaggccgctgcgattatctctgcctgtatgctgactttaggcctgagcgcctgttcctctaactatgtgatgcataccaatgatgggcggaccatcgttaccgacgggaaaccgcaaaccgataatgacactggcatgatctcgtataaagacgcgtggggcaacaaacagcagatcaatcgctctgacgtgaaacaactgggtgaactggacgag

SEQ ID NO: 23953 - DNA, 8634 bp, Klebsiella pneumoniae
gccgttggccggccagcacccggcgccagtacggcggctctgcaggatgtgcgcagtacgctgagtaacgcgctgaccgccgaagcgcaggcacgcagcacgctggcggcgcagatgcgtggctcctatgatgggaacgatctggagaaagtcacctccgggctgctgtaccaggaaaaaaccgcgcgcgttaccgccatctcggcggaagttaaggccagagagtccctgcagacgcagtttaacgacaacaaagctgctgtttctggtgaactgagttctctgacgacagagcagagcgcgcaggcgagccgtatcggtggcctggaaaccagcctcgggaaaaaagccgatgcggccgcgctgacgtccctgacgcagaaagttgagcaacagggcgccacgctgacatcgcagggcgccgcgttaacatcgctcactaaccgggttggccagacggaaacgggcctggctggtacgaatgaagcactgagcgggctgcagtctgttgttacccagcagggcgacaggataaccagccagggtcagtccatcacgaaactgacgagcgatttgggcacgacaaatgccgcgctggcgaagaaagccgaagcggctgcggtcactgccttaacgcagcaggtagagcaaaacgggcgggatattcgcagcaatactgacagcatcaccagcctgtcgaatcaactggtcaatggccagccgaatcgctggtcccgtcggatctatccggtgcagctggctaacgccgggacagtcccgtcattcagcgatgttcgcgctgtggcaccaacggtagtggatgaggtggccgacgcggccaaactggactttacgtccgccggcagctatctgatcgcgctgtattcctgccaggtgaaagtggccgcagataccaccatcacactggcgcccggcgccagggtttttgatgataccggcgccatatttgtgaatggggttcaggtcgcctggggtaacgccagctggaataccgtcagttttgaactgaaagtcggctggaacaccgttgagtttctggtgaatcagtggaccggccaggcgtatatcaacctgggcctgaagctgtcagacaaggttgctgagatgtactccggtctcggggtttccgcgctggcaaacgcagccggcgtgctcagctcgaatgtcagccagattggcaacgaggtggtcagcaattcgcagagcatcacccaactccggaatgcgctgacgcagacagacgcgaacgtggccagcaaagcggatcagacggcgatgaactcgctaaccggacgagtggagaagacggaatccgggctgacggctgctaacgccaacattacctcgctgaaatccgctgtacgggccggaaacgcatcaggcggagatttaattcccaacccgacatttgacccggcttacgaccagatggggtttagcgtcgtatccacgacggctgaggaggtccctcctggttgcccgtatggttatgcggccagaattgccagccgggatcaccatcctaactttgccgcgttcccggccacgcttaacgatgtgattgagatcagcgcactggttgcctgcggcgccggcacggcgaattttaatctgtatgttggcaccgccgttcggccagatacgagcaccggtgcgccactcatggcggggggcggaaaatcaccttccgcgacctggcagagaaccacctggcgcttcaaggtcacgcaggcgatggtagacaggggttatatccgcccgttcctgcagatctcgcagaacagcccgtatggcaccgtatggttcgttacggactggcatatgcgaaatgtgacagcggcgcaaaaggttcaggatactgcggatgccacggcggcggcggttgactcgctgaccaccaccgtgacgcaacagggtaatctgctgacctcgaccggcaaccggacaacccagctggaaaacgggctggcaaccaccaatgccgcagtggccaaaaaggctgatgcgacagcggtgcaggatttgaccaataccgtcacacagctgggcaacgatctgactgctgcgaacagcgccatcacgaaactgaccggaaatctggcgaataccgataaagcgctggcgcagaaagccgatgcgactgcgctggccacgctcgacacgaaagtgacgcagcagggtaaaacgctggagagccagagcaattcgctgacgaatctgtcgaacagtctctcgcaggttgcggcagatatcgatgccagcggtcagataccgggtaacctggtcgtgaatccatcatttgaacgcgggctggatggttataccgggcggtcaaccgcgaccagtgtggtggaggtttccgctcctcacagcgggacgcgggcgctgaaggttgatccggggagcgtgtctccggggcaatacatcccgtttgttcaggggcgaacctatgaaatcggggtgtgggtcaaggaacccggagcgacgacggataatggcgcggggaacaacaagttgcggatcggtaactctgccggccagccggtctttgagcgtccgtacaacagcggcacggtggggacaaactggaccctggtttccggtcgctggaaagcgacggagacagccagcctgccggtgacgctgagcaactatctgattagcggcagccgctacttcgatgatttttacgtcactgacgttaccgaccgggtggacatcgatgccaccgccggcgccgttaccggactgacgagccgggtcagcacagcggaaggggctatcacctcgcaaagccagcagctgacgaacctgcagaacagcctgaacacgaccaacagcaatgtgtcgaagaaggccgatgcaacggcactgacttcggtcgataaccgggtaacagaggcggaagggaaactgaccacacagagccagcagctgacaaatctggcgaatgtgctgacggccacccgcaacgctggcgacaacctgatcccgaactttgattttctacagggcagcactgcctgggatattcagtatccagccggtgtgacctttggcgatttcggggacgggaaagcgggggtccggctgaaccggacgactaacaccagtccggggatcttctccaacaacaacaagccggtgccgctgaatggccagcgcaagtaccgcgtggtggtgaaggccaaaggtgtttccggcgcgatgagtctgctgatccgtcgccagaacaaaatcggccagacggacagtacgtatgaggataaaacggtcacgctgaccactgactggcaaaccatcacctgggaaaccggattgacggctgccggcgcggacgggcagaacttcaaactttattctcatccgacaaacggcgaaatctggctcgattccgtccgggtgtttgatatcaccgatgaaaccaacatcaaggcgaccagcgatgctgtttcgtctctgaccgggacggtgacgaaccaggggaacaccctgacatcacaggggcaatccatcacggcgctgaataacgcgctggaaggggtcaaaggcgatgtggcgaagaaggctgatgcgtcggcggtcagttcactgaccaaccgggttacccagactgaaaaggatatccgtagccaggccgacagcctgaccagcctgaatacatcgctgaagcagcaggcgacacggggagccaacgtactgccggacggcagttttgaatcctatgccgtcggcgatgttctcagtaatgcccgcgccgttatcaccagtgaagctgcgcacagcgggaccaaaagcctgcgtgttacgcgcagtacggagtacaacccgaacgcgacggataataacgatacccatatcttttcaggcatgcaggttcgcgataacgcggtctattacgtggaggcgtgggttaagttgccggctggctcgaccgccgatccgaccgtttatatggtgctcggattttccttccaggattctgccaatggctggtcgtggcctggcctgaacgtgaaagtctccgagttgtcggtggacaactggacaaaagtcagtggctatctgaccaacaaccgaaccgcgctgaaacaggcaatggtgaggatctccatcccgaatacaccaaaagttcgcctgggtgacgccttcctgattgatgatctgatcatcactgacgtgaccgatgcgaaagcggcgctcgatgccgccgatgcgaatgcgcaggcgctttccagtctgtccgcgtcagtcacgcagaacgggaagaatattacgtctcagggcagcgcgatcacgaaactgcagtcggatgtgacgcaactgggtaaggatatcagcggcaaggccaatgccagcgcgctgacgaatctgacgacccgcgtgacggctaccgaaggcggtctgaaatcgcagggagacagcctgaccagcctgcagaacagcctgaacacgactaacagcaatgtagcgaagaaggctgatgcaacggcgcttcagagcctgcagaacaccgttgaacagcatggcagggatctgaccacgcaaagcagcgcgctgacgaacctggaaaacaacttttcctccctggccgtgggagggaccaatcttatccgcaatgcggacactctggagggatggagcagccgccacgccacagaaacctatctggacgaccgcgtggcctatacccggctggcgaaaggtgcatccggttatacccagctggatgaacagacgctggacgttaccgggcgtacggaatttgtattcagtttctatgcgaaaggggcttatgacgggcaggagatggcgagttatttctataacccgtcgaacaccaccaccacggaaaccagccagggcgttaaaggcggggccggtgacggcaaggcggtcacgaaactgaccaccgcatgggcgcgttactgggtgaaatgggttattcctgccaccagtggcaccaaacggctgattgccgcgcgtctggaaagcgcgacgtctgccgacaaagaagtctggctctgccgccctcagctggaaaccgggaccgtgatgaccgactggtcaccgagtccggatgatgcggccagcggtattaccgcgaacacatcggccattaacagcctcaccagtcgggtgacgaatgccgaggggcagctgaccgcgcagtctcagagcatcacgaatctgcagaacagcctgaacaccaccaacaacaacgtggcacaaaaggccagcgcgcagtcggtgagtgatctcaccagccgggtcaccagtgcggaaggcaaaatcacctcccaggggcaggctatcacgaagctgcagggcgatttgagcagcaccaccgataaggtcaacaccaaagcggatcagacggcgcttaacgcgctgactggccgggtggagaaaaccgaggcaggcctcacggcagccaacagcaacatcgtcagcctgacggcggcggtgaacgccgggaatgctgccggggatgattacatcccaaacccgtcatttgatccggcgtatgaccgcatgggttatgacgtggtggagaccaccgccgatggtgtgccggctgactgcccgttcaggtatgccgtccggctggccgggcgagaccatgtgccaaaaatcaacaatatcgccgtgacaccgggcgacgttttcgaaatgtctgctctggtagcgtgtggtaccggcagcgctgactttaacttctatatcggtcgggccactaccgccaccggtggcatcggagcgaaagcgtccgggggcaacaccaggaccacctccgcgtggaaacgagccacctggcgctttacagtgccatccgataccagcttgctgcggccgttcctgcaggttaatcagagcagcccgttcggcaccgtctggtacgctgccgactggcatatgcgtaacgtgacggcggcgaacagtgcgcagaaaaccgcagatgtgactgcaaaagcggtggattcactgaccaccacggttagccagcagggcgatacgctcagcagcatcggcacgcggaccacctcgctggagaacagcctccggtcgacaaacgatacggtgagtaaaaaggctgacacgacagcggtgacgcagctgcagggcacggtgacgcagcaggggaatgacatcgcggcagctaacagcgcgctgacaaaactcagcagcgatctggccacgacgaatgcgaacgtgaacaaaaaagcggatgcaagcgcgatgaacaccctgcagaaccaggtcacggagcagggcaaaacactcagtgcgcagggggattctctgacgcaactgagtaacagcctgagccagacggcagcggatattgacgccagcgggaaaataccggacaacctcattgtcaacggcagttttgagcgcggcgcggcgggctttaccggctggagcagtaccgcgacggtggccgatttacaggttccgcactcgggtaacaaggcgctgaaaatgtccgccggccagtcgaacctggtcggacaggaaatcagtatcacgcagggccgtacctaccgcatgggggtatgggcgaagcaggactcggggaccacgattaaagatgcgggtaacacgaagtttcgtgtggccgacagcactggcctgctggtcggctcaaactacggaccgtttagttctggctggcaactggtaacgtttgactggaaagccacgaagaccacgacggccagtttccagctgacgaccttcctcagcgcgggggccatgtattttgatgatttccatgttctcgatgttacggatgaaaaggatatcgcggctaatgccggggccatctctcagatgaatacccgcgtcactgcagcggaaggggctatcaccacccaggcgcagcagctgacgaaactcagcggcgatctggccgtcacgaatgcggcggtcagtcagaaagctgagcaaagcgctgtaaccgggttgaccacccggatgacgtctgccgagggtaaactggattcgcagtcgcagcagctcaccagtctgcagaacagcctgaccacgatgaatactgagctgggtaaaaaggctgacacgtccgcggtgagttcactgaccggtcgcgtcagccaggtggaaaacaccatcaccagccagtcgcagagcatcacgtcgctgaccagcaccatcaataccatccgcactcagggagctaatccgtgggttgacggtacgtttgaaagctacagcgatggccaggtgctgggcgggaacggcaccgccgttgtggtggcgtctcggaaattcaccggcggtaagagcctgaagttgagacgggatgagaacaacagcggcaacagtgataaacagcttggcacctggcagtcagtccgtgaggacgcgaagttccggtttgagttctgggccatgatgccggcggatcaggcgccctcctccgggtggacaacgctggtcggtatccagtcgcagaatgctgccgggcaaaatgcgtggcaggcggcggtcactgtcagcgaagcctctctgggcgcgcgcgataagtgggtgaaattcacgggtatcgccagtaacaacggagcaggcagaacacgtgcggtggtctggatctccactcgtggcgccaccggcaacggtacccctggctattcactgtatatcgacgatctggtcatcacggatgttaccgatgcgaaagcggcacaggatgcctctgacgcgacggcgagcgccgtgagcggcctgacggcgcgcgtaacggatgccgaagggaaaatcactgcccaggcgcagcagcagacggcactggccacgaaagtggataacgccaactcccgcgtcgataacatggcgaagacgctgagcgacagccagagcacacaggccagcctgaatacctcgcttcagtcgcagattgacgcccaggcggccgccaacatcaaaaaccagacgacgctggacaacacgattaaatcggtggccagtatcaccagtacccagcagacgcatgcaacggcactggaggcgctggcaacgcagcagacgaccctgacatccagtgtcggggatctcagcgcttccgttcagaacaccgctaaaactgtggcggatgtgaatggtacggtgagttcgctgtggtcgatgaaggttgagacggttaacgggaagaatgttggcgcggggattacgctgggcagcaatggtcaaacgagcgacatgatcctctacgccgaccgcttctcgctgtttaaccgtaacaatgcgacggcagtgccggtgatgattgccgaaggcaatgaactgtatatcgatacggcacgtatcaaaaacagttccctgacctcaaccaaatcgcggacggttccatcacgaacgcgaagatcggcaacgagatccgctcgaataactttgttgacgggtcgcaaggctggcgtatcgccaaggatggctcttcgcagttcaataacgtgatcgttcgtggcagggtcgaagcgaatagcggcgtgttccgtggcactgtccaggcggatgcgttcatcggtgacattgcggtggcaaaaggttacgacagcctgaccttccgccgcaaccagacggtacagcgga

SEQ ID NO: 23954 - DNA, 1587 bp, Klebsiella pneumoniae
atgacccacccgctattagctatcgacaatctctctattgcctttcgccagcagggtgagacgcagaccgtggtgcacaatctgtcgctcgaggtggcggtcggcgaaacgctggccctggtgggcgaatccggctccggtaagagcatctccgccctgtcggtgctgcggctgctccctaccccgccggccagctaccccagcggtgacatccgttttcatggccagtcgctgctgcatgcggatgaggcgaccctgcgcggcgtgcgcggcaaccggatcgcgatgatctttcaggagccgatggtatcgctcaatcccctgcacaccctggaaaaacagctctacgaggtgctgtcgttacaccggggaatgcgcaaacaggcggcgcgcggggagatcctcgactgcctcgagcgcgtcgggatccgtcaggcgccgcggcggctggcggactatccgcatcagctctccggtggagagcgccagcgggtgatgatcgccatggcgctgctgacgcgcccggagctgctgatcgccgacgagccgactaccgccctggacgtatcggtgcaggcgcaaatcctgcaactgctgcgcgagctaaagcaggagctgaacatggggctgctgtttatcactcataacctgagcatcgtccgccagctggctgaccgggtggcggttatgcagaacggccgctgcgtggaacacaatgactgtcgggcgctgttcagcgcgccagcgcatccctacacccaacgcctgctggatagcgagccggacggggagccggtgccgctggccgccgatgccccggtgctgctgcaggcggacgatttaaaggtggcgtttcccgttcgcaaagggatcctgcgtcgggtggtcgatcatcatcgggtggtcaacagccttagctttcagctgcgcgccggcgagacgctgggcctggtgggggaatcgggttccggtaaaagtaccaccggcctggccctgctgcgcctgatcccgtccgggggcaagataaccttcgccggccagccgattcagggccgtaaccgccgacagctgctaccgctgcgccgacagatgcaggtggtttttcaggatccgaactcgtcgctcaatccgcgcctcacggcgcagcagatcattgaggaaggcttgcgcgtccaccagccgacgctgacggcggccgaacgcgaacaggcggtgatccttgccatgcaggaggtcggcctcgacccggccagccgccagcgctatccggcggcgttctccggtggccagcgacagcgtatcgccatcgccagagcgttgatcgtcaaaccgcagctgatcgtcctcgatgaaccgacctcatcgctggacaaaaccgttcaggcgcagatcctgaacctgctgaaagccttacagcgaaagcatcagctggcctatatttttatcagccatgatttaggcgtggtgcgggcgctgtgtcaccaggtgatggtgctgcgtcagggagaggtggtcgaacagggcgagtgcaagtccgtcttcagcgcaccccggcatgagtatacccgccagctgctggcgctaagc

SEQ ID NO: 23955 - DNA, 1803 bp, Klebsiella pneumoniae
atgtatgcgcgcctctttctgattctgctggctctgtttagcctggacgctaaggcgcaaaccattcaggaaagcgtagccttcgcgattatcggcgaaccgaaatacgccgccggtttcagtcattttgagtacgtcaatcccagggcgccgaaaggcggcaccctcaccctggcggcgatcggcacctttgataacttcaaccgttatgcgctgcgcggcaaccccgcggtacgcacggaggcgctctacgataccctgttcaccacctcggatgatgagcccggcagctactacccgctaattgccgagcgggcgcgctatgccgaggactattcctggatggagatcgcgctcaacccccgcgcccgcttccatgacggcacgccgatcaccgcccgcgatgtggcgtttaccttcaacaagtttatgaccgaaggggtgccgcagtttcgcctgttttataaaggcaccaccgtgaaggccatcgcgccgttgaccgtgcgtattgacctcggccagcccggcaaagagaacatgctgagtctgctgagcctgccggtgatgcccgaggcgttctggcgccagcacaaactcagcgacccgctgtcgaagccgccgctggccagcgggccataccgcatcagcgcctggcgaatggggcaatatattacctattcccgggtcgccgactactgggcggccgacctgccggtcaaccgcggtcgctggaatttcgatacactgcgctatgactattatctcgacgacaatgtcgctttcgaagcctttaaagcgggagccgtcgatcgccgggaagagaccgtcgccaaaaactgggctacccgctacgtcggtcgcaacttcagccgcggctacatcattaaagatgagcataccaatacctcggcgcaggatacccagtggctggcgttcaatattcagcgcccgatttttgccgatcgccgggtgcggcaggccattaccctggcgttcgatttcgaatggatgaacaaggcgctgttttacagcgcctatcagcgcgccaacagctatttccagaacaccgaatatgccgcccgcagcctgcccgacgcagccgagctggccctgctgacgccgatgaaaaacgaactgccctcggagctcttcagccaggtttaccagccgccggtctcccgcggcgatggcttcgatcgcgccaacttactcaaagccgacggcctgctcaatgcggcgggctggacggtgaagaaccagcgccgggtcaacgccgccaccggcaagccgctgcgctttgagctactgctgccggccgggggcaatgaccgctgggtgctgccgtttcagcacaacctacagcgtctggggatcgtcatggatattcgtcaggttgataattcgcagtacagcaaccgccgccgcagccgggattacgacatgatgccaagcctgtggcgcgccatgccctggccggggaccgacctgcaaatctcctgggcgtccgactatattcactccagctacaacgcgccgggggtgcaaagcccggtagtggataagctgattgcgcagatcctgcagtggcagggcaataagcagaaactgatccctctcggtcgggcgctggatcgtgtgctgacctggaataactacatgttgccgatgtggtatatggcgcaggaccgcaccgcctggtggaataagttctctttccccgcgacccgccccatctattcgtccggcctcgatacctggtggtacgacgtgaacaaagcggccaccctccccgcggacagacgc

SEQ ID NO: 23956 - DNA, 1768 bp, Klebsiella pneumoniae
atgaccgttgccattaccgatgtcgtcctgcgcgacgcccaccagtccctgttcgccacccgtctgcgtctcgacgatatgctgcccgttgccgctcagctggacgacgtcggctaccactcgctggagtgctggggcggcgccacctttgacgcctgcatccgcttcctcggcgaggacccgtgggtccgcctgcgcgagctgaaaaaggcgatgcccaagaccccgctgcagatgctgctccgcggccagaacctgctcggctaccgccactacgccgacgacgtggtggagcgcttcgtcgagcgcgccgtcaaaaacggcatggacgtcttccgcgtcttcgatgccatgaacgacccgcgcaacatgcaggccgccctgcaggcggtccgccgccacggcgcccatgcccagggtacgctttcgtacaccaccagcccggcccacaccctgcagacctggctcgacctcaccgaacagctgctggagaccggcgttgactccgtcgccatcaaggacatgtccggcattctgacgccgcatgccgcctttgagctggtcagcgaaatcaagaagcgctatgacgtcaccctgcacctgcactgccacgccaccaccgggatggcggagatggcgctgctgaaggccattgaagccggggtcgacggcgtggatacggcgatttcgtccatgagcgccacctatggccacccggccaccgaagcgctggtggccaccctcgccggcacgccgtacgacaccggcctcgatatccacaggctggagagcatcgccgcctacttccgcgaggtgcgcaaaaaataccacgccttcgaaggccagctgaagggcaccgacagccgtatcctcgtcgcccaggtgccgggcgggatgctcaccaaccttgaaggccagctgaagcagcagagcgccgcccaccgtctggatgaagtactggcggaaatcccccgcgtgcgcgaggacctcggcttcatcccgctggtcaccccgacctcgcagattgtcggcacccaggcggtgctcaacgtgctgggcggcgagcgctacaaaaccatcgcgaaggagaccgccggtatcctgaaaggcgagtacggccgcaccccggccccggtgaacgcctgccctgcaggcgcgggtgctcgacggcgccgacccggtgacctgccgcccggcggatttactcaagccggagctggccgcgctggaagccgacgtcagacgccaggcgcaggagaagggcatcacgcttgccgaaaacgccatcgacgacgtgctcaccgtggcgctgttcccgcagcccggcctgaagttcctcgaaaaccgccacaacccggcggcctttgagccggtaccgcaggcggaagccgcacagccagtggcaaaagcagaaaaacctgccgcctccggcgtctacaccgtggaggtggaaggcaaagcctttgtggtcaaagtcagcgacggcggtgacgtcagccagctgacggcggctgctcctgcctctgcacccgccgctgccgccccggccggcgccggcaccccggtgaccgccccgctggcgggcactatctggaaggtgctggccagcgaaggccagacggtggccgcaggcgaggtgctgctgattctggaagccatgaagatggaaaccgaaatccgcgccgcgcaggccgggaccgtgcgcggtatcgcggtgaaagccggcgacgcggtggcggtcggcgacaccctgatgaccctggcgtaa

SEQ ID NO: 23957 - DNA, 1059 bp, Klebsiella pneumoniae
atgatgctggagctggactttacccagaccctcggtagccactgcctgcagatccgtgaaactctgcccgccagcgggatcaccgccgtctttggcgtctccggcgctggcaaaacctcgttgattaacgccatcagcggcctgacccgaccccaggcggggcggatcgtgctcaatggccgggtgctgaacgacaccgcgcagcgtatctgcctggcgccggagcagcgccgtatcggctatgtctttcaggatgcgcgcctgtttccccattataaagtgcgcggcaatctgcagtatgggatggcgaaatccatggtcagccagttcgataagctggtggatctgctggggattgcgcccttgctggatcgtctgccgggccggttatccggcggcgaaaagcagcgagtggctatcggccgcgccctgctgaccgcgccagagctactgctgctggatgagccgctggcctcgctggacattccgcgcaaacgcgagctattgccctacctgcagcggctggcgcaggagattcatattccgatgctctacgtcagccactcgctggatgagatccagcatctggccgatcgtgtgctggtgctggaggccggtaaggtgaaggcttttggtccgctggaggaggtctggagcagcagcgtgatgcacccctggctgccggcggagcagcagagtacgatccttagcgccaccgtcgccgcgcagcacccgcagtatgcgatgacggccctggcgctgggggaccagttgctgtgggtcaaccggctcgaacgtcccgcaggcgacaccgcacggatccgcattcaggcgtcggacgtttcgctgacactggcccagccgtccgggaccagcatccgcaatatcttgcgcgccgaggtggctcagtgtctggaggtcaacggacagattgaagtgcagctcagagtgagtgaccgtctgctatgggccaggattagcccatgggcgcgggacgacctggcgatagcgccaggtcagcaggtgtttgcccagatcaaaagcgtgtcgatcgccgcc

SEQ ID NO: 23958 - DNA, 771 bp, Klebsiella pneumoniae
atggcaggttcttggttacgcggggttgtcggggtatcactcacgctgtgcgtcgcgggtcaggcgctggcggcagagggtaaagtgaccgttttcgccgccgcatcgttaaccaacgcgatgcaggatattgcccaggcgtacaagaaagaaaaaaacgtcgaggtcgtgtcgtcgtttgcctcgtcgtcgacgctggcgcggcagatagaagcgggtgcgccagcggacctgtttatctccgccgatcagaaatggatggattacgcggcagataaaaaggccatcgatccggcaacccgcgccactctgcttggcaacagcctggtggtggtcgcgccgaaagccagtgcgcagggggcgataaccattgatgagaaaaccgactggaccagcctgctgaaaggaggccgtctggcggtgggcgatccacagcatgtcccggccggtatctatgccaaagaagcactgcagaaactaggtgcctgggagacgttgtcgccgaagctcgccccggctgaagacgtgcgcggtgcgctggcgctggtggagcgcaacgaagcgccactggggattgtctatggctccgatgccgtggccagcaagggggtgaaagtggtcggcaccttcccggaagcctcgcatcagaaagtcgagtacccgctggcgattgtcgatgggcaccgcaatgcggccgtgagcgccttctatgactacctgaaagggccggaagcgtccgctatctttaaacgttacggatttaccacccgc

SEQ ID NO: 23959 - DNA, 273 bp, Klebsiella pneumoniae
gtggcttccatctccatcagttgtccctcctgctcagctactgaaggcgtggtgcgtaacggtaaaagtactgccggacatcagcgctatctctgctctcactgccgtaaaacatggcagctacagttcacttacaccgcctctcagcccggtacgcaccagaaaatcattgatatggccatgaatggcgttggatgccgggcaaccgcccgcattatgggcgttggcctcaacacgattttacgtcacttaaaaaactcagaccgcagtcgg

SEQ ID NO: 23960 - DNA, 2484 bp, Klebsiella pneumoniae
atggatacctcttcaataattaccggcaccacccttaaccgttaccagctggatattccttcatgtaccgcatcgctggatgtggaagaattcagtggggcagaaaaactgagtgaactttattattacactattacgtttaccagcgcagagaaaaatattgatgccgcacagctcctgagcaaacccgccatgctgacgatgggcggcggcgcactgcagcagctggcggactgcaaacgcgtccatggcgtggtgactgccttccggcgtatcagcagttcagaagatcagtcgaaatatcagataaccctcgaacccttcctctccttactggataaacagtttcgcagccaccgttttttcgtcaacaaatcggtgccggaggtggtggagcaggtattgcaggaacatcacctgcatgactgggagtatgagtttaatctcaagcaacactatccgcggcgcgagcaaattaatcagtatcaggagagcgacctggcatttatccagcgcctgctggcagaggtggggatattttatttcttcaccctgcaggaagaggcgcagagcgaagtggttcacttcgccgacgcgcagcgggcgctgatgttcgataaaacacttcctgtaaacagcccgtccgggatgagcgacagcggtacggaatcgatatggggtctgagcatcacgcacaatgtcgtagaggcgaacgtcactacccgggattataacccccgcgatgcgcagagcgttctccagtcggcaacagcggatatgacccggggaaatggggaaggcatcacttacggtgaggtataccactataagcttcgccaccgggagcgtggcgataaaatcgacccgcagacggagaccgccaacttctatgcccgcctcgaccatgagcgttttctggctcaccagacgcttattaccgcgatcagtactgcagcctggctggcgccggcccaggtgctgaccgttaccgacagcctgccgtcgaccctgcctgcgcccgtacaggatccgctgttaatcaccggcaccggttttaccgccagccgccgggaggcgctgcgggtgtccctgcttgcggtgccctacagcgaaacattgtgctggcgtccgccgctgctgccgcgcccgaaggtgactggcaccatgacggcgcgggtgaccagcgcgaaagcgaatgatatctacgcttggcaggatgcgtccggcctgtaccgggtgaaatttgaccctgacagagatgagaaagggcagggtcaggaaagcatgccggtgcgtctcgccaaaccctacggcggcgacgtgtacggttttcacttcccgctgatccagggcacggaggtggcgattgctttccacgaaggcgaccctgaccggccgtatattgcgcatgcgctgcacgactcgcggcatgtcgatcctgtgacggagaaaaacagcacccgcaatgtgattcgtactccggccaataataagctgcgaatggaggacaagcgcggcgaggagcatatcaagctcagcaccgagtacggcggcaagacgcagctgaacctggggcataacgtgaatgcgcaaagggagttgcggggcgagggtgcggaactgcgtacggataaatgggtgagcatccggggcggtgcgggagtgtttatcagtgcggataaacagccttcggcaggcgacaggatgctggcaatggaggaggcgattgcgcagcttgaaaatgccctgggtattgcgaaaagcctggcgtcggcagcggaatcggctcaggccctgccatcggataccggcaaccagcagacgctgaacgatgcgctgaaagagctggcgcagccggggatagtgctgaatgcgccgcagggcgtgagcatcagcagtccgcaggcggtacggttgtcttcgggtagcgcctgcgtggggattgtgtcacagcagaatacggacattagtgcgctgaaacgttttacggtggcggcgggagaagccgtcagcctgctggcgcgaaaggcggggatgaagctgtttgcggcgaagggaaagattgaaatccaggcgcaggatgatgcgctggaggcgacggcgaaaaaggatatcaccgtgaccagcgtggaagggcgagtggaaatcacggcggcggaggaactggtggtgaattgtgcgggagcgtatatcaggctaagtggtggcaatatcgagctgggctgccctgggaatattctgctgaaatcggccaatgtgcagaaaatgggtaaggcggattttcgggtgcctccgctggaactgcctgaagggttcgaagagcgttttactgtcaaagatcaaaagaccggtgacattgtgccatttgcccgttaccgcatcaccactgaaaaaggccaggtattcgaaggccgggcagatgctgatgggaaaacggccagcgtttataccgcattgcctgaatcaataaaaatagagctactg

SEQ ID NO: 23961 - DNA, 1099 bp, Klebsiella pneumoniae
ttccgtggtcgatgtactatctcaacggcctggacaatagtctgatcctggtctccaccctgccgttgaaggacctctcttcgagcttcaaagagtcaacgatcagcagcgtcgtggagtcacggcgcgcggaaatgctgctgcaggctaatacccttgatgagcgcgagacgttctcgccgttgcgccatctcgcctggcagaacgcgcactattttacgttacgcaccaccttcaaccagcccggacaccttgccacggtggtcgccttcgacctgccgattaacgatctgatcccgcccggcatgaccatcgacagcttccgtatcgagcctgacccgtcgcaaaatctcgccaccacgccggataaagagagcgccgatcatatcgggatcacctttaacggcatgcagattgacatcgccaccgacatcagcactaccggtatgcagttgctgtggacggtaccaatgagcaccatgctgctggagtccatgcagaacattcttctgccgctgctgctcaacattggtctgctggcgctggcgctgtttggttttaccacctttcgccactataaaggacgcagccattcgtctggcgccgggctcccctccgccgccaacagcgaactgcgtctgctgcgcgccattaacgaagagattgtttctctgctgccgctggggctgctcgttcacgatcaggaagccaaccgaacggttatcagcaatccaattgccgaccatctgcttccgcacctgaatctgcagaacatcaccaatatggcggaccagcatcagggggtaattcaggccaccgtcaataatgagcagtatgaaatccgccagtatcgcagccaggtagcgccgcgcacccagatcctgatcatccgtgatcaggaccgcgaagtgctggtcaataaaaagctcaagcaggcccagcgcttgtatgagaaaaaccagcagggacgggcggcctttatgcagcacatcggcagcgccctgaagcagcccgcgctgacgctggcggcagaggcggcggcgctcagtagtacagagaatcggacgctggcccagcatgccgatgagctggtcaaact

SEQ ID NO: 23962 - DNA, 1791 bp, Klebsiella pneumoniae
atgtttaagtttaaggcttcttatgtcgcactggcggcagtattaacctcgtcggtagtttatgccgaccccacaagctatacgcactcttccggcgccacggttatcgatattgaaaagccgaacgccgccggtgtctcccataatctgtaccgcgacttcaacgtcggcgccaatggcaccatcctcaataacagcggcgatgatgtcagccacagcacatttggcaatatcgcccgcaacaataatctgaccgccggcagcgcttcggtgattttgaacgaggtgacctccaaaaacgccagtagcctgaagggctttatcgaagtcaacggtcagaaagcggatgtggtaatcgccaacccgaacggcatcacctgttccggctgtagctttgttaataccaacaaggctatcctgaccaccggcaaggttaatatgaccgacgatggcgccatcggcagctataccgtaacgggaggcaccctcaccatcggcgaaaatggcatgaacgccgccaacggctacgcggttctgctcgccgacgcgattaagattaacggtaaagtgcaggccaacaacgccctggtcagcgcgggcaacttcaccatggataacagctctggctcggtgacctccgccggtaaaaaggccaccctgatccagatgacggttaacccgcagtacagcatcgacgtcagcagccttggcggcattgaggccaacagcatcagcatggtcggcaataacatcggctttggcgtacgtaataagggttctattatctccaatggcacgctgatgctcaccagcaacggtaatttactgaacaaagggtcaataacgggcaaaggtttgctgagccaggtttccaccgtcacgggcatcaccaatgacggtagcatcgccggcgcctattatttaatgctctccagtggcgattatatcgttaacaccggttctctctccggcggccagctgattgccaccgctaacggcaacatcaccaacggcgactcaggcacgatgaccggcaccagtggattaagcctgaccagcggtgggaaaatccgcaacgaagaaaaagcctccctgctgtcaaataaccagattgccgccacggcaatcggtgatttcctcaatgaaggcaaaatcagcgccaaacacaccagcctgacgtttgtcggcgacagctttaaaaacaccggcaatattaactctactggccaaaccaccattcagtcgcttacacaggacggcagcgccaatacgggcgagatctataacctcggcaatatcaccggcgaaaatatcaatctgcagaccaacggcacgctggcgcaaagcagcagtggtcgtattgaggcaaccaatgccattaccgcccacagctactggctgaaccaaaatggttatatgaatgccgccgatatcaccaccgatcacggcgtagtgaataattatggcaatattactgccaaaaatatttcaatcacgacctactcagatatcaccaacgaagggcagatcagcagcaccggcgacctgaccttaaataccaaaaataaaggcgcgatctacaattattcaaccctcagcgcgggcggcaacatgacgttaaccgccaccaaagtggtcaatggtggtaaaagttgcggcatcctgggcctggcgaaatgcggcgtcgggacgttaactgctgacaagctggtactgaactcatcgcagaaatatgttagcgacatgggtggaaaacagtatttcaagagcaccgaagtcaacacggtgaaa

SEQ ID NO: 23963 - DNA, 1281 bp, Klebsiella pneumoniae
atgaaaccgatgcaaattgcaatggcgctgctctctgccgtgatgttcttcattctggcgggcgtctttatgggcgtgcagctggagctgaacggcaccaaactggtggtcgataccgccgccgatattcgctggcagtggatcttcatcggtaccgcggtggtctttttcttccagctgctgcggccgctgttccagaaagcggttaagaacgtctccgggccgaaatttattatgccggcgattgacgggtcgacggtgaagcagaagctgttcctgatcgccctgctggtgattgccgtggcctggccgtttatggtgtcgcgcggcacggtggatatcgccaccctgacgatgatctatatcatcctcggcctcgggttgaacgtggtggtcggcctttccggcctgctggtgctgggctacggcgggttctatgccatcggcgcgtatacctttgcgctgctgaaccactattacggtctcggcttctggacctgtctcccgctggccggcctggtctccgcggcggccggtttcctgctgggcttcccggtgctgcgtttgcgcggcgactacctggcgattgtgaccttaggcttcggcgagatcgtgcgcattctgctgctcaacaataccgagatcaccggcgggccgaacggcatcagccagatcccgaaaccgaccttctttggcctcgaatttagccgcagcgcccgcgaaggcggctgggataccttcagcaacttcttcggcgtcaaatacgatccctccgaccgggtgattttcctctacctggtggcgttgctgctggtagtgctcagcctgttcgtcatcaaccgcctgctgcgaatgccgctgggccgggcgtgggaagcgctgcgtgaagatgagatcgcctgtcgttcgctgggcctgagcccgacgcgcatcaagctgaccgcctttaccatcagcgccgcgtttgctggcttcgccggcacgctgttcgccgcgcgccagggcttcgtcagcccggaatcctttaccttcgccgagtcagcctttgtgctggcgatcgtcgtgctgggcgggatgggctcgcagttcgcggtgatcctcgcggctattctgctggtggtctcgcgcgagttgatgcgtgacttcaacgaatacagcatgttaatgctcggcggcctgatggtgctgatgatgatctggcgtccgcaggggcttctgccaatgacgcgcgtgcagttgaagctgaaaaacggtcaggcgaaaggagagcaggcatgagtc

SEQ ID NO: 23964 - DNA, 1380 bp, Klebsiella pneumoniae
atggaaaagaaactgggcctgagcgccctgaccgccctggtccttagctcaatgctcggcgctggcgtattcagtttgccgcaaaatatggctgccgtggccagcccctccgctctgctcattggctgggccatcaccggcgtcgggatcctgtttctcgctttcgccatgctgctgttgacccgtattcgtcccgacctcgacggcgggatcttcacctacgctcgcgaaggattcggcgaactgatcggcttctgctccgcctggggatactggctgtgcgcggtgatcgccaacgtctcctatctggttatcgtcttttcggcgctcagttttttcaccgatacccctgagctgcgcctgtttggcgatggtaatacctggcagtctatcgttggcgcgtcggttctgctgtgggtcgtccactttctggtcctgcgcggtgtccagacggcagcggggattaacctggtggccaccctcgccaagcttctgccgctgggcgccttcgtcgcgctcgccgccctggcctttcagctggatacgttccgcctcgattttagcggcctggcgctgggcgtgccggtatgggagcaggtcaaaaacaccatgctgatcaccctgtgggtgtttatcggcgtggagggggcggtagtcgtgtccgcgcgggcgcgacacaagcgcgacgttggccgcgcgacgctgctggcggtgctgtcagccctcgcggtgtatctgctggtcaccctgctgtcgctgggcgttgtgccgcgcagcgaactggccgaaatgcgcaacccgtcgatggcgggactgatggtcaggctgatggggtcatggggggagatcgtcattgccgccgggctgatcgtgtcggtgtgcggcgcttatctcagctggaccatcatggccgcggaggtgcctttcctcgccgccactcataaagccttcccgcgcctgtttgcccgtcagaatagcaacaacgccccctccgcctcattgtggttgaccaatatcagcgttcaggtatcgctggtgctgatctggctgaccggatcggactacggcacgctgctgaccattgcctctgagatgattctcgtgccctatctgctggtcggcgcctttctgctgaaaatcgccactcgcccgctgcataaagcggtggctatcggcgcctgtatttatggcatatggttattatacgcgtcggggcctgtgcatttgctgttgtcggtggtactttacgctccgggtcttctggtctttttgtacgcccgacgtacgcaccagcacgatcgttcgctcaaacgccgcgaagtggcgctaattggtttattgctggttgccgctgtgccggcaacgtggatgctggtgggg

SEQ ID NO: 23965 - DNA, 909 bp, Klebsiella pneumoniae
atgcaaaagtttgataccaggaccttccagggcctgatcctgaccttacaggattactgggctcgtcagggctgcaccattgttcaaccactggacatggaagtcggcgccggcacctctcacccgatgacctgcctgcgcgcgttagggccggagccgatggcgaccgcctacgtgcagccttcccgtcgtccaaccgatggccgctatggcgaaaacccgaaccgtttacagcactactatcagttccaggtggtgattaaaccctctccggacaacatccaggagctgtacctcgggtcgctgaaagagctgggtatggacccgactatccacgacattcgctttgtcgaagacaactgggaaaacccgacgctgggcgcctggggtctgggctgggaagtgtggctcaacggcatggaagtgacgcagttcacctacttccagcaggtcggcggcctcgagtgtaagccggtgaccggcgagatcacctacggtctggagcgtctggcgatgtacatccagggtgtggacagcgtctatgacctggtctggagcgatggcccgttggggaaaaccacctacggcgacgtgttccaccagaacgaagtggagcagtccacctataacttcgaatatgccgacgtcgacttcctgttcacctgcttcgaacagtatgagaaagaggcccagcagctgctggcgctggagaccccgctgccgctgccggcctacgagcgtattctgaaagcggctcacagcttcaacctgctggatgcgcgtaaagccatctccgtcaccgagcgtcagcgctatatcctgcgcattcgcaccctgactaaagcagtggcggaagcgtactacgcttcccgtgaagcgctcggcttcccgatgtgcaacaagaataaa

SEQ ID NO: 23966 - DNA, 138 bp, Klebsiella pneumoniae
gtgctggtgctcgatggccgtctgcgtcaggcgctggcccgccatcagcgggcgctgaagtacagccgtttccagcccggtaacaaaggggggaaacaggttgcccgctttcctgaacgcaaaagcaaagaggtggct

SEQ ID NO: 23967 - DNA, 384 bp, Klebsiella pneumoniae
atggcttacagcgaaaaagttatcgatcattacgagaatccgcgcaacgtcggctcttttgacaacagcgacgagaacgtcggcagcggcatggtcggcgcgccggcctgcggcgacgtgatgaagctgcagattaaagtcaacaatgaaggtatcattgaagacgcgcgcttcaagacctacggctgcggttccgctatcgcttccagctccctggttaccgagtgggtgaagggcaaatcgctggacgaagcgcaggcgatcaagaacaccgatatcgccgatgaactggaactgccgccggtaaaaatccactgctcgatcctggcggaagacgcgattaaagccgcgattgcggattacaaaagcaaacgtgaagcaaaa

SEQ ID NO: 23968 - DNA, 1847 bp, Klebsiella pneumoniae
atgagacgaatactgacaacgctgatgatcctgctggcggtcattgtcgccgggcttacctcgttggtattgctggtcaatcccaacgattttcgcgcctatatggtgcatgaggtggcagagcgcagcggttatcagcttgaccttgatggcccgctgcgctggcacgtctggccgcagctcagcattctcagcggacggatgacgctgaccgccagaggcgccgaagagccggtgatccgcgccgacaatatgcgcctcgacgtggcgctgctgccgctgctctcgcatcagctgcaggtgaagcaggtgatgctcaagggcgcggtgatccagctgaccccgaaaaccgaggcggttcgcgacagctcagcgccggtggtgccgcatgataacaccctgccgctggccccggaggatcgcggatggtcctacgatgtgcgtcagctgcaggtggccgacagcgtgctcttcttccagcacgagaacggcgagcaggtgaccgtgcgcgatatccgtctgcagatggagcaggatgagaatcaccgggccaccgtggatttctccggccgggtgaaccgcgaccagcgcgacctggcgctgaacttctccgccaccgtgcagggcggcgattatccgcactccttaaaagccgactttacccagcttagctggcagctgcgcggcgccgagctcccaccggacggcattaatggtcagggaagtctgcaggccagctggcaggaagatgacaagaccctgcgttttgacaacctgaatctgatggctaaccgcagcaccgttaccggcagcggcagcgtggtgctgggggatcgcccggactggtcgctggatctgcacgccaccactctcgatctcgatagtctgctggcgcaaaggtcgccggcgacggacagtagcgccagtcagcagggccagagtcagacgcgaccgctgcgcccggtgatcgccgacagcgatgagcgcgaagattaccagagcctgcgcggcttcaacggccgaatggccctgagcgccgaccagctgcagtggcgcggtctgaactttacccaggtgcagagcgaaatcagcaaccagcaggggctgctcacggtcagcaaaatgcagggcaatcttgatggcgggcagctctctctccctggcaccctggatgcccgcggcgacacgccgctggcgacgttccagccggcgctgcagaatgtggagatcggttcgctgatcaaagcctttaactattccttaaacctgaccggcaagctgtcgctgagcggcgaattttccggaacgcgcattgacgctgatgatttccgtcgccactggcagggacaggctcagctgcagatggccgatacccgcaccgaggggctgaacttccagcagcttgtacagcaggccgtggagcgcagcaccaacgtgcgggcgcaggaaaattacgacaatgccacccgcctggattccgtgagcagccggctgacgctggataacgggctggtgacgctgaaccgcctgcaggggcagtccgacgtgatggcgatgaccggcgaaggacagctcgatctgcagaaagagaactgcgatatgcgcttcaacgtgcgcgtgctcggcggctggaaaggggagggcaagcttatcgaccgcctgaaacagaccgctatcccgctgcgcatctacggcgagtggcagtcgctgagctacagtctgcaggtcgaccagatcctgcgcaaacagctgcaggatgaagcgaagcagcgcctcaacgactgggttgagcgtaataaaggcagcaaagacggcaacgatgccaaaagctgctcgataagctgtaa

SEQ ID NO: 23969 - DNA, 1375 bp, Klebsiella pneumoniae
atggcactttggggcgggcgttttacacaggcagcagatcaacggttcaaacagttcaacgactcgttgcgcttcgactatcgtctggcggagcaggatatcgttggctctgtcgcctggtcgaaagcgctggtaacggtcggcgttctgaggtgccgctgaacagcagcagctggaagaagcgctgaacgtgctgcaggaagaggtgcgcgccaatccgcagcaaatcctcgccagcgatgccgaagatattcacagctgggtggaaggcaagctgatcgataaagtgggccagctgggcaagaaactgcacaccgggcgcagccgtaacgaccaggtcgccaccgatcttaaactgtggtgcaaagataccgttgtcgaactgctctcggcgaaccgccagctgcagagcgcgctggtggagaccgcccagcagaatcaggacgcggtaatgccggggtacacccacctgcagcgcgcccagccggtgaccttcgcgcactggtgtctggcctacgttgaaatgctggcgcgtgacgaaagccgtctgcaggacgcgctgaagcgcctcgatgtcagcccgctgggctgcggcgcgctggcggggacggcgtatgagatcgaccgcgagcagctggccggctggctgggctttgcctccgccacccgcaacagcctcgacagcgtgtccgatcgcgatcatgtgctggagctgctttccgatgcggctatcggtatggtgcatctgtcgcgctttgcggaagatctgattttctttaactccggcgaggcgaacttcgtcgagctttccgaccgcgtgacctccggctcctcgctgatgccgcagaagaaaaacccggacgccctggagcttatccgtggcaaatgcggccgcgtgcagggtgcgctgaccggcatgatgatgacgctgaaaggactgccgctggcctacaacaaagacatgcaggaagataaagaggggcttttcgacgccctggatacctggctcgactgcctgcatatggcggccctggtgctggacggcattcaggtaaaacgcccgcgctgtgcggaagcggcgcagcagggctatgccaacgccactgagctggcggattatctggtggcgaaaggcgtaccgttccgcgaggcgcaccatattgtcggtgaagcggtagtggaagccattgcgcaagggaaaccgctggaagcgctgaccctggccgatctgcagaaattcagcccggtgattgcggacgatgtgtatccgatcctgtcgctgcagtcctgtcttgagaaacgcgcagcgaaaggcggcgtctcgccgcagcaggtagcccaggctatcaacgaggcgaaggctcgtttaagctaa

SEQ ID NO: 23970 - DNA, 735 bp, Klebsiella pneumoniae
atgctattcatttttcgagtaattttcgtggtcatttattgcatcgtagtgtgcgtacttggctgtctgtactgcttgttcagcccacgtaatccaaaacacgttgccactttcggccatctgtttggccgtttatctccggtatttggcctcaaggtagagctacgcaaacccgccgacgcggaaagctatggcaacgcgatctacatcgctaaccaccagaacaactatgatatggtgacggcgtcgaatatcgtgcaggctccgacggtcaccgtaggtaaaaagagcctgctgtggatcccgttctttggccaactgtactggctgacgggcaatttgctgattgaccgtaataaccgaaccaaagcgcacggcactattgccgaagtcgtcaacgcttttaaaaagcgtaaaatttcgttctggatgttcccggaagggacccgtagccgcggccgcggcctgctgccgtttaaaaccggggcttttcacgcggctattgccgctggggtgccgattattccggtgtgtgtctcgaatacatcgaataaaataaagctcaatcgctggaacaacggtctggtgattgtggaaatgctgccgccggtagataccactcagtttggtaaagacaacgtgcgcgcgctggcgacgcattgccgcgagctgatggccgccaaaatcgctgatctggacaacgaagtggccgagcgcgaagcggctggaaagcaa

SEQ ID NO: 23971 - DNA, 1060 bp, Klebsiella pneumoniae
gcattttataaaaatgtagatatttttaatttatggctacgaaatgaacatcaccctgaccttacagcgaggaacgatcctgatgaacgccctgaccgcagtaaaaccgacacccgcgccggtagcccagcaataccctggcttttctttcaccccttccgcccagtcgccgcgcctgctggagctcaccttttccaccgaaacgaccacgcagttcctgcagcaggtcgcgcagtggccggtgcaggcgctggagtacaaatctttcttacgcttccaggtcggcaagatcctcgacgatctgtgtggcaatcagctgcagccgttgctgatcaaaacattgctcgatcgcgcggaaggcgcgctgcttatcaacggcgaagggatcgatcacgtcagccaggccgaggagatggtcaagctggccaccgccgtcgcccacctgattggtcgttccaacttcgacgccatgagcggtcagtattacgcccgcttcgtggtgaaaaatgtcgataactcagacagctacctgcgccagccgcaccgggtgatggagctgcacaacgacggcacctacgtcgaagagcaaaccgactacgtattaatgatgaagatcgacgagcagaacatgcagggcggcaattccctgctgctgcatctcgacgactgggagcatctcgacgaatttttccgcgacccgctggctcgccgcccaatgcgctgggccgcgccgccgagcaaaaacgtcagcaaggatgttttccacccggtgttcgacgtcgattcgctgggccgcccggtaatgcgctatatcgaccagttcgtccagccgaaagatttcgaagaaggcacctggctgagccgcctctccgacgcgctggagaccagcaaaaacatcctttccataccggtgccggtgggcaaatttctgctcattaacaacctgttctggctgcacggccgcgaccgctttacgccgcacccggacctgcgccgcgagctgatgcgccagcgcggctactttgcgtattccacgaatcattaccagactcatcaataa

SEQ ID NO: 23972 - DNA, 717 bp, Klebsiella pneumoniae
atgctgagagtattgatcatcgatgatgagccgctggcgcgggaaaacctgcgcattttgctggagacacagcgcgatatcgagatcgtcggcgagtgcggcaacgcggtggaggccattggcgcggtgcataagctgcgtcccgacgtgctgtttctcgacatccagatgccgcgcatcagcggtctggagatggtcgggatgctcgacccggagcaccgcccctatatcgtgtttctcaccgcctttgatgaatacgcggtgaaagcctttgaggagcatgcctttgactatctgctgaagccgattgaagctgcccggctggagaaaaccctcgcccgcctgcgccaggagcgtaatctgcaggatgtgtcgctgctggatgatgctcagcagacgctgaaatacattccctgtaccggccacagtcgtatctggcttctgcagatggaggatgtggccttcgtcagcagccggatgagcggcatctacgtgaccgaccgcgagggaaaagagggctttaccgaactgaccctgcgcacccttgagagccgcacgccgttgctgcgctgccatcgccagtacctggtgaatatggcgcacctgaaggagattcgcctggaggagaatggccaggcggagctgctgatgcgcgccgggcaaacggtgccggtgagccggcgctatttaaaaagcctgaaagaggcgattggcctg

SEQ ID NO: 23973 - DNA, 618 bp, Klebsiella pneumoniae
atgaccattgagtggtggttcgcctacctgctgacatcaattattctcagcctgtcgccgggttccggagcgattaataccatgaccacctccattaaccacggataccgcggcgcggcggcgtcgattgccggcttgcagaccgggctggttattcatatcgtgctggttggcgttggtctcggcactctcttctcccgctcggtgctggcctttgaggtgctgaaatgggccggcgccgcctacctgatctggctgggtatccagcaatggcgggcggcaggggcgatcgacctgaatacgctggcgaaggcgcagacgcgcggcaaactgttccagcgcgcggtgttcgtaaatctcaccaatcccaaaagcattgtttttctggccgccctgtttccgcagtttatcctgccgcaccagccgcaggtgatgcaatatctcgttctgggcgtcaccaccatcgtcgtcgatatcattgtgatgattggctatgcgaccctggcgcagcgcatttccgcatggatcaaagggccaaagcagatgaaggcgttgaacaaagtctttggttcactgtttatgctggtcggggcgctgctcgcctccgcccgccatgcc

SEQ ID NO: 23974 - DNA, 1486 bp, Klebsiella pneumoniae
atgtcacggcaatggatgacgctgatggcgattttgctggtttatattccggtggcgattgacgctacggtgttgcatgtggccgcgccgaccctcagcgtggcgctgggtagcagcggcaatgagctgttgtggatcattgatatctactcattagtgatggccgggatggtgctgcccgatgggcgcccttggcgataagatcggctttaagcgcctgctgctgctcggcagcgccatttttggcatcgcctcgctgtgcgccgcgctgtcgccgacggccatgacgctgattgcctcacgcgctttgctggcggtgggggcggcgatgatcgtcccggcgacgctggccgggatccgcagcacctttgccgaggccagccagcgcaatatggcgctggggctgtgggcagcggtcggctccggcggcgcggccttcggcccgctggtgggcggtatcctgctggagcatttctactgggggtcggtgttcctgatcaatgtgccgatcgtgctggtggttatcgcgattaacgcgaaagtggtgccgcgccagcccgcgcgccgcgaacagccgctcaatctactgcaggcgctcgttttgattgccgcgatcctgatgctggtgtttagcgcgaaatcggcgctgaagggccagctggcgctgtggctcaccgcgctggtggcgctcggcggggcggcgatgttaacctggtttatccgcaagcagctgtcggcggcccgcccgatggtggatatgcgcctgttcacccatcgcataatcttaagcggggtgatgatggcgatgacggccctgattaccctggtcggttttgagctgctgatggcccaggagctgcagtttgtgcaccagaaaacgccgttcgaggcggggatatttatgctgccggtaatggtggccagcggcttcagcggcccgattgccggcctgctggtgtcgcggcttgggctgcgcgaggtggcgaccggcgggatgctgctcagcgccttcagctttctcggcctggcgttgaccgatttcagtacccagcagtggctggcctgggggctgatgacgctgctgggctttagcgtggcctgcgcgctgctggcctccagttccgcgattatggcggcagcgccgaaggagaaagcggcggccgccggggcgattgaaaccatggcctatgagctgggcgccggtctcggcatagcgctgttcggcctgatcctgacccgcagctacagcgcctctattgcgctgccgtctggcctgagtggcgccatggcgcagcaggcggcgtcatcgattggcgaggcggtgagtctgtcccaggcgctgcccgccggggtggcgcaggcgctgatggcggcggcgaagacggcttttattcaggctcatagcctggtgctggcgacggcgggtgtattgcttctgctgctggccgctgggatctggcgcagcctcgccaccgtggcgaaaccg

SEQ ID NO: 23975 - DNA, 1440 bp, Klebsiella pneumoniae
atgtcgaaaaattatgcagccctggcgcaacagatagtcgcggcaatcggcggggtcgacaacgtcgccgccgttacccactgtatgacccgtctgcgcttcgtggttaaagacgacgaacaggtcgatagctctaccctgaaaggcctggccggggtgctcggcgtcgtgcgcagcgataaccagtgccaggtgatcatcggcaacactgtctcccaggcctaccgcgaggtggtgaatctgctgccaggcgacctgcgcccggctgagccgcagggcaaagcgccgctgaccctgaaacgcatcggcgccgggatcctcgacgctctgatcggcaccatgtctccgctgatcccggcgattatcggcggatcgatggtcaagctgctggcgatgatcctcgagatgagcggcgcgttgccgaaaggctcgccgacgctgaccctgctggcgcttatcggcgacggcgcatttttcttcctgccgctgatggtggccgcctccgcggcggtgaaatttaaaactaatatgtcgctggctatcgccatcgccggggtgctggtgcatcctgggtttatcgaattgatggccaaagccgcccagggagaacacgttgaattcgcctttattccggttaccgcggtgaaatacacctatacggtgatcccggcgctggtgatgacctggtgcctgtcgtatatcgagcgctgggtggatcgcattaccccggcggtgacgaaaaactttctgaagccgatgctgatcgtgctgatcgccgccccgctggcgatcctgctgattggcccgctgggcatctggatcggcagcgccatttccgcgctggtgtatacgatccacagctatctcggctggttgtcggtggcgatcatgggcgggctgtggccgctgttggtgatgaccggtatgcaccgcgtctttacgccgaccatcattcagaccatcgccgaaaccggcaaagagggtatggtgatgccgtcggagatcggcgccaacctgtcgctcggcggctcttcgctggcggtggcgtggaaaaccaaaaacccggagctgcgccagacggcgctggccgccgcggcatcggcgattctggccgggatttccgaaccggcgctgtacggcgtggcggtgcgcctgaagcgcccgctgatcgccagtttaatcagcggctttatctgcggcgcggtggcaggcattgccggactggccagccattcgatggcggcgccggggctgtttaccagcgtgcagtttttcgatccggccaatccaatgaccatcgtctgggtatttggcgtgatggcgctgtcggtggtgctgtcgtttgccctgacgctgatcctcggcttcgaggacattcccgttgagcaggccgctgccgacgccagagcgcgccaggcccgggcccaggcatcccacgcc

SEQ ID NO: 23976 - DNA, 177 bp, Klebsiella pneumoniae
atgctgattctgactcgtcgagttggtgagaccctcatgattggagatgaggtcactgtgacagttttaggggtgaagggtaaccaggttcgtattggcgtaaacgcccctaaagaagtgtctgttcaccgtgaagagatctaccagcgtattcaggctgaaaaatcccagcagtcc

SEQ ID NO: 23977 - DNA, 3135 bp, Klebsiella pneumoniae
atgaaaatcctcagtctgcgcctgaaaaacctcaactccctgaaaggggaatggaagatagactttaccgccgagccgttcgccagcaatggcctgttcgccattaccggcgccaccggggccgggaaaaccacgctgctcgatgccatttgcctggcgctctatcatgaaacgccgcgcctgaacaaggtctcccagtcgcaaaacgacctgatgacccgcgataccgccgagtgtctggcggaagtcgagtttgaagtaaaaggcatcgcctaccgcgctttctggagccagaaccgggcccgtaaccagccggatggcaatctgcaggcgccccgcgtcgagctggcgcgctgcgctgacggcaaaatcctcgccgataaagtctcggacaagctggagcaaaccgcgacgcttaccggcctcgactatggccgcttcacccgctcgatgctgctttcccaggggcaatttgccgccttcctgaacgcgaagccgagcgatcgcgcggagctgctggaggagctgaccggcacggaaatctacggccagatttcagccatggtctacgaacagcacaaagccgctcgccatgcgctggagaagttcgaagcccaggcggcgggcatcgtcctgttgacggaggcccagcagcaggcgctgcaggaaagtttgcaggtacttactgacgaagaaaaagccctgctggcccagcagcagagccagcagcagcagctccagtggctgacccgccgcgacgagctggcgcagcaacagcagcaggccgccacccggcagcagcaggcccgccaggcgctggcggacgccgccccggcgctggcgaagcttgagctggcccagcccgccgcccaactgcgtcccctgtgggagcgccagcaggagcagacggcaggcctggcgcaaacccggcagcggatcagtgaagtaaatgctcgcttacttgccagcacggcgctgcgcgcgcgcatccgccagggcgccttgcgcgctcagcagcagcgtcaggctgaactggccgatctggcgcagtggctggccgcccatgagcgtttccgcttatggggtcaggagatcgccggctggcgggcgcaattctcgcaactgacgcgggataaacaacagctaacggctcagagcacccgcctggccgcgctacgccagaagctggccacgctgccagccagccctctcaccctgagcgcggatgacgttgccgcagcgatagaacagcaaacccaatcgcggccgctgcgccagcgcctgatctccctgcatgagcagcatcagctgctgcgcaagcgtctgcgccagaacgccgacagcgtccagcaggcgcaggcggagcaggtaaaacttaacgctaccctgacgctgcgccgggaacaatataaagacaaaaaccagcactatctcgacctgaaggcgctctgccagcgggaagaaacgattaaagacctggaaagctaccgcgaccggctcgaggcgggtaagccctgtccgctgtgcggcgcctgtgaacacccggcgattgaacaatacgcctcgttgacgctcacggataatcagcgccgccgcgatgcgctggaaaaggaggtcgccgcgctgaaagaagaaggcctgctgatcctcgggcaggtcaaggccctgacgcaacagcttcagcgtgacaccgaagcggccgggcggctcgcagaggaagagcaagcgcttactaaagcgtggcaggagacctgcgcctctctacacatcacgcgggatattgcgcaagagataaacgactggatgcaggagcaggagcgctacgagcagcagctctatcagctcagccagcgcctgatgttgcagagtcagcttaacgatcagcaggcgctggagcgccaggccgagcagcagctggcggccacgcgccagggactggagagcgccctgcaggccctggccctgagcctgccggcagaagggacagaagccgcctggctgcacgctcgcgaaagcgaatttgcccagtggcaggcgcaacagacccaacatgatgccattcagcagcaaatcgctgctctgcggccactgctggagacgctgccgaccagcgacgagacagaggttgaagctgagtcggccatcccggacaactggcgcgaaatccacgaggaatgcctgtcgctgcacagccagcttgtcgcccagcagcagcaggaaacccaggaaaaggcgcgtctggaccagtcgcaggcgcaattcacctccgccctggccgccagccgctttagcgatcgggaggcgttcctcgccgcgctgctggatgacgagaccgcccagcggctgacgcagttaaaacagacgctggagcagcagcttcagcaggcggctgcgctctgcgagcaggcgacccggcaacatgaggcgctcctggcgctgcgtccgcaaggggtggacgctgacgtccccaccctgcaaacccagctgcacgccctggcccagcggctgcgggataacactacccgccagggtgagatccgccagcagctcaggcaggacgcagagagccgtcaacagcagcaggcgctggggcaacagattgcagaggcggcgcagctggcggacgactggggctatctcaattcgctgatcggctccagcactggcgaccggttccgcaaattcgcccaggggctgacgctggataatctggtctggctggcaaaccagcagctcaaccgcctgcatggccgctatctgctacagcgcaaggccagcgaggcgctggagctggaggttgtcgatacctggcaggccgacgccgtgcgcgacacccgcaccctctccggcggcgaaagtttcctcgtcagcctggcgctggccctggcgctgtcagacctggtgagccataagacgcggattgactccctgtttcttgatgaaggcttcggcaccctcgacagcgaaacgctggacacggcgctggacgccctggatgcccttaacgccagcggtaagattatcggggtgatcagccacgtggaggcgatgaaagaccgcattccggtgcagatcaaagtgaagaagattaacggcctgggctatagccggctggacaaagcgtttgcggtggag

SEQ ID NO: 23978 - DNA, 1176 bp, Klebsiella pneumoniae
atgcaattgcgtaaattactgttgccagggctgctttccgttaccttgctgagcgggtgttcgctgtttaatagcgaagaagatgtggtgaaaatgtcaccgctgccgacggtagaaaaccagtttacgccgtccacttcctggagcacctcggttggcgatggtatcggcgaattttactctaaccttcatccggcctttgccgacggcgtagtgtatgctgctgaccgtaaaggcaccgtcaaagcgctgaacgccgacgacggcaaagaggtgtggtcggtgaatctggcggagaaagatggctggttctcgcgcacgccagcgctgctttctggcggggtgaccgtctctggcggccatgtttatatcggcagcgagaaagcgcagctgtatgcgctgaataccagcgatggtagcgtggcctggcaaacccgtgtcgccggcgaggcgctgtcgcgtccggtggtgagcgatggcatggtgctggtgcataccagtaacggccagctgcaggcgctaaacgagaccgatggggccgtgaagtggaccgttaacctcgatatgccggcgctctccctgcgcggcgagtctgcgcctgcgaccgcctacggcgcggcgatcgtcggcggcgacaacggccgcgtcagtgcagtattgatgcagcaggggcagatgatttggcagcagcgtatttctacggccaccggcccgacggaaattgaccgcctgaacgacgtcgacacgacgccgatcatcgttaacggtgtggtttatgcgctggcttataacggtaacctgaccgcgctggacctgcgtagcggccagattatgtggaaacgcgagctgggttcggtgaatgatttcatcgtcgatggtaaccgtatctacctggttgaccagaacgatcgcctgctggcactgaccaccgacggcggtgtaaccctgtggacgcaaagcgatctgctgcaccgtttgctgaccgcgccggtgttgtataatggcaatctggtcgtcggcgatagcgaaggctacatgcactgggttaatccggaagatggccattttgtggcgcagcagaaagtcgatagttccggcttcctgaccgacccggtggttgccgatggtcgactgctgatccaggcgaaagacggtacgctgtacgcgattacgcgt

SEQ ID NO: 23979 - DNA, 1083 bp, Klebsiella pneumoniae
atgctggcgaaccacctgagaacgctgctgcagcccaacgaagcggtatatcatcttgccggtcacgatttagtgttccgtctcaatagcgaagggcaccaggcgcgcattcacttaattgaccgctccctgcgacagttccgtttccactgggacggggtccccctgcagccgcggatcggcatgagctattgcagcgttcgctcgccggtcaagcatctgtatttactgcttggcgagttgaacaccattgccgacatgtcgttagccagcggccatccggaaaatttacagcgccgcggcgcgggccatgttcagcaggatctgaaagataaagtcgtgatgatgaaccgcattctcaaagcgctggaacatgaccattttgtcctgatggcgcagcctatccagggcattcgcggcgatcgctatcatgaagtgctggtgaggatggaaggggagtcgggtgagctaacggggccaaacgagttcttgccggtggcgcacgagtttgggctgtccacgcgggtggaccagtgggttattgagcatacgctggcctttatggacgccaaccggcgggcgctgcctggtctgcggctggcgatcaatctttctccggtgtcgctgagccgcagccagtttcctcaggaggtcgaagcgctgctgcaggcctacaacattgagccatggcagattattttcgagctgaccgagaactacgcgctcagcaatcccgagctggtctgccagactttagaacatctgcgggcgctgggctgccgggtggcgatcgatgattttggtaccggctacgccagctacgcccggttaaaaacaatgaacgtcgacattcttaaaatcgacggcagttttattcgcaatctgcttgccagcagtcttgattaccaggtcgtggactctatttgtcgtctggcgcgtatgaagaacatgcaggtggtggccgaatatgtggagtcgccggaaatacgtcaggcggtcatcacgctggggatcgattatatgcagggctatgatatcggggtaccggtacctctgacgcagttggcggaggagatgaccggc

SEQ ID NO: 23980 - DNA, 255 bp, Klebsiella pneumoniae
gtgcgtttttttcgcttctctttttcattcatttttagcatcattgatttcattcgtttttgttaccaggataatgccatgtcagatgtgaatgcccacctgctcgctcaacgtatcgataccgtgctggatattctggttgccggtgattaccattctgcgatccataatctggagatcctcaaagcggagctgctggcgctggcggcggacgatgctgaacaacaaaaccaacccaaggcgccctgggaaatc

SEQ ID NO: 23981 - DNA, 1182 bp, Klebsiella pneumoniae
atgattatttccgccgccagcgactatcgcgccgccgcacagcgtatcctgccgccgtttctgttccactatattgacggcggcgcctacgccgaacataccctgcgccgcaacgtcgaggacctttccgatgtagccttgcgccagcgtattttgcgcaatatgtcggacctgagtctggaaacgacgttattcaacgagaagctggcgatgccgacggcgttggcgccggtcgggctgtgcgggatgtacgcccgccgcggcgaagtgcaggccgccggcgcggcggacgacaaaggcattccgttcaccctctctaccgtttccgtctgcccgatcgaagaggtcgccccgaccatcaagcgcccgatgtggttccagctgtatgtcctgcgcgaccgcggctttatgcgcaatgcgctggagcgcgccaaagccgccggctgctcgacgctggtctttaccgtcgatatgccgactcccggcgcccgctaccgcgacgcccattccggcatgagtggcccgaacgccgccctgcgccgctactggcaggccgtcacccatccgcagtgggcgtgggacgtcggccttaacggtcgcccgcacgatctgggcaatatctccgcctatctcggcaaaccgaccgggcttgaggattacatcggctggctggcgaataacttcgatccgtcgatttcatggaaagacctggagtggatccgcgatttctgggacggtccgatggtgatcaaagggatcctcgatccggaggacgcccgcgatgcggtgcgcttcggcgctgacggcattgtcgtctccaaccacggcggccgccagctcgatggcgtgctctcctcggcccgcgccctgccggcaattgccgacgcggtgaaaggcgacatcactattctcgccgacagcggcatccgtaacgggctcgacgtggtgcggatgatcgctctgggcgccgacagcgtgctactgggccgcgcttacctgtacgccctggcgacccacggtaagcagggcgtggcgaatctgctgaacctcatcgagaaagagatgaaagtggcgatgaccctcaccggggcgaaaagtatccgtgaaatcagccgtgattcgctggtgcagaacgccgaagcgctgcagaccttcgatgcgctgaagcagaataacgccgcg

SEQ ID NO: 23982 - DNA, 1539 bp, Klebsiella pneumoniae
atgagcgcagcacttctgttgactttgcctttctgggcctgcgccaaagatgtcaccataatttataccaacgatcttcatgcccatgtcgaaccttataaagtgccatggatagcggatggtaaacgagatattggtggttgggcgaatatcacgacgatggtgaaacaggaaaaagcgaaaaataacgcgacctggttttttgatgccggggattattttaccgggccttacatcagtagcctgacgaagggcaaagcgataatcgatattatgaatacgatgtcctacgatgcggtgactatcggtaatcatgagttcgatcacggctgggataatacgttgcttcagcttagccaggcgacattcccgattgttcagggcaatattttttatcagaacagcgataaatcgttctgggataagccctataccattatcgaaaaagatggcgtgaaaattggcgtgattggcctgcacggcgtgtttgcttttaatgacaccgtttctgccgcgacgcgagtgggtatcgaagcacgcgatgaggtgaaatggctacagcattatatcgatgaacttaacggtaaagtggatctgaccgtggccctgatccatgaaggcgtcccggcgcgtcagtcgagccaggggggaaccgatgtgcgtcgtgcgctggataaagatattcagactgcgggtcaggtgaaaggcctggacgttttaattaccggccatgctcacgttggcacaccggagcccattaaagtgggtaatacgttgatcctttctaccgatagcggcggcatcgatgtgggtaaactggtgctggattatcaggagaaaccgcaccaattcacggtgaagcactttgagctgaagacgctttatgccgatgagtggaagcctgatccgcagacaaaacaggtcatcgacggctggaataagcaacttgatcaactggtgcagcaggtcattacacaatcgcccgttgaactgacccgtgcgtatggcatctcttcgccgttgggcaatcttgccgctgacgccttgctgttggcagcaggtaggagtacgcagatggcgttaaccaactcgggcgggatccggaatgagatccccgccggggcggtgagcatgggcgccgttatcagcaccttcccgtttcccaacgagctggtcaccatggatctaaccgggaagcagttgcgtagcctgatggagcatggcgccgggttgagcaacggcgtgctgcaggtctcccggggactggaaatgaagtatgacagcagcaaacctgtgggccagcgcgttgtgttattcaggctaaacggtaaaccgattgacgatacgacggtttaccatattgccaccaacagcttccttgcagatggcggcgatggttttgtcgcgtttaccgaggggcaggcgcgtaatacctccggcggctattacgtttcaaatgcggtcgtagactatttcaaagccgggcaaaagataacggatgagcagcttaacgggcagcgcgttgtcgatgtgaagaaa

SEQ ID NO: 23983 - DNA, 878 bp, Klebsiella pneumoniae
cagaaagaccgtgatattttcgtcataaacggaatccttaggcgccaaagtttttgtccagtccgctaatggcacatgaagaaacgcagatgtcgcaaattgaaaacatgatcaaccgcggcgtcgatgtgttagtcattattccttataacggccaggtactcagtaacgttattaaagaagccaagcaggaaggtattaacgtcctggcctatgaccgtatgattaataatgccgacattgatttctatatatctttcgataatgaaaaagttggtgaaatgcaggcgcaaagtctggtcgacaaagtgccgcagggtaattatttcctgatgggcggttcgccggtggataataacgctaaactgttccgcgccggacagatgaaggttctcaagccgtatgtcgatgatggcaaaattaagattgtcggcgatcagtgggttgacggctggctgccggagaacgcgctgaaaataatggaaaacgcgctaacggcgaataataacaagatcgatgccgtggtcgcctccaatgacgccaccgccggcggcgccatccaggccttaaccgcccaggggctggccggcaaagtggcgatctccggtcaggatgctgacctggcgggcgtgaagcgcattatttccggtacccagacgatgaccgtctataaaccgataaccaccctggccaccaacgccgctgaaatcgccgttgagctgggtaacgataagcagccgaaggccgataccacgctgaataacggcttaaaagacgtcccttcgcgcctgttaacgccaattgaggtgaataaagagaatatcgacgccacggtgattaaagacggtttccataaaaagagtgaactgtaatggctg

SEQ ID NO: 23984 - DNA, 848 bp, Klebsiella pneumoniae
gtgaggcgactgcccgggattttattgctcaccgtggcaacattgattgttatcgtcgcgctgctggtgagtggcttgcgtctcgtgttgccacagctcgacgcctggcgtccgcagctgctggagaagatctccaccctcaccggtacgccggtggacgcctcgcagatcaccgccagctggcagacttttggtccgacgttagacgcccgcgatatccatgtcgggctgaaagatggcggcacaatggcggtcaagcgcgtaaccctggcgctggatgtctggcagagcctgctgcatatgcgctggcagttccgcgacctcaccttctggcagctgcaggtccataccaatacccctattcagaccaatgacggtggcgaaagcctgaaaaccgaccgcatcagcgatctctttttacgtcagttcgatcactttactctgcgcgacagccatctgagcttcctgaccctttccggtcagcgggcggagctggcggttccgcaactgacatggcttaacggcaggaaccgtcatcgcgccgaggggcagctcagcctctccagcctcaccggccagcatggcgtcatgcaggtgcggatggatcttcgcgatgaggatggcctgctgaataaaggccgggtctggctgcaggcggatgatatcgacgtcaaaccgtggctgggacgctggatgcaggacaatatcgccctgaaaagcgcccgcttcagcctcgaaggctggatgaccattgaaaaaggcgatgtggccagcggcgacgtatggctgaaaaaagggggcgccagctggcagggcgataacgaagtccatcatttgtcggtggataa

SEQ ID NO: 23985 - DNA, 1146 bp, Klebsiella pneumoniae
atgaaagcattacattttggcgcaggtaatatcggacgtggctttatcggtaaattgctggccgacgcgggcatcgaactgacgtttgccgatgtcaatcagaccgtacttgatgccctgaatgcccgtcatagctaccaggttcacgtcgtcggtgagaatgagcaggtggacaccgtctccggcgtcaatgccgtcagcagcatcggcgatgaggttgtggacctgatcgctgaggtggatctggtcaccaccgccgtcggtcccgtcgtgctcgagcgcatcgcgccagcgatcgccaaagggctggcgcagcgcaaagcgcagggcaccgaacgccccctgaacatcatcgcctgcgaaaatatggtgcgcggcaccacgcagttaaaaggccacgtgtttaacgcgctggcggaagaagataaagcgtgggtggaagcgcatatcggctttgtcgactctgccgttgaccgtattgtgccgccatcggcttccgccactcatgacccgctggaagtcaccgtggaaacctttagcgaatggattgtcgataagactcagttcaagggcgcgctgccgactatcccgggaatggaattaactgataacctgatggcatttgtcgaacgcaagctcttcaccttgaacaccgggcatgctataaccgcctacctcggaaaactggcgggccatcagacgattcgcgacgcgatcctcgacaagaaaattcgtgccgtcgtgcagggcgcgatggaagagagcggcgcggtgctgatcaaacgttacgcctttgacccgcagaagcacgcggcttatatccagaaaatacttggccgtttcgagaacccgtacctgaaagacgatgttgagcgcgttggccgtcagccgctgcgcaaactgagcgctggcgaccgtttaattaagccgctgctgggtacactggaatacggtctgccgcaccgcaacctggtgaaagggattgcggcggcgatgcatttccgtagcgaagacgatccgcaggcgcaggagctggcggcactgatcgccgacaaggggccgcaggccgcgctggcgcagatttccggcctggatgccgcaagtgatgtcgtcgcggaggccgttaacgactacaacgcggaaaaa

SEQ ID NO: 23986 - DNA, 789 bp, Klebsiella pneumoniae
atgaaaccgaccaccattgccctgctgcagaaatgcaaacaggaaaagaagcgctttgccaccattaccgcctacgatcacagcttcgcgaagctgttcgccgatgaaggcattaatgtgctgctggtaggcgactcgctgggaatgacggtgcagggtcacgactccaccctgccggttaccgtggaagatatcgcctatcacacccgcgccgtccgccgcggcgcgccaaacagcctgctgcttgccgacctgccgttcatggcctatgccacccccgagcagacctttgcaaatgccgccatcgtgatgcgcgctggcgccaatatggtcaaactcgagggcggcgcctggctggccgacaccgtgaggatgctggcggagcgcgcggtgccggtttgcggccatcttggcctgacgccgcagtcggtgaacgtattcggtgggtataaagtgcagggtcgcggcgatgcggcgcagaccctgtttgaagacgcgttagcgctggaggcggcgggtgcgcagctgttggtcctggagtgcgtgccggttgaactggcgaagcgcatcaccgacgctctgaccattccagtgatcggcatcggcgcgggcaacgtcaccgacgggcaaatcctcgtgatgcatgacgctttcggcattaccggcggccacattcctaaatttgccaagaatttccttgccgaagcgggcgacatccgcgccgcggtgcggcagtatattgccgaagtcgaatccggagtctatccgggcgaagaacacagtttccat

SEQ ID NO: 23987 - DNA, 1119 bp, Klebsiella pneumoniae
atgcataaccaggctccgattcaacgtagaaaatctaaacgtatttacgttggtaatgtgccaattggcgatggggctcccatcgccgttcagtcaatgaccaatacgcgcaccaccgatgtggcggcgaccgtaaatcaaatcaaagcgttagagcgcgtaggcgcggacattgtccgtgtctctgttccgacgatggacgctgctgaggcgttcaaacttatcaaacagcaggttaacgtcccgctggtcgccgatatccactttgactaccgtattgcgctgaaagtggcggaatatggcgtcgactgcctgcgtatcaacccgggcaacatcggcaacgaagagcgcatccgcatggttgtagattgcgctcgcgataaaaacatcccgatccgcatcggcgtcaacgccggctcgctggaaaaagatctgcaggaaaaatatggcgagccgacgccgcaggcgctgctcgaatccgccatgcgtcatgtcgatcatctcgatcgtctgaacttcgatcagtttaaagtcagcgttaaagcctccgatgtcttcctggcggtggaatcctatcgtctgctggcgaaacagatcgatcagccgctgcatctcgggatcaccgaagcgggcggcgcgcgcagcggcgcggtaaaatcggcgatcggtctgggactactgctgtccgaggggatcggcgatacgctgcgcgtctcgctggcggcggatccggtggaagagatcaaggtcggcttcgatatcctcaaatctctgcgtattcgttcccgcggcattaactttatcgcctgcccgacctgttcacgccaggagtttgacgttatcggtacggtgaatgctctggagcagcgtctggaagatatcatcaccccgatggatgtttcgatcatcggttgcgtggtgaacggcccgggcgaagcgctggtctccacccttggcgtcaccggcggcaacaagaaaagcggcctgtatgaagacggcgtgcgtaaagatcgcctggacaacaacgacatgatcgaccagctggaagcgcggatccgcgccaaagcctcgatgctcgatgaagcccgtcggattgacgttcaacaggttgaagcaaaa

SEQ ID NO: 23988 - DNA, 1518 bp, Klebsiella pneumoniae
atgcgttatgcacatcctggccagcccggcgccgtggtttcatttaaatcggcttacggcaacttcattgacggtagatttgtcgagccgctgagcggtgaattctttatgaatacttcgccggtcgacggcagcaacattgcgcagtttccccgctcggatgccagagacattgacttcgccctcgacgccgcccatcgcgcggcgccggcgtggggtaaaacctcagtgcaacagcgctccaggctgctgctacaggtcgccgatcgtattgaacagcatctggaatatctggcggtggcggagagctgggacaatgggaaaccgatccgcgaaaccctgaatgccgacctgccgctggcggtggaccattttcgctacttcgccggctgcctgcgcgctcaggagggaagcaccgccgagattgacgaaaccacggtggcctatcatttccatgaaccgctgggggtggtcggacagattatcccgtggaacttcccgctgctgatggccgcgtggaagctggccccggccctggcggcggggaactgcgtggtgctcaaaccggcggaacagacgccgctaagcattaccctgctgctggagctgatcggcgatctgttcccggccggggtgcttaacgtggtgcagggtttcggcaaagaggcgggcgaggcgctggccaccagcaagcgtatcgccaagctggcgtttaccggctccacgccggtcgggcggcatattctcgcctgcgcggcggaaaatattatcccctgcaccgtcgagctgggggggaaatcgcccaacatctacttcgccgacgtgatggacggagaagaggaatttattgagaaggcggtggaggggctggtgctcggcttcttcaaccagggtgaggtctgtacctgcccgtcgcgggcgctgatccatgaatccatctatgagccctttatggcacgggtaatggagaaggtggcgcagatccgccgcggcgatccgttagataccgacaccatgatcggcgctcaggcttcccgccagcagttcgacaagatcctctcctatattcagattgcccgggaagagggtgggcaaattctgaccggcggcgagcgggcggctatcgcgccggcgctggataatggcttttatattcagcctacgctgattaaaggtcgcaacgatatgcgctccttccaggaggagatctttgggccggtgatcggggtgaccacctttaaggacgaagcggaagcgctggctatcgccaatgagacccagtttggtctcggcgccggggtgtggacgcgggataccaacctcgcctatcgcatgggtcgcggcattaaagccggtcgcgtgtggaccaactgctatcatgtctacccggcgcatgcggcgttcggcggctataaacagtccggcgtcgggcgggaaacgcacaagatggcgctggatgcctatcagcaaaccaaaaacctgctggtgagctacggcaccgcgccgctgggcctgttc

SEQ ID NO: 23989 - DNA, 1050 bp, Klebsiella pneumoniae
atgactgatattacgcagttgctgggcaaagatgccgagagcctgttgcagcaccgttgtataaccattccgtccgaccagctgtatctgcctggcgcagattatgttgatcgggtgatggtggataacaaccgaccaccggcggtgctacgcaatatgcagaccctgtacaataccggacgcctggggggaaccggctacctttccattctgccggttgaccagggcgtggagcactcggcgggcgcctcctttgccgccaacccgctgtactttgatccgaaaaatatcgtcgagctggcgatcgaagccggctgtaactgcgtggcgtcgacctacggcgtgctggcctcggtgtcgcgccgctacgcgcatcgcatccctttcctggtgaagctcaaccataacgaaacgctgagctaccccaccgaatacgaccagaccctctacgccagcgttgagcaggcgttcaatatgggggcggtggccgtgggagcgacgatctatttcggctcagaacaatcgcgtcgtcagatagaagagatttccgccgcctttgagcgggcccatgagctgggcctggtcaccgtgctgtgggcctatctgcgcaattcggcgttcaagaaagacggcgtcgactatcatgtttccgctgacctgaccggtcaggccaaccacctggcggctaccatcggcgccgatatcgttaagcaaaagatggcggagaataacggcggctacaaagcggttaacttcggctataccgacgatcgggtgtacagcaaactgaccagcgataaccccatcgatctggtgcgctaccagctggccaactgctatatgggccgcgccgggctgatcaactccggcggcgcggcgggcggggagaccgaccttgccgacgcggtgcgcacggcggtgatcaataaacgcgccggcggcatggggctgatcctgggccgcaaagcgtttaagaaatcgatggccgacggcgtgaagctgatcaatgccgtgcaggatgtttatctggatggcaaagtgactatcgca

SEQ ID NO: 23990 - DNA, 1261 bp, Klebsiella pneumoniae
atgttaaagcgtgaaatgaacatgccgattatgatgccgaactgtggcaggctatggagcaggaaaaagtacgtcaggaagagcacatcgaactgatcgcctccgaaaactacaccagtccgcgcgttatgcatcgcgcagggctctcagctgaccaacaaatatgctgaagggtatccgggcaagcgttactacggcggctgtgaatacgtcgacgtggttgaacagctggcaatcgaccgcgcgaaagaactgttcggcgctgactatgctaacgtccagccgcactccggctcccaggctaactttgccgtctacaccgctgctgctgcagccgggcgacaccgtgctcggtatgaacctggcgcagggcggccacctgactcacggctccccggttaacttctccggcaaactgtacaacatcatcccttacggtattgatgagtccggtaaaattgactatgacgacatggcgaagcaggctcaggaacacaaaccgaagatgatcatcggtggtttctccgcttactccggtatcgttgactgggcgaaaatgcgtgaaatcgctgacagcatcggcgcttacctgttcgttgatatggcgcacgtggcaggcctgattgccgctggcgtgtacccgaacccggttccgcatgctcacgttgtgaccaccaccacccacaaaaccctggcgggtccgcgcggcggcctgattctggcgaaaggcggtagcgaagagctgtacaaaaaactgaactctgccgtgttcccaagcgcgcagggcggcccgctgatgcacgttatcgcggcgaaagcggtggcgctgaaagaagcgatggagccagagtttaaagtttaccagcagcaggttgcgaaaaacgctaaagcgatggtggaagtgttcctgaaccgcggctacaaagtggtgtctggcggtactgagaaccacctgttcctgctggatctggtggataaaaacctgaccggtaaagaagctgacgccgctctgggccgcgccaacatcaccgtcaacaaaaacagcgtgccgaacgatccgaagagcccgttcgtaacctccggtatccgtatcggttctccggcagtgactcgccgcggctttaaagaagcggaagtcaaagagctggctggctggatgtgtgacgtgctggacaatatcaatgacgacgcggtcattgagcgcgtgaaaggtaaagtgctggatatctgcgcccgcttcccggtatatgcgtaagcgtta

SEQ ID NO: 23991 - DNA, 2130 bp, Klebsiella pneumoniae
atgttaattcctaccggtaccagcgtaggtctgaccagcgtcagcctcggtgtgatccgcgctatggaacgcaaaggcgttcgtctgagcgtctttaaacctatcgcccagccgcgttccggtggcgatgccccagaccagaccaccaccatcgttcgcgccagctcctccaccaccaccgccgctgaaccgctgaagatgagccatgttgagtctctgctctccagcaatcagaaagatgtgctgatggaagagatcattgccaactaccacgcgaatactcaggacgcggaagtggtgctggtggaaggcctggtaccgacccgtaagcatcagttcgcccaggcgctgaactttgaaatcgccaaaacgctgaacgctgaaatcgtcttcgtgatgtctcagggcaccgacacgccagaacagctgaacgagcgtatcgaactgacccgtaacagctttggcggcgccaaaaataccagcatcaccggcgttatcgtcaacaaactgaatgcccctgtcgacgatcagggccgtacccgtcctgacctgtcggaaattttcgacgactcgtcgaaagcaaaaatcgtgaagattgacccggctcagctgcagaaaggcagcacgctgccggtgctgggcgcagtgccatggagcttcgatctgatcgcgacccgcgcgatcgacatggcgcaccatctgaatgcgaccatcatcaacgaaggcgatatcaatacccgccgcgtgaaatccgtgactttctgcgcgcgcagcatcccgcacatgctggaacacttccgccctggttctctgctggttacctccgcagaccgtcctgacgtgctggttgcggcctgcctggcggcaatgaacggcgtggaaatcggcgccattctgctgaccggcggctatgaaatggacgcgcgcatcagcaagctgtgtgaacgcgctttcgcgaccggcctgccggtattcatggtcaacaccaacacctggcagacctccctgagcctgcagagctttaacctcgaagtaccggttgacgatcacgagcgtatcgagaaagttcaggaatacgtggccaactacatcaacgccgactggatcgaatcgctgaccgcgacctccgagcgcagccgccgtctctctccgccagccttccgctaccagctgaccgagctggcgcgcaaagccggcaaacgtgtcgttctgccggaaggcgacgaaccgcgtaccgtgaaagcggcggcgatttgcgccgaacgcgggatcgccacctgcgtcctgctgggtaacccggatgagatcaaccgcgtagccgcggcccagggcgttgagcttggcgccggcattgaaatcgtcgatccggaagtggttcgcgaaagctatgtgggtcgcctggtcgaactgcgtaagaacaaaggcatgaccgaagcggtcgcgcgtgagcagctggaagacaacgtggttctcggcaccctgatgctggaacaggacgaagtcgacggtctggtatccggcgcggttcacaccactgccaacaccattcgtccgccgctgcagctgatcaaaaccgcgccgggcagctcgctggtctcctccgtgttcttcatgctgctgccagaacaggtttacgtttacggcgactgcgcgatcaacccggacccgaccgccgagcagctggcggaaatcgctattcagtccgctgaatccgcgattgccttcggcatcgaaccgcgcgtggcgatgctctcctactccaccggtacctccggcgcgggtagcgatgtcgagaaagtccgcgaagcgacccgtctggcccaggaaaaacgtcctgacctgatgatcgacggcccgctgcagtatgacgccgcggtgatggctgacgtagcgaagtccaaagcgccgaactcaccggtagctggccgcgcgaccgtgttcatcttcccggatctgaacaccggtaacaccacgtacaaagcggtacagcgctctgccgacctgatctccatcgggccgatgctgcagggtatgcgcaagccggtcaacgacctgtcccgtggcgcgctggtagacgatatcgtctataccatcgcactgaccgcgatccaatcggctcagcagcagaag

SEQ ID NO: 23992 - DNA, 1476 bp, Klebsiella pneumoniae
atgatacctgtggtcgcgcttgtcgggcgccctaacgttggaaaatccacgctctttaaccgcctgacgcgcactcgtgatgcgctggttgcggatttcccggggctgactcgtgaccgtaagtacggtcgggccgaagtcgaaggccgcgaattcatctgtatcgataccggtggtattgatggtacggaagagggcgtggaaacccggatggcggagcagtcgctgctggcaatcgaagaggccgatgtggtgctgtttatggtcgatgcgcgcgcgggcctgatgccggcggacatcgcgatcgctaaacacctgcgctctcgtgaaaagcccaccttcctggtggctaacaaaaccgacggcatcgacgtcgaccaggcaatggcggacttctggtcgctcggtctgggcgatatctatccgattgccgcttcgcacggccgcggcgtgaccagcctgctggagcaggccctgctgccatgggtcgatgaggttaatccgcaggaagaagtggatgaagacgccgaatattgggcgaaattcgaagccgagcagaatggcgaagcggaagaagagccggaagacgacttcaatccgcaggatctgccgatcaagctggcgattgtcgggcgtcctaatgtcggtaaatcaaccctcaccaatcgcatcctcggtgaagatcgcgtggtggtctacgatatgccgggcaccacccgtgacagcatttatatcccgatgcagcgtgacgagcgcgaatacgtgctcatcgataccgctggggtgcgcaagcgcgggaaaatcaccgacgtagtggaaaagttctcggtgatcaaaacgctgcaggcgattgaagacgccaacgtcgtgctgctggtgatcgatgctcgcgaagggatctccgaccaggacctctcgctgctgggctttatcctcaacagcggccgttcgctggtgatcgtcgttaacaagtgggatggcctcagtcaggaagtgaaggagcaggtgaaggagaccctcgactatcgtctgggctttatcgactttgcccgggtgcacttcatctccgccctgcacggcagcggcgtcggcaacctgtttgaatcggtacgcgaagcctacgacagcgctacgcgccgcgtaagcaccgcgatgctgacccggatcatgaacatggcggcggaagatcatcagccaccgctggtgcgtggccgtcgcgtgaagctgaaatacgcccacgccgggggctacaacccgcctatcgtggtgatccacggtaaccaggtcaaggatctgccggattcctacaagcgctatctgatgaactacttccgtaaatccctggacgtgatgggcacgccgatccgtatccagttcaaggaaggggaaaacccgttcgctaacaagcgtaacaccctgacgccgaaccagatgcgtaaacgtaagcgcttgatcaagcacatcaagaaaagcaaa

SEQ ID NO: 23993 - DNA, 2514 bp, Klebsiella pneumoniae
ttgttgcccgttaccgccgggcgggcggtggcgctggcgacggtgccgacgatgatgttttgtctcagtccgttgagccgggcgctggccgacgactattttgacccggcggcgctggagtttgctgacccgcagcagcaaacctccgatctgcactacttcgccaaacccggcggccagcagccggggacttatcctgtcaccgtggtggttaatgaccaggagctgggtcaggctgatatcacgtttgttgacgatggcgggcagctgcgcccggtgctgacgcccggtcagctggcggagtatggcgtcaacgtcagcgcgtttcccgcctttcaagcgctgcatgaaggcgaaaccttcacccggatcgagaagtttattcccgacgccagcagtcggttcagcttcgctaaccagcgcctgacgctgagtattccccaggcggcgatgaacgtgcaaagccgcggctatgtcgatccgtcgcgctgggacgatggcgtgccggccgcgtttgtcgattactatttttccggcgcgcaaataaagaacgccgacgaaggggagagcagccgctcaaactatctcaatttacgcagcggcctcaacctgggcgcctggcgactgcgcaacatctcctcaatgcagtatgaccagcagcgccggcactgggatacccagagcacctggctgcagcgcgatgtccgctcgctgaagagcttgctgcggatcggcgatacctataccaccggcgatgtgtttgacagcatacagtttcgcggcgtccagctgatgtctgacgatgaaatgctcccggacagccagcgcggctttgcccccaccattcgtggcgtggcgcacagcaatgccaaagtgaccgtctctcagcacgggtatgtgatctacgagacctttgtgtcgccgggggcgttcgccatcagcgatctctaccccacctcgcagagcggcgatctggaggtgaaggtgaccgagagcaatggcgcggtgcgtacctttacccagccctattccgcggtgccatatatgctgcgcgaagggcgcggcaaattcagtctcagcgccggccgctaccactccgggggggcgtcggtgcgctcgccggaatttctgcagggcactttgttctacggtttgacggcgggattcaccctctatggtggtacgcagctggcccgggactatcaggcgtgggcgctgggcctgggccgcggttttggcgagttcggatcgctgggaggggatgtcacccaggccgtcacccgtacgccgtcgggcaagcgctatacgggccattcgctgcgcgctcagtatcagaaaaattttgtcagctcgggcactgcgttcagcctcgccagctatcgctactcgtcaagcggctattacgattttgccgaagccagcgcccttgaaagcgcccaggggcaagtagacaaccggcgtcgccgggaagagctgtcggtgtcgcaaagccttggtggcctgggcagtctggcggtttccgcctggtcgcaggagtactggcatcggcagagtcgggatgagacggtgcaccttgggttctacagcgcctggaaagggatctcctggggcgtgggctattactacacccgcgccagcggccagcaaaaaaatgaccgctcctggtcattcaatatcaatattccgctgggtggtccgctgtccgacagcgcggtgagctacaacaccacctcggacagcaatggctatacctcgcagcagatgtcgctgtatggcgcggtgccgacgcggccaaatctgttctactcggttcagcaaggttatggcaaccagggacgaggcagcaacagcagcgcctccctggactaccacggcggcttcggcaacgcccagatcggctatcgccatgacgccgccagcaaccagttgacctggggaggcgccggctcggtggtcgcgcatccgcacggcgtcaccttcggccagacggtgggtgagagcttcgccatcgtccgggcgccgggggccgccggcgtggcggtgcaaaacggcaacaatgtgcacaccgactggcgcggctatgccgtggtgccctccctgaccgcctaccggaaaaatgtcattaccctcgatacggagtcgatggccgacgacaccgacgtcgaccagcaggggcagaccgtgatccccggcggcggcgcggtggtgatggccaactaccagacccacattggcaaccgggtgctgtttaccctgcgcaatgcccaggggccgctaccgtttggcgccagtgcgcggctgatcgaggaggaggagagcggcaatccgccgggcggcatggtggccgacggcggccaggtgtatctcagcggcgtgccgcaggagggaaccctggcggtgagttggatcgtcaacaatcagtcgcagagctgcacgctgcattttcatcttccggataacccacagcagagtctgaatacggtgaaaaccgtctccggactgtgccagacacgc

SEQ ID NO: 23994 - DNA, 1677 bp, Klebsiella pneumoniae
gtgaacagattattttcctcacatgtgatgcctttccgcgccctcatcgacgcttgttggaaagaaaagtacaccaccgcccgcttcacgcgtgacctgatcgccgggatcaccgtcgggatcattgcgattccgctggcgatggcgctggcgattggcagcggcgtgccgccgcagtacggcctctatacctcagcggtggcaggaattgtgatcgccttgaccggcgggtcacgctttagcgtttccggtccgaccgccgcctttgtggtgatcctctacccggtttcccagcagtttggtctggcgggactgctggtggcgacgctgatgtcggggatctttttaatcctcttcggcctggcgcgctttggccgcctgatcgaatacatcccgctgtcagtcaccctcggcttcacctcggggatcggtatcaccatcggcaccatgcagattaaagatttcctcggcctgcagatgccccatgtgccggagcattatctgcagaaagtggcggcgctggctatggccctaccgaccattaacgttggcgatgccgccatcggcgtcgttactcttggcattctgatcctctggccgcggctgggtatccgcctgccgggccacctcccggcgctgctgggcggctgcgcggttatgctggtggtcaacttgctcggcggcgatgtcacgacgatcggctcgcagttccattatcagctggcggacggcactcagggcaatggcattccgcagctgctgccgcagctggtattgccctgggatatgccgggctcaaactttaccctgagctgggcctcgctgcaggctctgctgcctgccgccttctcaatggcgatgctcggcgccattgaatctctgctgtgcgcggtggtgcttgatggcatgaccggcaccaagcacaaagccaatagcgagctgattggccaggggctgggcaacattatcgcgccgttcttcggcgggatcactgccaccgcggcgattgcccgctcggcggcgaacgtccgcgccggcgccacatcgccggttgccgccgtgatccacgccctgctggtgatcctggcgctgctgatcctcgccccactgctctcctggctgccgctgtcggcgatggccgccctgctgctgatggtggcatggaatatgagcgaggcgcataaagtcatcaatctgctgcgccacgcgccgaaggacgacatcgtggtgatgctgatgtgcatgtcgctaacggtgctgtttgacatggtgatcgctatcagcgtcgggatcgtgctggcttcgctgttgtttatgcgccgtatcgcacgcatgactcatctggcgccggtcaacgtcgaggtgccagacgatgtgctggtactgcgggtaattgggccgctgttctttgccgccgccgaaggcttgttcaacgatctggagacccggatcgctggcaagcgcatcgtggtgctgaaatgggacgcggtgccggttctcgacgccggtggcctggatgccttccagcgctttgcgaacaagctgccggaaggctgtgaattgcgcgtatctaacctcgagtttcagccgctacgcacgctagcgcgcgccggcgtcaagccgctgcccggacgcctgagcttctaccccgatcgtcaggccgcgctggatgacctg

SEQ ID NO: 23995 - DNA, 1649 bp, Klebsiella pneumoniae
gtttccatgtcactgccgttcaaaccccatattatcgccctgctctgtagcgctggcttactcgcggcggcaggaacactctatgtgcaaagccgaaccccagcgacgatcgctgaaccgcctgcgcagcaagcgccagcgcccgcagcgtcgacgacacagccggtggccgccacttacacccaggcgcaaattgatcagtgggtcgcccctatcgcgctctacccggacagtctgctgtcgcaggtgttgatggcctccacttatcccgacaatgtcctgcaggcggtccagtggtcccaggataaccccgcgatgaaaggggatgcggccgtgcaggcggttgccagccagccgtgggaccctagcgtcaaatctcttgtcgctttccctgccctgctggcgatgatgggcgagaatccgccctgggtggaaaatcttggcaatgcgtttttggcccagccgcatgatgtgatggattcagtgcagcgcctgcgcgccattgcccaacaaaccgggacgctgaaatccacaccgcagcagaaagtgattgtcacccctgccgcaccggtttcagccagcagcagcacggcagcaaccgcaaccgcccacacagcggcgcctgcgcccacgcaggtcattaaaatagagccgaccaatccacaggtggtctatgttcccagctataacccctccaccgtctatggtacctggccgaacagcgcctatccgccggtctatctgccgccccctcccggggagcagtttaccgatagcttcgtcaaaggcttcgggtacagcctcggcgtggccaccacctgggcgctgttcagcagtatcgactgggatgatgatgaccatcaccatcacgatgacgactaccaccacggcgattactcgcataatggcgataacatcaatattaatgtaaataatttcaatcatataacaggagaaaacctgccgggaaaccacgttaactggcagcacaatcctgcctatcgcggacacacaccgtatcccgataatacggtagctcagcgcttccatcagaccaacgtttccggcggactgagcgcgacccaacatgcgccagtcgatcgcgaagcgcagcgccaggcagcgatgacccagctgcagcataacgtaccgacggccacagcgggcaatctggcggcaaacaacgcctcacgcgacgcccagcgtcaggcggcctcagcgcagctgaagcaagccacccaacgcagtaattaccgcggttacgacagtacgccgacccaacagcagcgtcgcgaggcggcaaaaacgcagctgaaaaaccccacgccgcagcaacagcagcgtcgagaagccgccaggagccacgagcagaaccgcacacctcagcagcagcagcgccggcagcagttccagtccgccacgccagcccagcgtcagcagacgctcagccatctgcgcgccaacgcccttagcggcaacgaaagccgcgcccccctcctgggcaagcgcagcaggaacgaggactgcagagccgccagttttccggcgtaaaccgcgagttacgcgatggcaccagagaacgtctttccgaacaccatgaactgcgtcgccgctaaggatgagcagaatgagaaacccattatccgttg

SEQ ID NO: 23996 - DNA, 768 bp, Klebsiella pneumoniae
atgctgtggcgagccgccgtcggctcgtcttattcctggcctgcgatggatatcgtcctgcccggcgaacgctatttgcacctcgtcggcagtatccatatgggcacccgcgacatggcgccgccgccggcgaagcttctgaaaaaaatacgccaggccgatgcgttaatcgtcgaggccgatatcagcggcaatgaaaccccgtttagcaatctccccacttacccaccgctggcggaacgcctgagcgatgcgcagctgagcgagctagaggcgcgagccggcgagctgggcctgtcggtcgggctgttcgacagccagccgctgtggcaggtggcgatggtcctgcaggccacccaggcgcagaagctggggctgcgaccggattacggcatcgattatcagttgctgatggccgcccgcgagagcaacatagcggtgatggagctggaaggcgccgacagccaaatcgcgctgctgcgcgatctgcccgacggggggatggcgctgctggaggatacgctgacccactggcgcaccaacgcccgtttactgcaggtcatgatcggctggtggctggagcaaccgccgtcgcgcggcgcggtatcgctgccgacgacctttagccagtctttatatgatgtgctgatgcaccagcgcaacctcgcctggcgcgagacgctgctggccttgccgccggggcgctacgtggttgccgtcggcgcgctgcacctgtatggcgaagggaatctgccggatatgctgaca

SEQ ID NO: 23997 - DNA, 696 bp, Klebsiella pneumoniae
atgaaaattggcattattggcgctatggaagaggaagttacccttctgcgcgacaaaatcgaaaaccgccagaccatcaccattggcggaagcgaaatctataccggccaacttcacggcgttgacgtcgctctgctgaagtctggtatcggaaaagtagcggcggcgatgggcgcgaccctgctgctggagcgctgccagcctgacgtgatcattaataccggttctgccggcggcctggcgtcgacgctgaaggtcggcgatatcgtcgtctccgatgaagcgcgctaccacgacgccgacgtcaccgccttcggctatgaatacggccagctccctggctgcccggcgggttttaaggcggatgaaaaactggtggccgccgcagagagctgcattaaagcgttagatctcaacgccgttcgcggcctcatcgttagcggggatgccttcattaacggctctgtcggtctggcgaagatccgccataatttcccgcaggcgatcgccgtggaaatggaagcgaccgccatcgcccacgtctgccataactttaaggttcccttcgtggtggttcgcgctatctccgacgtggccgaccagcagtcccacctcagctttgaggagttccttgcggtcgccgccagacagtccaccctgatggtggagaatctggtacagaacctggcacgtggc

SEQ ID NO: 23998 - DNA, 738 bp, Klebsiella pneumoniae
atgagtaactggccttatccccgcatcgtcgcccatcgcggcggcggtaaactggcgccggagaacaccctggcggctatcgacgtcggcgcccgctacgggcacacgatgattgaatttgacgccaagctgtcgaaggacgggcagatctttctgctgcatgacgataatctcgaacgcaccagcaatggctggggcgtggcgggcgagctggcgtgggacgatctgctgaaggtcgatgccggtagctggttcagccgtgaatttaagggcgagccgctgccgctgctctcccaggtggcggagcgctgccgtcgtcacggcatgatggcgaatatcgaaattaagccgaccaccgggctggggccgcagaccgggaaagtggtggcgctggccgcgcgcgatctatggcaaggcatgaccgcgccgctgctctcctcttttgaaatcgacgccctggaggcggcgcaggaagccgcgcccgagctgccgcgcgggctgctgctggatgagtggcgcgatgactggcgcgaattgaccacccggttgggctgcgtgtcgattcacctcaatcacaaactgctggatgcggcgcgggtggcgagcctgaaacaggccggcctgcacattctggtgtacacggtcaataaaccccagcgcgccgccgaactgctgtgctggggcgtagactgcatctgcaccgatgccattgatgtcatcgggccgaatttccagcct

SEQ ID NO: 23999 - DNA, 519 bp, Klebsiella pneumoniae
atggctaaaccaaagtattcccctgaaacaaaactggctgtggttaatcattatttgtccggtaaagacggagaacagagtacagccgacctttttggtattgaaagaacatctgtccgtcgctgggtcagggcatggcagttccacggtgcagaaggcctgactgcaaaaaataatcattattccgatgaatttaaactcgtggtcgtccgggcggttatcagtgaccgcctgacgatgcgtgaagcggctgcccggtttaatctctccgcagaaatacttgtccggcgctggctcgacgtgtacaacgatgccggagcggaaggtcttttaaacatgcaatgcggacggcccggacaaatgacaaagccaaaaaatatcccaccactgacagataaagagctggaaaaactctcccccgaagagctcagggccgaactgcgttatctgcgggcagagaatgcctatctaaaaaagttgaaagccttggttcagagcgaaaaaaatggcaaaaagccc

SEQ ID NO: 24000 - DNA, 477 bp, Klebsiella pneumoniae
atgcgaattggacatggttttgacgtacacgcttttggcggtgaaggcccaatcatcattggcggggtacgcattccttatgaaaaagggctgctggcccactccgacggcgacgtcgcgctgcatgcgctgaccgacgcgctgcttggcgccgcggcgctgggcgatatcggcaagctgttccccgataccgatccggcgtttaaaggcgccgatagccgcgaactgctgcgcgaagcatggcgccgcattcaggccaggggctatacgctcggcaacgtcgacgtcacgattattgcccaggcgccgaaaatgctgccgcatattccgcagatgcgcgtctttatcgctgaggatctcggctgccatatggacgacgtcaacgtgaaagcgaccaccaccgagaagctcggcttcaccggccgcggggaagggatcgcctgcgaagcggttgcgctgctgcgtaaggccgacaaa

SEQ ID NO: 24001 - DNA, 129 bp, Klebsiella pneumoniae
gtggaccgtatcggctcggattttcacgagctttcagggcgcgccaaagatatggggtcggcggcggttctgctggcgattatcatcgcgctgatcacctggggaacgctgctgtggagccattatcac

SEQ ID NO: 24002 - DNA, 684 bp, Klebsiella pneumoniae
atggccgcagaatcgcaactgaatccgacgcaacccgtcaatcagcaaatttatcgcatcctccgccgggatatcgttcactgcctgatcccgcctggtacaccgctgtcggagaaagaagtctccgtgcgttttgcggtgtctcgtcagccggtgcgcgaagccttcattaagctggcggaaaacggacttatccagattcgtccccagcgcggtagctacgtcaataaaatctcattgtcgcaggtgcgtaatggttgcttcgtccgccaggcgattgagtgcgcggtggttcgccgtgccgccggcatgattaacgaagagcaactttatcagctggaacagaatcttcaccagcagcgtattgctgttgatcggcagcagttaaacgactttttcctgctcgatgatgaatttcaccagaagctgtcgattatcgccgactgtcagctggcctgggagacagtggaaaatattaaagccgccatcgatcgcgtccgctatatgagtctggaccatgtcacctctccggagatgcttctgcgccagcatcatgagattttcaccgcgctggaaaaacgcgatgccgaggcggtagaaaaagccatgagtatccatttgcatgaaatcagcgaatccgtactgctgattcgccaggagaaccgcgactggtttagtgaagaa

SEQ ID NO: 24003 - DNA, 1005 bp, Klebsiella pneumoniae
atgaaagctatcgccattactcaagccgccgctgacggcaacaacatcccttctttaaccgagatcgacctgccgatccccaccgcccacgggcgtgatctgctggtcgctgtgaaggctatctcggtcaatccggtagacaccaaagtgcgcgccggctttcagggcgacacgccgcgggtgctgggctgggacgccgttggcgtggtgcagtccgtcggtgaggaagtgacgctgttcgcgcccggggacgaggtctggtacgccggcgcgctgggccgggccggcagcaacagtgaatatcagctggtggatgagcgcctggtggcgcacaaaccgcgcaccctcgataatgcctccgccgccgcgctgccgctgacggcgatcaccgcctgggagctgttgtttcaccgtctcggcgttgaggaaggcggcaatgcgggcgacacgctgctaatcgtcggcgcggcgggcggcgtggggtctatcctgacccagctggccagtaaactgaccgccatgacggtgatcggcaccgcctcgcgtccggagagccagcagtgggtccgcgaggcgggcgcgcaccatgtgatcgatcacagcaagccgctcgccgacgagctggcgcgcattggtatcacgtcggtaacccatgtcgccagcctgaccaataccgagcagcacttcaacgcgctgatcgacgccctcgccccgcagggcaagctggcgctgattgatgacccggagaccctggacgtggtgccgctgaaagcgaaaagcctgtccctgcactgggaatttatgttcacccgttcaatgtttgagacggatgatatgatcgcccagcatcagctgctcacccgcgtggcggcgctgatcgacaaccacactatcaaaaccacccttggcgaacactacggcgccatcaccgccgccaatctgcagaaagcgcatcgccagctggaaaccggacgcgccgtcggcaagatcgtgctggaggggttt

SEQ ID NO: 24004 - DNA, 879 bp, Klebsiella pneumoniae
atgactgactcacgctatatagggcgcttcgccccctccccctccggcgaactccacttcggctctctgatcgccgcgctcggcagctacctgcaagcccgcgcgaaccagggtatctggcgtgttcgtattgaagatatcgacccgccgcgcgaagtccccggtgccgccgataccatcctgcgccagcttgaccactacggtctgcactgggatggcgacgtgctgtggcagtcgcaacggcacgaagcctaccgcgaggcgctgacgtggctgggcgagcaagggctgagctattactgcacttgcacccgcgcgcggatccacgccgtgggcgggatctacgacggccactgccgcgacctcgggctgggggcggaaaacgccgcgctgcgcctgcgccaaacccgtccggtgctgcagtttagcgaccgtctgcgcggcacgctcatcgccaatgagccgctggcgcgtgaggattttattatccaccgtcgcgacgggctgttcgcctacaacctggcggtggtggtcgacgaccactttcaggggatcaccgagattgtccgcggcgcagacctgattgagccgacggtgcggcagatttcgctgtatcagcattttggctggcaggcgccggattacctccatctgccgctggctctcaatggcgacggcaataaactctctaaacaaaaccacgcgccggcgctgccggaaggcgatccgcgccccgaaatcgtccgggcgctccgctttctgaatcaggcgatccccgaggagtggcaggccctgagcatcgatgatttactcgcccaggccgtcgccaactggcagccggcgaaaatcgagcattctcaaatggctcccgctgagcta

SEQ ID NO: 24005 - DNA, 858 bp, Klebsiella pneumoniae
atgttagtgtcgatgaaggatatgcttcagcatgccctgcgggacggctacgccgtcggtcagttcaacattaataatctggaatgggtcggcgccgtattaagcaccgcccagcagtgccgctcaccggttattttgggggtgtccggcggcacggttaagcatatgctcgggttaaaatgtattcatgacatcgtggttaacgccatggagtatttgcatattgatgttccggtggcgctgcatctggatcatggcacctcccgggaggcctgcgaagcggcgatcgccgccggcttcagttccattatgtttgatggctcgcatctgccgttcagggaaaacctggccattacccgccacctggtgacgctggcccacagcaaaggtatctctgtggaggccgaactggggaccatcgccggcagtgaagacggcattgtcaattccgaagtcatctacgccgatccgcaggagtgctacaccctggtgacagaaacccaggtggattgcctcgccgccgcgctgggctccacccatggtctgtataaaggtaaagcccggctgggatttaccgagatgaaagccattgccgagcaggtgaaggttccgctggtgctgcatggcggcaccggtattgccgatgaggatatgcgccgggcgattgcctgcggcaccgccaagattaacgttaataccgaaaatatgtacgcctggtgccaacaggtgaaagcaattttcgccgccgacaccgggcacgatgtgaacgatccgcggaaagtcatcgcccagggactgcagccggtacgcgagatgattgcccgccgcatggcgctctttggctcagagcagcgctat

SEQ ID NO: 24006 - DNA, 489 bp, Klebsiella pneumoniae
gtgaacatgaacgcaacaatcctcggccaggccatcgcgtttgttatcttcgtatggttctgcatgaaatacgtatggccgcctttaatggctgccatcgaaaaacgccagaaagagatttctgacggtttagcttctgcagaacgcgctaagaaagatttggaccttgcacaggccaacgcgaccgaccagctgaaaaaagcgaaagcggaagcccaggtaatcattgagcaggcgaacaacgccgctctcagattctggacgaagctaaagctgaagcagaacaggaacgcaccaaaatcgttgcacaagcgcaggctgaaattgatgctgagcgtaaacgtgcacgcgaggagctgcgtaagcaggtcgctatcctggctgttgctggcgccgagaagatcatcgaacgttccgtggatgaagctgctaacagcgacatcgtggataaacttgtcgctgaactgtaaggagggaggggctgatgtc

SEQ ID NO: 24007 - DNA, 1281 bp, Klebsiella pneumoniae
atgaaaaagaccaaaattgtttgcaccatcggtccgaaaaccgaatctgaagagatgctgaccaaaatgctggaagccggcatgaatgtgatgcgtctgaacttctcccacggtgactatgcggaacacggtcagcgcatccagaacctgcgcaatgtgatgagcaaaaccggtaagaaagccgctattctgctggacaccaaagggccggaaattcgtaccatcaagctggaaggcggcaacgacgtctccctgaaagcaggccagaccttcaccttcactaccgataaatccgtcatcggcaacaacgaaatcgttgcggtaacctatgaaggcttcacctccgacctcaccgtcggcaacaccgtcctggtggacgatggcctgatcggtatggaagtcacggctatcgaaggcaacaaagttatctgtaaagtgctgaacaatggcgatcttggcgagaacaaaggcgttaacctgccgggcgtctccatcgccctgccggcgctggctgagaaagacaaacaggatctgatcttcggttgcgaacagggcgtggacttcgtcgcggcctccttcatccgtaaacgttccgacgtcgtcgagatccgtgagcacctgaaagcccacggcggcgaaaacatccagatcatctccaaaatcgaaaaccaggaaggcctgaacaacttcgacgaaatcctcgaagcgtctgacggcatcatggttgcgcgtggcgacatgggcgtggagatcccggttgaagaagttatcttcgcccagaaaatgatcatcgaaaaatgtatccgcgcgcgtaaagtggttatcaccgccacccagatgctggactccatgatcaagaacccgcgtccgacccgcgctgaagccggcgacgtggctaacgccatcctcgacggcaccgatgcggtgatgctgtccggcgaatccgcgaaaggtaaatacccgctggaagcggtcaccatcatggcgaccatttgcgaacgtaccgaccgcgtgatgaccagccgtctggacttcaacaacgacaaccgtaaactgcgcatcaccgaagcggtgtgccgcggcgcggtagaaaccgctgagaaactggaagcgccgctgatcgtggtcgccacccagggcggtaaatccgcacgcgctgtgcgcaaatacttcccggatgccaccatcctggcgctgaccaccaacgaaaccaccgctcgtcagctggtgctgagcaaaggcgtggtaccgcagctggtggaagagattgcctctaccgat

SEQ ID NO: 24008 - DNA, 165 bp, Klebsiella pneumoniae
atgctggtgctggaagatgacggttgcggcctgccgccggggtcgaatctgcaggggttcggcctgaccggcatgcgcgagcgcgtgaccgccctgggcggcacactgacgatctcctgcacccacggtacccgggtgtgcgtcaatctaccgctgcgttacgcc

SEQ ID NO: 24009 - DNA, 1731 bp, Klebsiella pneumoniae
gtgaacaaaaaagccatggccgcggcggtcagcatgatcctcgccggtggcgcgcacgccgcgcagcaggagcgtccaaacgtcatcgtgattatcgccgatgatatgggctactcggacatcagcccctttggcggcgagatccccacccccaatctgcaggcgatggccgagcagggaatgcgcatgagccagtattacacctcgccgatgtcggccccggcgcgctcaatgctgctcaccggcaacagtaaccagcaggctgggatgggcggcatgtggtggtacgacagcaccattggcaaggagggctacgagctgcggctgaccgaccgcgtcaccaccatggccgagcgctttaaagacgcggggtataacaccctgatggccggtaaatggcacctcggttttgttcccggcgccacgccgaaagatcgcggctttaatcacgccttcgcctttatgggcggcggcaccagccactttaacgacgcgataccgctggggaccgttgaagccttccacacctactacacccgcgacggcgagcgcgtctccctaccggatgatttttactccagcgaagcctacgcccgccagatgaacagctggattaaagcgacgccgaaggaacagccggtcttcgcctggctggccttcaccgcccctcatgatcccctgcaggcgccggacgagtggattaagcgcttcaaaggccagtatgagcagggttacgccgaggtctatcgccagcgcatcgcccgcctgaaagcgctgggaattatccatgacgataccccgctgccgcatctggagctggataaagagtgggaggcactaacgccagagcagcagaaatatacggcaaaagtgatgcaggtatatgcggcgatgatcgccaatatggacgcgcaaatcggcaccctgatggagacgctgaaacaaaccgggcgcgataaaaataccctgctggtctttttaaccgataacggcgccaacccggcgcagggtttctactacgaatctaccccggaattctggaagcagttcgataacagctatgacaacgtcggccgcaaaggatcatttgtctcctacggcccccactgggccaacgtcagcaacgccccctacgccaattatcacaaaaccaccagcgcccagggcggcatcaataccgactttatgatctccggtcccgggatcacccgccacggtaaaatcgacgcctcgacgatggcggtgtatgacgtggcgccgacgctatatgagttcgccggcatcgatccgaacaagtcgctggcgaagaagtcggtgttgccgatgatcggcgtcagctttaagcgctatctcaccggcgaagtacaggagccgccgcgcggcaactacggggttgaactgcatcatcaggcggcctgggtcgatggcgaatggaagctgcgacggctggtgccgcgcggcctcaccgccggcgacgcgccgtggcagctgtttaatctgcacgacgacccgctggagacgcatgatgtcgcggccgaacatcccgatcgggtcaaagccatgagcgaggcctacgaggcatttgctaagcgcaccatggttaccaaagcgcagggcaaaatgatcgactacgtcggtatcgatagcaaaaccgggcgctatctggcggtcgaccccgccaccatgaagccggtgcctgcgccgcaggcgatccctgtgagcgagatccat

SEQ ID NO: 24010 - DNA, 891 bp, Klebsiella pneumoniae
atgaagattgcggcatttgatatcggtggcaccgcgttaaagatgggcgtgatggcccgcgacggcaggctgctggaaaccgccaggcagtcaatcaatgacagcgatggcgatcggatcttacaggcaatgctgtcgtggctggcggcccatccgtcatgtgaaggaatagccatcagcgcgccgggctatatcgatccgcacagcggttttatcaccatgggcggcgctatccgtcgatttgataacttcgccatgaaatcgtggctcgagacgcgaaccgggctgccggtctcggtggaaaacgacgccaactgtgtgctgctggccgagcgctggcagggcaaagcggcggagatggccaattttctggtgctcactatcggtactggcatcggtggggcgattttctgccaacaccagctgatcaacggggcgcgttttcgtgccggcgaattcggctacatgcttaccgaccgtcccggcggacgcgatcctcgtcgctattcaatgaatgagaactgcactctgcgggtgctgcgccatcgctatgcgcaacatattggcgcgccgctggatagcgtgacaggcgaactgattttcgaccgctatgacgccggcgacccggtttgtcagcgtctggtcgccgagttcttcaatggcctgggccatggcctttataacctcgtccatatcttcgatccgcagaccatttttatcggtggcggcgttgtggaacgcccaggatttctgacgctactgcgccagcatctggcctggttcggcattgccgactatctcgataccgtcagtcacggcaacgatgccggcctgattggcgcggtttaccattttaatcagctgtatcgttcgccagacgacgatcgacat

SEQ ID NO: 24011 - DNA, 3681 bp, Klebsiella pneumoniae
gtgagcagcaaagttgagcaactgcatcagcagttaaaagaacgtattctggttctggatgggggcatgggcaccatgatccagggctatcgtctgagtgagcaggactttcgcggtgagcgctttgctgactggccgtgcgacctgaaaggcaacaacgacctgctggtgctcagcaaacccgaagtgatccgcgagatccacgacgcctatttcgaggccggcgcggatatcattgagaccaacacctttaactcgacgaccatcgcgatggcggattaccagatggaatccctgtcggccgagatcaactttgccgcggcgaagctggcccgcgccagcgccgacgcctggacggcccgcacgccggaaaaaccgcgctatgtcgcgggcgtgcttggcccgaccaaccgcaccgcctctatctcgcctgatgtgaacgatccggcgttccgtaatattacctttgaccagctggtggccgcctatcgcgaatccacccgggcgctggtggaaggcggcgtggatctgatcctgattgaaacggtgtttgacaccctgaacgctaaagcggccatctatgcggtgaaagaggagctggaggcgttaggcgttgacctgccgctgatgatctccgggaccattaccgatgcctctggccgcacgctttccggacagaccaccgaagccttttataactcgctgcgtcacgccgaagccttatcgtttggtctgaactgcgccctcgggccggacgagctgcggcagtacgtccaggagctgtcgcgcattgccgaatgctacgtcaccgcgcacccgaacgccggcctgcccaacgctttcggcgaatacgatctggacgccgacaccatggcgacgcaaattcgcgaatgggcggaagccggtttcctcaatatcgttggcggctgctgcggtaccaccccggagcatatcgccgccatgagccgggcggtagcgggcctgccgccgcgtcagttgccggaaattgcggtggcctgccgcctcgccggcctggagccgttgaatatcggcgacgatagcctgttcgttaacgtcggtgaacgaactaacgtcaccggctcggcgaaatttaagcggctgattaaagaagagaagtacagcgaagcgctggacgttgcgcgtcagcaggtggaaagcggcgcgcagattatcgatatcaacatggacgaggggatgctcgacgcggaagcggcgatggtgcgtttccttaacctgattgccggcgagccggacattgcccgcgtgccgatcatgattgactcctccaagtgggaagtcattgaaaagggcctgaaatgtattcagggcaaaggcatcgttaactcgatttcgatgaaagagggcgtcgaatcctttatccaccatgcgaaactggttcgccgctacggcgccgcggtggtggtgatggccttcgacgaggttggtcaggccgacacccgcgaacgtaaaattgagatttgccgtcgcgcctacaaaatcctcaccgaagaggtcggcttcccgccggaagatattatcttcgaccccaatatctttgccgtcgccaccggtatcgaagagcataacaactacgcacaggactttatcggcgcctgcgaagacatcaaacgcgagctgccgcatgcgctaatctccggcggggtctccaacgtctccttctccttccgcggtaatgacccggtacgtgaggcgatccacgccgtattcctctactacgcgatccgcaacggcatggacatggggatcgtcaacgccggtcagctggccatctatgatgacctcccgggcgagctgcgcgacgcggtcgaagacgtgatcctcaaccgccgcgatgacagtaccgaacggttacttgagctggcggaaaaatatcgcggcagcaaagcggacgacggcgcgaatgcccagcaggcggagtggcgcacctgggaagtgaaaaaacgcctcgaatattcgctggttaagggcattaccgaatttatcgaacaggacaccgaagaagcgcgtcagcaggccgcccgcccgattgaggtcattgaagggccgctgatggacggcatgaacgtggtcggcgatctgttcggcgaaggcaaaatgttcctgccgcaggtggtgaaatccgcccgtgtaatgaaacaggcggtggcctaccttgagccgtttattgaagccagtaaagagcagggctccagtaacggcaaaatggtgattgccacggtaaaaggcgacgttcatgacattggcaaaaacatcgtcggcgtggtgctgcagtgcaataactacgaaatcatcgatcttggcgtgatggtcccggcggataaaattctcaaaacggccaaagaggtaaacgcggatctaattggtctttccgggctgattaccccatcgctggacgagatggttaatgtggcgaaagagatggagcgccagggctttaccatcccgctgctgataggcggcgcgaccacctcgaaagcgcatacggcggtgaaaatcgagcagaactacagcggccccaccgtttacgtacagaacgcctcgcgcaccgtcggcgtggtgtctgcgctgctctcggacacgcagcgcgacgagtttgtcgcccgcacgcgcaaagagtatgaaacggtgcgtatccagcatgggcgtaaaaaaccgcgtacgccgccggtgacccttgccgccgcgcgggaaaacgatctggcctttgactgggagagctacacgccgccggtggctcatcgtctgggagtacagacggtggaagccagtatcgagactctgcgcaactacatcgactggacgccgttcttcatgacctggtcgctggcgggtaaatatccgcgcattctggaagatgaagtggtaggggaagaggcgcagcgcctgttcaaagacgctaacgagctgctggataagcttagcgcagagaaaaccctgaacccgcgcggcgtggtgggtctgttcccggccaaccgcgtgggcgacgatattgaaatctatcgcgatgaaacccgcacccacgtgctgacggtgagccatcatctgcgccagcagacggagaaggttggcttcgccaactactgtctcgccgattttgtcgcgccgaagctgagcggcaaggcggactacatcggcgccttcgccgtgaccggcggcctggaagaggacgcgctggcggacgcctatgaagcgcagcatgatgactataacaagatcatgattaaagccatcgccgatcgcctggcggaggcctttgccgagtatctgcatgagaaagtgcgcaaggtttactggggatatgcggccaatgagaacctcagcaatgaggagcttattcgcgagaactaccaggggatccgaccggcgccgggatatccggcctgtccggagcacaccgaaaaggggaccatctggcagctactggacgtcgaagcccataccggcatgaagctcaccgagtctttcgccatgtggccaggcgcatcggtttccggctggtacttcagccatccggacagtaagtacttcgccgtggcgcagatccagcgcgatcaggtcgaagattacgcgctgcgtaaaggaatgacgccggcggaggtcgagcgctggttagcgcctaatctgggctatgatgcggac

SEQ ID NO: 24012 - DNA, 1005 bp, Klebsiella pneumoniae
atgtcttatcgaatcagtattctggataaaagtccgcttgccgccggggaaaccgccgcgcaggcgctggcgcgtacattaacgctggcgcaacacgccgaagcctggggctaccaccgcttctgggtcgccgaacaccacaataccgatcagctggcgagcccctcgccggagctggttatcgcctggctgctgggccacacccggcggatccgtcttgggtccggcggcgtcatgctccagcactatagcccctataaggtcgcggaaaactttaacctgctggccgccctcgcgccgggccgcatcgatctcggggtcggcaaggcgcctggcggcctgccgctctccacccgcgccctgcagcagggcctgcatcaagaggagaaagggacctttgccgatcagctggcgcagctggataactggctgtcgctgactgagcccgggggagaggagagcctacgcgccacgccgatcccgccgcgccgggcagatggttttctgctcggcgccagcctggagagtgctgaactggccgcccgccttgactggaactttgtctttgccgcccatctcaatggcgacagcgcgctgcgccgtgccgtgttcaaccgctggcgcgagctcagcccgcgtgaggcgatcgtcgccgtccaggtggtggtcgctgacgatccggccaccgccgccgcgctggcgcagcaggtcgaggtgtggggcgtcgagctggagaacggccagcgggtgaccgtcggcagtgaggcgcaggccgtcgcttttgcccgccaggccggcagccgaccgacgcgcattgcccgccgtgaatcttcgctgatctccggtactcccgaacaggttaaagcccggcttgacgcgctgcaggcggaagaacagttggatgaactcatcattgatacccccattagcgacgggccagcgcgcctgcactccctgcgcctgctggcgcaggctcactacggcaaggaggtgctgaatgtcctt

SEQ ID NO: 24013 - DNA, 273 bp, Klebsiella pneumoniae; identical to SEQ ID NO: 19918

SEQ ID NO: 24014 - DNA, 111 bp, Klebsiella pneumoniae
atgcgtcgcctgtttaatatgctggtcaacaacgtgcgcgagcattttatgatctacctggcgctctggctgctgctggcgatcatcgatctcgtctggttatggtttttc

SEQ ID NO: 24015 - DNA, 489 bp, Klebsiella pneumoniae
atgagactgacatctaaagggcgttatgccgtgaccgcgatgcttgacgttgcgctcaactctgaaatgggcccggtgccgttggcagatatttcagagcgtcagggaatttcgctttcctatctggaacagctgttctctcgcctgcgtaaaaatggcctggtttccagcgttcgtggcccaggtggtggttatctgttaggtaaagatgccggcagtatcgccgtcggcgaagtcattagcgccgtggacgaatccgttgacgccacccgttgccagggcaagggcggctgtcagggcggcgataaatgcctgactcacgcgctgtggcgcgacctgagcgagcgcctgaccggcttcctgaacaatatcaccctcggggaactggtgaataaccaggagatcctcgatgtttccggtcgtcagcatcagcacgaaacccagcgcaatgcgcgcacccaggacgcgattgacgttaaactgcgcgcc

SEQ ID NO: 24016 - DNA, 2601 bp, Klebsiella pneumoniae
gtgagttggccgcagggcgatctgaactgtgccgcaatcaaggcgcacatcgataccttccagcactggctgggcgaggcgtttgactccggcatcgtcgcggagcagctcatcgcggcgcgcaccgaatttatcgaccagttgctgcagcgattatggatcgcctgcggttttgaatccgtcagcgacctggcgctggtcgccgtcggcggctatggccgtggcgaactgcacccgctctcagacgtcgatctgctgatcctcagtcgtaaaaaactgccggacgaccaggcgcaaaaagtcggcgaactgctcaccctgctgtgggacgtcaagctggaggtgggccacagcgtacgcaccctcgaagagtgcctgctggaaggtctctcggatctgaccgttgccaccaacttaatcgaatcgcgcctgctgatcggcgacgtcgcgctgttccttgaactgcaaaaacatatttttagcgacggcttctggccatcggaaaagttcttcgccgccaaggtcgaagagcagaacgtccgtcatcagcgctatcatggcaccagctataacctcgagccggacgtgaaaagcagccccggcggcttgcgcgatatccatacgctacagtgggtggctcgccgccatttcggcgccacctcaatggatgagatggtcggcttcggctttctgaccgaagccgagcgcaatgaactcaatgagtgtctgcatcagctgtggcgcatccgtttcgcgctgcatctcgaactcacgcgctatgacaaccgtctgcttttcgaccgccagctcagcgtggcccgccggctaggctatgaaggcgacggcaaccagccgattgagcatatgatgaaggacttcttccgcgttacccgccgggtgagcgagctgaatcagatgctgcttcagctgtttgaggaggccatcctcgccctgaccgaggatgaaaaaccacgcccgatcgatgatgatttccagctgcgcggcacccttatcgatctgcgtgacgacacgctgtttattcgcgaaccgcaggccattctgcgcatgttttatatcatggtgcgcaacagcaccatcaccggcatctactcaacgacgttgcgccatctgcgccacgcccgccgtcatctcacccagccgctgtgctatatcccggaggcgcgcacgctctttcttagtatgctgcgccatcagggggcggtaagtcgcgggctgctgccgatgcatcgccacagcgtactgtgggcctatatgccgcagtggtcgcatatcgtcggccagatgcagttcgacctgtttcacgcctacaccgtcgatgaacacaccgtccgggtgatgctcaagctggaaagctttgccaaagaagaaacccgcagccgccacccgctgtgcgtggagctgtggccgcgcttaacgcacccggagctgatcttaattgctgccctgttccacgacatcgccaaagggcgcggcggcgaccactcgatcctcggcgcgcaggatgtgctgaagtttgccgagctgcacgggctgaactcgcgcgaaacgcagctggtcgcctggctggtgcgtcaccacctgctgatgtcagtcaccgcccagcggcgcgatattcaggatccggaggtgattaagcagttcgccgaggaggtgcaaacggaaaatcgtctgcgctatctggtgtgtctgaccgtcgccgatatctgcgccaccaacgaaaccttgtggaacagctggaagcagagcctgctgcgtgaactctatttcgccaccgagaagcagctgcgtcgcggcatgcaaagcaccccagacatgcgcgaacgagtgcgtcaccatcagctgcaggcgctggccctgctgcggatggacaatattaatgaagaggcgctgcatcagatctggaaccgctgccgcgccaactatttcgtgcgacatacgccgacgcagctcgcctggcacgcccgcaacctgctgcgccacgatctgaataaaccgatgatcctgctgagctcgcaggccacccgcggcggtacggagatttttatctggagcccggatcgcccttacctgttcgccgcggtgtgtggcgaacttgaccgtcgcaacctcagcgtccacgacgcgcagatcttcaccacccgcgacggtatggcgatggatacctttatcgtccttgagcccgacggcagccccctttccgccgaccgccacgaggcgatccgccaggggctggagcagaccatcactcagcgcagctggcagcctccggccccgcgtcgtcaggcggcaaagctacgccatttttccgtggacaccgaggtgaatttcctgccgacccataccgaccgaaaatcgtttctggagctgatagcgctcgaccagcccgggctgctcgcccgcgtcgggcaggtgttcgccgacctcgggatatcgcttcacggggcgcgaattacgacaattggtgagcgagtagaagatttatttataatcgccaccgccgaccggcgtgcccttaataatgagctgcaacaagaagtgcaacaacggttgacagcggccctcaatccaaacgataaaggg

SEQ ID NO: 24017 - DNA, 1485 bp, Klebsiella pneumoniae
atgcaatacatcaaaatccattcgcaggataacgtcgcggtcgcgctgacggatatcgctgccggtagcgtggtgacgattgataatgactcggtcaccctcggccaggatatcgttcgcggccacaagtttgcactgcgcgctatcgcgaaaggggaaaacgtcgttaagtacgggttgccgattggccatgcgctggcggatatcgcgccgggcgagcatgttcatgcgcacaatacgcgcaccaatctcagcgaccttgacgcgtatcgctatcaaccggacctggttgcccaaccgccacagcctgcggatcgcgaagtacagatttatcgtcgcgccaacggtgacgtcggcgtgcgcaatgagctgtggatcctgccgaccgtcggctgcgtcaacgcgatggccagacaaatgcagaaccgtttcctgaaagagacgtatggcgctgaggatatcgatggggtacatctcttcagccacacctatggctgctcgcagcttggggacgatcacatcaacactcgcaccatgctgcaaaatatggttcgtcacccgaacgccggggcggtgctggtggttggccttggctgtgaaaacaaccaggtggaggcctttcgcgagacgctgggcgagtttgacccgcagcgcgtgcactttatggtttgccagcatcaggacgatgaagtggaggcgggggttgagcatctgcatcagctgtatgaagtgatgcgtcaggataaacgccagccgggcaagctcagcgagctgaagtttggcctcgagtgcgggggatcggacggcctgtcgggcattaccgctaatccgatgctgggccgcttctcagactatgtgatcgccaacggcggcactaccgtgctgaccgaagtgccggagatgttcggcgctgaacagttgttgatgagccactgccgcgacgaagcgaccttcgacaagctggtgaccatggtcaatgactttaagcagtactttattgctcacgaccagcctatttacgaaaacccctcgccgggtaataaggccggagggatcactaccctcgaagataagtcgctgggctgtactcagaaagcgggctccagccaggtggtggatgttctgcgctacggcgagcgcctgaaggttcatggtctgaatttactgagcgcgccgggcaacgacgcggtcgccaccagcgcgctggccggcgccggctgccatatggtgctgttcagcaccggtcgcggcacgccgtacggcggctttgtgccaacggtgaagatcgccaccaacagcgagctggcggcgaagaaaaagcactggatcgactttgatgccggacagctgctccacggcaaaacgatgccgcagctgctggaagagtttgtggatgccattgtagccttcgccaacggtaaaccgacctgtaatgagcagaatgacttccgcgagctggccatctttaaaagcggtgttaccctg

SEQ ID NO: 24018 - DNA, 810 bp, Klebsiella pneumoniae
atgcgtagagacgttctgttattactgtgttcattttatctgttacctctgggcgcacatgccgatgatagcggactgagcgccaaagatattaagacgttgtttttcggtcacgatgaccgcaaagcggtgaaccgccccgaggagagtccgtgggacgcgattggccagttggaaaccgccagcggcaatctgtgtacggcgacgctcatctctccgcatctggcgctgaccgcgggccactgtctgttaacgcccccgcgcggcaagccggacaaagcggtcgccctgcgctttatttcccgcaagggcaactgggtctatgagatccacggcattgacgggcgagtcgatcccagcttaggcagacgcctgaaagccgatggcgacggctggattgtcccttccgctgcggcgccgtccgattttggcctgatcgtgctgcgctatgctccgtctggcattacgccgatcccgctctttccgggcagcaaggccgatctcaccgccgcgctgaaggcggcggaccgtaaagttacccagtctggctatcctgaagatcatctcgataatctttacagccaccaggattgcatcgtgacagggtgggcgcaaaccagcgtactgtcgcatcagtgtgacaccctgcctggcgacagcggctcgccgctgctgctgaaaacggaggacggctggcaggtgatcgccgtgcagagttcggcccccggcccgcaggatcgctggcgggcggacaatcgcgccattgcggtgactggctttcgcgataagctggaggcgcttgccggtgag

SEQ ID NO: 24019 - DNA, 915 bp, Klebsiella pneumoniae
atgatcattcggccagaacaacactggtttcttcgcctatttgactggcacggctccgtgctgtcgaaaatcatctttcgcctgctgctaaatgtgctgatgtcgatcatcgccattatcagctatcaatggtacgaacagctggggatccacttaaccgtggcgccgttcagcctgctggggattgcgattgcgattttcctcggctttcgcaacagcgccagctacagccgcttcgtcgaggcgcgcaatctgtgggggacggtgcttatcgccgaacgcacgctggtgcgtcagctgcgcaatatcctgccggcggaacacgatgcccatcgccgcatcgtcagctatctggtggcctttagctggagcctgaagcaccagctgcgcaaaaccgatccgacggctgacctgcggcggttgctaccggaggagagggtgacggagatcctcgccagctcaatgcccaccaaccggatcctgctgctggccggcaacgaaattggccagctgcgggaggcgggcaagctcagcgacatcacttacgggctgatggacaacaaactcgacgagctggcgcacgtgctgggcggttgtgaaaggctggccaccaccccggtgcctttcgcctataccctgatcctgcagcgtaccgtctacctgttctgtacgctgctgccgttcgccctggtcggcgatctgcactacatgacgccgtttgtctcggtctttatctcttacacctttttatcgtgggattcgctggcggaagagctggaagatccgttcggcaccgcagccaatgacctgccgttgaacgcgatgtgcaataccatcgagcgcaatctgctcgacatgaccggtcagcatccgctgccggagacgctgcgtccggaccgttacttcaatctgacc

SEQ ID NO: 24020 - DNA, 786 bp, Klebsiella pneumoniae
gtggaagctttcattctcagcgcagtggaacagggcgtcatgaccattaccctcaatcgcccggaccgcctcaacagttttaacgatctgatgcatcaccagctggcggaatgtctgaagcaggccgagcgcgatgatggcgtgcgctgcctgctgatcaccggcgccggccgcggtttttgcgccggccaggatttgaacgaccgcaatgtcgaccccagcggcccgccgccggatctcggcatgtcggtagaacgcttttacaacccgctggtacgccgtctggcggcgctgccgaaaccggtcatctgcgcggttaacggcgtggccgccggcgcgggcgctaccctggcgctgggctgcgatatcgtgctggccgcgcgttcggccaaatttgtgatggcgttcagcaagctcggcctggtgccggactgcggcggcagctggttcctgccgcgggtggccggccgtgcgcgcgcgatggggctggcgctgctgggcgacagcctcagcgcggaacaggccgcgcagtgggggattatctggcaactggtggacgattcagaactggcggataccagtctgcaactggcgcgccatcttgcggcgcaaccgacgtttggtcttgggctgattaaaaaggcgctgctggcttctgaaaccaacagtctcgacgcgcagctggacctggagcgcgattatcagcgtctggccgggcgcagcgatgattaccgcgaaggggtcagcgcgtttctggccaaacggccaccacagttcagcgggaaa

SEQ ID NO: 24021 - DNA, 840 bp, Klebsiella pneumoniae
atgctcagttatcgccacagctttcacgcaggcaaccacgccgacgtcctcaaacacaccgttcagagcctgatcattgaatcactgaaagagaaagaaaaaccgtttctctacctggacactcacgccggcgcgggccgctatcagctgagcggcgagcacgccgaacgtaccggcgagtatcttgaaggcatcgcccgcatctggcagcaggacgacctgccggcggagctggagccgtatatttcggtagtcgaacacttcaaccgtaacggccagctgcgctactacccgggctcgccgctgattgcccgccagctgctgcgcgagcaggacagcctgcagatgacagagctgcacccgagcgacttcccgctgctgcgcgctgaattccagaaagacagccgcgcgcgcgtcgataaagccgatggctaccagcagctgaaagccaagctgccgccggtatcgcgccgcggtttgattctgatcgacccgccgtacgaaattaaaaccgactatcaggcggtggtcaccgggattaacgaaggctacaaacgcttcgccaccggcacctacgccctgtggtacccggtggtgctgcgcgcgcaaatcaaacgcatgatcaaagagttagaagccaccggcattcgcaaaatcctgcagattgagctggcggtgcgtccggacagcgaccagcgcggcatgaccgcctccgggatgatcgtcatcaacccgccgtggaagctggagcagcagatgaataacgtgctgccgtggctgcacagcaaactggttccgaccggcaccggccacgccaccgtcagctggatcgtaccggag

SEQ ID NO: 24022 - DNA, 528 bp, Klebsiella pneumoniae
atggctaaaccaaagtattcccctgaaacaaaactggctgtggttaatcattatttgtccggtaaagacggagaacagagtacagccgacctttttggtattgaaagaacatctgtccgtcgctgggtcagggcatggcagttccacggtgcagaaggcctgactgcaaaaaataatcattattccgatgaatttaaactcgtggtcgtccgggcggttatcagtgaccgcctgacgatgcgtgaagcggctgcccggtttaatctctccgcagaaatacttgtccggcgctggctcgacgtgtacaacgatgccggagcggaaggtcttttaaacatgcaatgcggacggcccggacaaatgacaaagccaaaaaatatcccaccactgacagataaagagctggaaaaactctcccccgaagagctcagggccgaactgcgttatctgcgggcagagaatgcctatctaaaaaagttgaaagccttggttcagagcgaaaaaaatggcaaaagccctgataatcag

SEQ ID NO: 24023 - DNA, 1314 bp, Klebsiella pneumoniae
atgtctgaaagatcttcaagtgcactggtctctgttgtgatacctgtgcacgatgctgcagaatatatatctgatacgctaagttccattttatcgcaatcgttacaggatattgaagtcatcattattgatgacaattcagctgatgatacgttaaagctactgcagtcctttgccgctaatgactcgcgaatacgtcttttgaataattcgcagaatatcggtgcaggtgcatcacgtaacatgggcttaaaaatagcaagtggcgaatatatcatttttcttgatgatgacgattatgccgatgctaatatgctcaaacggatgtatgatcatgctgcattgctgcaagccgatgtggttatctgccgatgccagtctttagatctacaaacccattcatatgcacctatgccatggtctgtgcgcgtagatttactcccccaaaaagaactattttcatcagatgaaattactcataatttctttgatgcatttatctggtggccctgggataagcttttccgtcgccaggctatactggatactgggttacaattccaggatttaagaacgactaatgatttattttttgttagcgcttttatgctacttaccaaaagaatggcgttcctggatgagatcttgatttctcattccattaatcgcagtggttcattatcggtgaccagagagaaatcatggcactgtgctcttgatgcgttacgtgccctctattcatttattgactcaaagcacttgttgccttcacgtggtagagactttaataattatgcagtgacttttcttgagtggaatttaaatacgatttctggtccggcgtttgattctttattcactgcttcacgcgaattcatcgcctcattggatattgatgaaagcgatttttatgatgattttatcaaagcggcacactatcgcctgattcggttaacgccggaagagtatcttttctcgttaaaagatcgggtattacatgagcttgaatcctctaatttatcttcagagaagttgcaagccagtattgcttctcaggatcaagttcttaaagccagggaagaagaaattgatgagctaagagcgtccgttgcacagaaaaaagaacgtattgataggttggtccagcgaaatgcatatttagagactgagtatcagaaacagcaagatcaattaactaaactacaaaatgaattaaataacgctgctcaacgttattcagtccttatttcatcattgtcatggaaagttacaagacctttaaggttaatcaaagcgttaatcacgaggaaaatg

SEQ ID NO: 24024 - DNA, 1166 bp, Klebsiella pneumoniae
ttgattaagtcagcgctattggttctggaagacggaacccagtttcacggtcgggccatcggggcaaccggcacggcggttggggaagtcgttttcaatacttcaatgaccggttatcaagaaatcctcactgatccttcctattcccgccaaatcgtcactcttacttatcctcatattggtaatgtcggcaccaacgccgccgatgaagaatcttctcaggtacatgcgcagggtctggttattcgcgacctgccgctgattgccagcaacttccgcagtactgaagacctctcttcttatctgaagcgccataacatcgtggcgattgccgatatcgatacccgcaagctgacgcgtctgctgcgtgagaaaggggcgcagaacggctgcatcatcgcgggcgacagcccggatgcccagctggcgctggaaaaagcgaaagcgttcccgggcctgaacggcatggacttggcgaaggaagtgaccaccgcagaaacctatagctggacgcaaggcagctggaccctggcgggcgacctgccggaagcgaaagcggaaagcgagctgccgttccacgttgtggcatatgacttcggcgcgaaacgcaacatcctgcgcatgctggttgaccgcggctgccgcctgacggtggtgccggcgaagacctccgccgcggacgtgctggcgctcaatccggacggtatcttcctctccaacggccctggcgacccggcgccgtgcgattacgctatcgaggcgattgaaaaattccttgagaccgatattccggtattcggcatctgccttggccatcagctactggcgctggcgagcggtgccaagaccattaagatgaagttcggccaccacggcggcaaccacccggtgaaagatattgataacaacgtggtgatgatcactgcccagaaccatggtttcgccgtagatgaggcgacgctgccggccaacctgcgcgtgacccataagtcgctgttcgacggcaccctgcaggggatccatcgtaccgacaaaccggcgttcagcttccaggggcaccctgaagcgagcccggggccgcacgatgccgcgccgctgttcgaccactttatcgagttaattgagcaataccgtcagtccgcgaaataatcaggagtaaaagagca

SEQ ID NO: 24025 - DNA, 1094 bp, Klebsiella pneumoniae
atggcaaagatgagggttgggatcgtttttggcggcaagtcggcggagcatgaagtgtcgctgcagtcagcgaagaatatcgtggaagcgattgataaatcgcgcttcgatgtggttctgttgggtattgataaacaggggctgtggcacatcaacgacgccggcaactacctgctcaacgcacaggatcctgcccgcattgccctgcgcccttccacggtgactctggcgcagatcccgggccgcgaagcgcagcagctgattaacgccgaaagcggccaaccgctggcggccatcgatgtgattttcccgatcgtccacggcacgctgggtgaagatggctccctgcaggggatgctgcgcatggcgaatctgccgttcgtcggctccgatgtgctgggctctgcagcctgtatggacaaagacgtgaccaaacgtctgctgcgcgacgccgggctcgccgtcgccccgtttatcacactcacccgcgccaaccgcgcgcagttcagctttgccgatgtcgaagcgaagcttggcctgccgctgttcgttaagccggctaatcagggctcgtcggttggcgtcagcaaagttaaaaacgaagagcagtaccatcaggcggtggccctggccttcgaatttgaccataaagtggtggtggagcaaggcattaaagggcgggaaattgagtgtgcggtgctgggtaacgaccacccgcaggccagcacctgcggtgaaatcgtcctcaacagcgagttttacgcctacgacaccaagtatatcgacgatcagggcgcgcaggtggtagtcccggccgctatcgcccctgagatcaacgacaaaattcgcgctatcgcggtgcaggcctaccagacctgggctgcagcggcatggctcgtgtcgacgtgttcctcaccgccgacaacgaggtggtgatcaacgagatcaacaccctgccgggctttaccaacatcagcatgtatccgaagctgtggcaggccagcggtctcgactacaccagcctgatcacccgcctgattgagctggcgctggagcgccatgccgcggaccgggcgctgaaaacctccatgaac

SEQ ID NO: 24026 - DNA, 1413 bp, Klebsiella pneumoniae
atggcaggaaataaacccttcaacaaaccacagacagaaacccgcgaacgcgatccgcagctcgccgggctgaaagtcccgccgcactcgattgaagcggagcagtcggtgttgggcggtttaatgctggataacgagcgctgggacgacgtcgccgaacgcgtcgttgccgacgacttttatacccgtccgcaccgtcatatttttaccgagatggcgcgcctgcaagagtccggcagtccgattgacctgattacgctcgccgagtcgctggagcgtcaggggcagctggacagcgtgggcggcttcgcctatctggccgaactgtccaaaaatacgcccagcgcggctaacatcagcgcctatgccgacatcgtgcgcgaacgcgcggtggtgcgcgaaatgatttcggtggccaacgagatcgccgaagccggcttcgacccacaggggcgaaccagcgaagatctgctcgacctcgccgaatcccgggttttcaaaatcgccgaaagccgggccaacaaagacgaagggccgaagaacatcgccgatgtcctcgatgccaccgtcgcccgtatcgaacagctgttccagcagccccatgacggcgtcaccggggtcaacaccggctacgacgacctcaacaaaaagaccgccggcctgcaaccgtcggatctgattatcgtcgccgcccgtccatcgatgggtaaaacgaccttcgcgatgaacctcgtggaaaacgcggcgatgctgcaggacaagccggtattaatctttagtctcgagatgccctcggaacagatcatgatgcgttctctggcctcgctgtcgcgcgtcgatcagacccgcattcgtaccggtcaactggacgacgaagactgggcgcggatctccggcaccatgggcatcctgctggaaaagcgcaatatctatatcgatgactcctccggcctgacgccgacggaggtgcgctcccgcgcgcggcgtatcgcccgcgagcacggcggcatcggactgattatgatcgactacctgcagctgatgcgcgtgccgtcgctctccgacaaccgtacccttgagattgccgaaatctcccgctcgctgaaggcgctggcgaaagagctgcaggtgccggtggtggcgctgtcgcagcttaaccgctcgctggagcagcgcgccgataagcgcccggtcaactccgacctgcgtgagtccggctctatcgaacaggatgccgacttaatcatgttcatttaccgtgatgaggtctatcacgagaacagcgatcttaaaggcatcgcggaaattatcattggtaaacaacgtaacggcccgatcggcaccgtgcgactgacctttaacggccagtggtcgcgtttcgataattatgccggtcctcagtatgatgatgag

SEQ ID NO: 24027 - DNA, 819 bp, Klebsiella pneumoniae
atgcatgatgcacaaatccgcgtggccatcgccggcgcgggcggccggatgggacgccagttaattcaggctgcattgcagatggaaggcgtggcgctgggcgcggcgctggagcgcgaagggtcaagcctggtgggcagcgacgccggcgagctggcgggcgccggcaaagcgggcgtcgcggtgcagagcagcctggcggcggtaaaagatgatttcgacgtgttgatcgattttacccgcccggaaggcacgctgaaccatctggcgttttgccgcgagcacggcaaagggatggtcatcggcaccaccggttttgacgacgctggcaaacaggcgattcgcgatgccgcgcaggacattgccattgtcttcgccgccaactttagcgttggcgtcaatgtcctgttgaagctgctggagaaggcggcgaaggtgatgggcgactataccgacatcgaaattatcgaagcgcaccaccggcataaagtggatgcgccgtcaggcaccgcgctggcgatgggcgaagcgatcgccggggcattgaacaaagatctcaaggactgcgcggtctacagtcgtgaaggctacactggcgaacgcgtcccgggcaccatcggcttcgcgaccgttcgcgcgggggatatcgtcggggagcatacggcaatgtttgctgacatcggtgagcgtattgaaatcacccataaagcgtccagccgcatgacctttgcaaatggcgccgttcgttcagcattatggctgaaaggcaagaaaaatggcctgtttgatatgcgtgatgtgctagatctgaatagttta

SEQ ID NO: 24028 - DNA, 501 bp, Klebsiella pneumoniae; identical to SEQ ID NO: 19919

SEQ ID NO: 24029 - DNA, 2766 bp, Klebsiella pneumoniae
atgcgtggcgacctcgccaaacgcgaaccgggaatgctggcgcgttggaccgatgatgacctgtacggcatcattcgtgcagccaaaaaaggcaaaaaaaccttcattctgcatgatggccctccttatgcgaatggcagcattcatattggtcactcggtaaacaagattctgaaagacattatcgttaagtccaaaggactgacgggctatgactcgccttacgttccgggctgggactgccacggtctgccgatcgagctgaaagtggagcaggaatacggcaagccgggtgagaaatttaccgctgccgaattccgcgctaagtgccgcgaatatgccgccgagcagatcgatggccagcgtaaagactttatccgtctcggcgtgctgggcgactggtcgcatccgtacctgaccatggacttcaaaaccgaagccaacatcatccgcgcgctgggcaaaatcatcggtaatggccacctgcataaaggcgccaaaccggtgcactggtgcgtagactgccgttccgcgctggcggaagcggaagtggagtattacgacaaaacctctccgtctatcgatgtcgcgttccacgcggtagacaaagccgcggtactggcgaaattcggcgtagccgacgtcaacggtccggtgtcgctggttatctggaccaccactccgtggaccctgccggctaaccgcgctatctccctgtcgccggagttcgactatgcgctggtgcaggttgacggtcaggcgctgatcctggcgaaagacctggttgagagcgtaatgaagcgcgttggcgcgacggactacactattctggcggcggtacaaggttctgagcttgagctgatgcgctttaagcatccgttcctcgatttcgacgtgccggcgatccttggcgaccacgtgacgctggatgccggtaccggtgcggtgcataccgctggcggccacggtccggacgactacaccatcagccagaaatacggtctggaaatcgccaacccggttggcccggacggcgcttacctgcctggcacctggccgtccctggacggcattaatgttttcaaagccaatgacatcatcgttgagatgctgcgtgagcgtggcgcgctgttacacgttgagaaactgcagcacagctatccatgctgctggcgccacaagtcgccgatcatcttccgcgccactccgcagtggttcgtgagcatggatcagaaaggcctgcgcgcgcagtcgttgaaagagatcaaaggcgtgcagtggatcccggactggggccaggcgcgtatcgaatcgatggtcgctaaccgccctgactggtgtatctcccgtcagcgcacctggggcgtgccgatgtcgctgttcgtgcataaagaaacccatgaactgcacccgcgtacccttgagctgatggaagaagtggcaaaacgcgttgaagttgacggcatccaggcgtggtgggatctcgattcccgcgacattcttggcgatgacgccgacagctacgagaaagtgccggataccctcgacgtctggtttgactccgggtcgacccactcttccgtggttgacgtgcgtccggaattcgccggtcacgccgccgatatgtatctggaaggttctgaccagcatcgcggctggttcatgtcctcgctgatgatttccacggcgatgaaaggcaaagcgccatatcgtcaggtactgacccacggcttcaccgtcgacggtcagggccgcaaaatgtccaagtctatcggcaacaccgttagcccgcaggacgtgatgaacaagctcggcgccgatatcctgcgcctgtgggtggcttccaccgactacaccggcgaaatggcggtctctgacgagatcctcaaacgcgccgccgacagctatcgtcgtatccgtaataccgcgcgcttcctgctggcgaaccttaacggtttcgatccggcgaaagacatggttaaaccggaagagatggtggtgctggaccgctgggcggtcggctgcgcgcaggcggcacaggaagatatcctgaaagcctacgaatcctacgacttccatgaagtggtgcagcgcctgatgcgcttctgctccatcgagatgggctcgttctacctcgacatcatcaaagaccgccagtacaccgccaaggcggacagcgtggcgcgtcgcagctgccagaccgcgctgttccatatcgtggaagcgctggtgcgctggatggcgccgatcatgtccttcaccgcagatgaaatttggggctatctgccgggcgagcgtgagaaatatgtcttcaccggcgagtggtatgaaggtctgttcggcctggccgacgacgaagcgatgaacgacgatttctgggacgagctgctgaaggtgcgtggcgaagtcaacaaagtgatcgagcaggcgcgtgcggataagaaagtcggcggctcgctggaagcggcagtcacgctgtatgctgatgccgatctggcggctaagctcaatgcgctgggcgatgaattgcgatttgtcctgttgacctccggggcgaacgtcgcagactatgcgagcgcgtccgctgatgcgcagcaaagcgaactgctcaaagggctgaaagtcgcattgagtaaagctgaaggtgagaaatgcccgcgctgctggcattacaccaccgatatcggcaaggtggcggaacacgcggaaatctgcggacgctgtgtgagcaacgtcgccggtgacggcgagcaacgtaaattcgcc

SEQ ID NO: 24030 - DNA, 1281 bp, Klebsiella pneumoniae
atggcacagcagaaaccccacgacgtgaacgagccgtcacgtcgtcgcttactgaaagggatcggcgcgcttggcggcgcgctggccatcaccggcggctgcccggtagcgcatgcggcaaaagcggaaagttccccggggacgctcacacccgacgcgcgccaggaaaagcagccattctatggccggcatcaggcgggcattctgacgccgcagcaggcttcgatgatgctggtggccttcgatgtgctggcggctgataaagccgacctcgagcggctgtttcgactgctgacccagcgtatcgcctttttaacccagggcggcccggcgccggacacgccgaatccgcggctgccgccgatggattccggcatcctggggccgtggattgcgccagataacctgaccatcaccgtctcggtcggccattcgctatttgatgagcgctttggcctggcggataaagcaccgaaaaagctgcagccgatgacccgcttccccaacgattcgctggatgccgcgctgtgccatggcgacctgctgctgcagatctgcgccaatactcaggatacggtgatccacgccctgcgtgatgtcatcaaacatacgccggatctgctgagcgtgcgctggaagcgggaagggtttatctccgacagcgcggcgcgtagcaaaggcaaagagacccccatcaacctgttggggtttaaggacggcaccgctaacccggcgagccacgacagcgcgttgatggataaggtagtgtgggtgacagccgatcaggacgagccggcctggaccgtgggcggcagctatcaggcggcgcgaattatccagtttcacgtggagttctgggatcggacgccgctcaaggagcagcagacgatctttggtcgcgacaagcacaccggtgcgccgctggggatgaaaaacgaacacgataccccggattacagtaaagatcctaacggcgaagtcattgcgctggatagccatattcgtctggccaatccccgcacgccggaaacccagtccagcctgatgatgcgccgcggctacagctattcgctgggggttactaacgccggacaactggatatggggctgttattcgtttgctatcagcacgatctggaaaagggttttctgacggtgcagaaacggcttaacggcgaggcgctggaggagtatgtcaaaccgatcggcgggggctacttctttgttttacccggcgtagttgatgaaaaacactatctgggagagtcgctgctgcaggcc

SEQ ID NO: 24031 - DNA, 1417 bp, Klebsiella pneumoniae
gtggattacttgcccctttttgccgaactgaaacaaaggcccgtgctggtgatcggcggcggcgagattgctgaacgtaagatcaagttcttgctgcgcgcccaggcgcaggtgcaggtggtcgctgaaacgctgtcaccggcgctggccgatctggctgcgcgccaggcactcagctggcgggcggcggaattcagcgactcgctggtggatgatgtctttctggtgattgcggccaccgaggatgaggcgcttaaccagcgggtatttgcggcagctaacgcgcgctaccggttggtcaacgtggtggataaccaggcgctgtgctcgtttgttttcccttctatcgtcgaccgttcgccgctgctggtggcgatctcctccagtggtaaagcgccggtgttgtcgcgcattctgcgtgaaaaaatcgaagcgctgctgccgacgaatctcggtcggctggcggaatcagcaagctactggcgcaaccatctgaaaacccgcctgacgactaccgaagcgcgtcgccgcttctgggagcgcgtctttaccggccgcttcgccagcctgatggtggcgggcaactctgcggaggcggaaaaggcgctgcaggatgagctcgacaaacccgaacgcgagacgggagaaattattctggtcggcgccgggccgggcgatgccgggctgctgacccttcgcggtctgcaggcgatccagcaggcggacgtggttttccacgaccatctggtgactcagccggttctcgagctggtgcgccgcgatgccgagctgatctgcgttggcaaacgcgccggcgagcactcggtgccgcagcatgaaaccaatcagctgctggtggaggcggcgaaggcggggaaaaccgtcgtgcgcactgaagggcggcgatccgtttatttttggccgcggcgcagaagagctgcaggctgccgccgaggcggggatcccgttccaggtggtgccgggcgtcaccgcagccgccggagcgacggcctacgccggtattccgctgacccatcgcgattatgcgcaaagcgccgtctttgtcaccggccactataagccggacagcgcccccttcgactggtcgctgctggcgaagagccaacaaacgctggcgatctacatgggcaccatgaaggcggcggaaatcagcgcccagctgatcgcccacggtcgcgacagcgacacgccggtggcggtgatttcccgcggcacccgtgacgatcagcagacgataaccggcacattgcaacaactcgaacacctggcgaaagacgccccgatgcccgccctgctggtggtaggcgaagtggtgcaactgcatcagcagctcgcctggtttcaacatacatcatccgccgaggggtttaacgcttcggtggtcaatctggcttaa

SEQ ID NO: 24032 - DNA, 849 bp, Klebsiella pneumoniae
ctgataatcagtgaactaaggcatgaacacgctctgcgggaccttctgcgggcggccggtatgtcccgtagcacgtggtattacaatatgaatgcactgaagcaggggacaggtatgcgggtcttaaagagaacatcaggaagatataccactatcacaaggtcgttatggctaccgcaggatcacgctcgcactgagaaaacaggggctgcggataaaccataaaacagtgcagcggctgatggcagaactgtcactccggtctatgataagggcgaaaaaatatcgtgcctggaaagggagaacgggcgagccgcgcccaatatcctgagccggaacttcggtgcgtcaaaagccaacgaaaaatgggtaacagatgtgacagagttcccggtacagggaaaaaagctttacctgtcgtcagttctcgatctgtttaaccgggaggttatcgcctacagcctgtcggaaaggccggtgatggagatggtgaatacgatgctggacggtgcgttcccgaagctcagaccgggagatgctccgctgctgcactcggatcagggctggcattacaggatgaggagctatcaggaacgtttaaaggcgcatgggatgacgcagagtatgtcgcgtaaaggaaactgcctggataatgcagtgatggaaaacttcttcgggaccctgaaatcggagtgtttttatctgagggagttcaggagtgtcagtgcgctaagaaaagccgtagaggactatatccattactacaacaacgagcggataagcctgaaattaaaaggcctgagtccggtagagtaccgaacccaggctctgagagccgcttaatatgaa

SEQ ID NO: 24033 - DNA, 1191 bp, Klebsiella pneumoniae
gtggaaaggtttgatgccattgtcgttggcgccggagcagcgggaatgttttgcgcagcgcaggcgggccagcttggctgccgcgtcctgctgctggataacggcaaaaagccggggcgaaaaattctgatgtccggcggcggccgctgcaactttaccaacatgtatgttgaaccggcggcctatttgagccaaaacccgcatttttgcaaatctgccctggcgcgctacacccagtgggactttatcgagctggtcggtaaatacggcatcgcctggcatgagaagaccctcgggcagctgttttgcgatgattcggcggagcagatcgtcaatctgctgctcgcggaatgtgaaaagggcggcgtgcagatccgtctgcgcagcgaaatcctcagcgtggagcgcgatgaacaaggctaccggctacaggtgaacggcgaaacgctggtgaccaaaaagctggtgatcgcctccggcggtctgtcgatgccggggctcggcgcctcgccgtttggctataaagtcgccgagcagttcggcctgaaggtgctgccgacccgcgcggggctggtgccgtttaccctccacaagccattgcttgagcagctgcaggtcctctccggcgtgtcggtgccgtcgaccattaccgccgagaacggcactctgtttcgcgaaaatctgctgttcacccaccgcggcctttccggaccggcggtgctgcaaatttccagctactggcagcccggcgagttcgtcaccgttaatctgctaccggactgcgatcttgatgacttccttaacgagcagcgcagcgcgcatcccaaccagagcctgaagaacaccctggcgatgcagctgccgaagcggctggtggagtgtctgcagcagctggggcagatacctgatgtgacgctcaagcaactgaacgttcgcgatcagcagacgctggtggagacgttaaccgcctggcgcgtgcagccgaacggcaccgaaggctaccggacggcggaggtgaccctcggcggcgtggacaccaacgaactctcgtcgcgtactatggaggcgcgtaaggcgccgggtctctactttatcggcgaagtgatggacgttaccggctggctcggggggtataacttccagtgggcgtggtcaagcgcctgggcctgcgcgcaggcgctggtggaaggg

SEQ ID NO: 24034 - DNA, 108 bp, Klebsiella pneumoniae
atggacgacgtcaacgtgaaagcgaccaccaccgagaagctcggcttcaccggccgcggggaagggatcgcctgcgaagcggttgcgctgctgcgtaaggccgacaaa

SEQ ID NO: 24035 - DNA, 108 bp, Klebsiella pneumoniae
tttcacgagctttcagggcgcgccaaagatatggggtcggcggcggttctgctggcgattatcatcgcgctgatcacctggggaacgctgctgtggagccattatcac

SEQ ID NO: 24036 - DNA, 2193 bp, Klebsiella pneumoniae
atgccgtggatcctgcttttgctcgctgcactgtttactgccccgctttccgccgccaccctccccggcgtgccgacggctaacactgataaaaacagcgccagcgaacccgatgtggaacagaaaagagcggcttatgccgcactggccgatgtgctggccaacgactccgcccgtcaggagctcattgaccagctgcgtaaagcagccgccacgccgccgcccgacagcaccccgacgctgacgccacctgcggtgaaagaagagaccacggtactggagaacgtcacccagataagccgggaatatggcgaacagctctcatcacgcttttcccagctgtggcgcaatatcaccggctcaccgcataagccctttaatccgcaaacctttaccagcgcggcctggcattttttactgctggccgggctggtgtttgccttctggtggctggtacgcctcgcggcgctgccgctgtatcgcaaaatgggcgaatggggacggcataaaaaccgcgatcgcggtaactggctccagctgcccctgaccatcgccggggcgtttatcatcgacctgctgctgctggcgctaaccctgtttgtcggtcagctgctaagcgatcgcctgaatgggaataaccctaccatcgccttccagcagagccttttcctcaacgccttcgcgctgatcgagttttttaaagctattctgcggctcattttctgcccgcgcattcctgccctgcggccctttaacctcagcgacgaggccgcgtcatactggagcctgcgcctgagcgcgctcagcagcctgattggttacggtctgatcgtcgcggtgccgattatttccaatcaggtgaatgttaaggttggcgcgctggctaacgtcgtcatcatgctgtgcattacgctgtgggcgctgtacctgatttttcataacaaagcggtgattactcaagggttgatccacctggccgaccactcactcgctttctttagcctgtttatccgcgccttcgcgctggtctggcactggctggcctgcgcctactttgtggtgctttttttcttttcgctgttcgacccgggcaacagcctgaaattcatgatgggcgccaccctgcaaagcctggcgattatcggcggcgcggcgctggtgtctggcatcctgtcgcgctggatagccaaaaccatcaccctgtcgcccgccactcagcgcaactaccctgaactgcaaaagcggctaaatggctggatctccgcctcgctgaaggcggcgcgcattctcaccgtctgtgtcgccatcatgctgctgttgagcgcctggggcctgtttgacttccgggaatggctgcacaacgatgccgggcaaaaaacggtggatgtgctgatccgcatcgccctgatcctcttcttctccgccattggctggacggttctggccagcctgattgaaaaccggctggcatcggatattcatggccgtccgctgcccagcgcgcgggcccggacgctgctgacgctgtttcgcaacgcgctggcggtggtgatcagcaccatcacggtgatgatcctgctctcggaaattggggtaaacattgcgccgctgctggcgggcgccggggcgttagggctggccatttcgtttggtgcgcaaaccctggtcaaagacattatcactggcatatttatccagttcgagaacgggatgaacaccggcgacctggtcaccatcggtcctttgaccggcaccgtggaacgaatgtcgattcgctccgtgggggtacgtcaggataccggcgcctatcacattattccctggtcctcgatcaccacctttgccaacttcgtgcgcggcattggctcggttgtggctaactatgacgttgaccgccatgaggatctggataaagccagccaggcgctgaaggcggcggtggacgatctgctggcccaggaggagatccgcggtctgatcattggcgaaccgtcgttcgccgggctggtggggctgagcaataccgcctttacgctacgcgtcagcttcactaccctgccgctgaagcagtggacggtgcgttttgccctcgacacccaggtgaaaaagcacttcgaccgcgccggggttcgcgcgccggtacagacctggcagcagctgccgatgccgggcgccgacagcccggccgccgag

SEQ ID NO: 24037 - DNA, 828 bp, Klebsiella pneumoniae
atgtttgtcccatttctcattatgttacgcgaaggcctggaggcggcgctgattgtcagcctgatcgccagctatctgaaacgcacccagcgcggcaactggattggcgtgatgtggattggcgtgatcctcgcggcggcgctgtgtcttggcttaggcatttttatcaacgaaaccaccggtgaatttcctcagcgtgaacaggagctgttcgaagggatcgtcgcggtcattgcggtggtgatcctgacgtggatggtcttctggatgcgcaatgtctcacgcaacgtcaagcagcagctggagcaggccgtggacaaggcgctgcagcgcggtaatcaccacggctgggcgctggtgatgatggtctttttcgcggtcgcccgtgaggggctggagtcggtcttctttctgctggcggccttccagcaggatgtcggcatctggccgccgctgggggcgctgctgggtctggccaccgctatcgtgctgggcttcctgatctactggggcggtatccgccttaaccttggcgtgttcttcaaatggaccagcctgtttattctgctggtggccgctggcctggccgcgggggcgatccgcgccttccacgaggcgggcctgtggaacctgttccaggataccgccttcgatctgagcaacgtgctgtcgacgcatacgctgttcggcacgctgctggaagggatcttcggctatcaggagacgccgagcgtcagcgaagtggctgtctatctgctttatctgatcccggcgctggtgctgtttgccctgccgccgcggaataataccactgcctcgcgggctgcc

SEQ ID NO: 24038 - DNA, 237 bp, Klebsiella pneumoniae
atggaaaacctgaatatggatctgctgtacatggctgccgctgtgatgatgggtctggcggcaatcggtgctgcgatcggtatcggcatcctcggaggtaaattcctggaaggcgcagcgcgtcagccggatctgatccctctgctgcgtactcagttctttatcgttatgggtctggtggatgctatcccgatgatcgctgtaggtctgggtctgtacgtgatgttcgccgtcgcg

SEQ ID NO: 24039 - DNA, 3203 bp, Klebsiella pneumoniae
atgccaaaacgtacagacataaaaagtatcctgattctgggcgcgggcccgattgttatcggtcaggcgtgtgagtttgactactccggcgcccaggcctgtaaagcgctgcgcgaagagggctaccgcgttatcctggtgaactctaacccggcgactatcatgaccgacccggaaatggccgatgccacctacatcgagccgattcactgggaagtggtgcgtaaaattattgaaaaagagcgcccggatgcggtgctgccgaccatgggcggccagacggcgctgaactgcgcgctcgagctggagcgtcagggggtactggctgaattcggcgtgaccatgattggcgccaccgccgatgcgattgataaagccgaagaccgtcgccgtttcgatatcgcaatgaaaaaaatcggcctcgacaccgcgcgctctggtatcgcccacacgatggaagaggcgctggcggttgccgccgacgttggtttcccgtgcatcatccgtccgtccttcaccatgggcggcaccggcggcggtatcgcctataaccgcgaagagttcgaagaaatttgcgaacgcggcctggatctctctccgaccaacgaactgctgatcgatgaatcgctgatcggctggaaagagtacgagatggaagtggtgcgcgataagaacgataactgcatcatcgtctgctccatcgaaaacttcgacgccatggggatccacaccggtgactccatcaccgttgccccggcgcagaccctgaccgacaaagagtaccagatcatgcgtaacgcctcgatggcggtgctgcgtgaaatcggcgtcgaaaccggcggctctaacgtgcagttcgcggtcaacccgaaaaacggtcgcctgatcgttatcgaaatgaacccgcgcgtctcccgctcctcggcgctggcctctaaggccaccggcttcccgattgctaaagtggcagccaagctggcggtaggttatacccttgacgagctgatgaacgacatcaccggcggccgcaccccggcttcctttgaaccgtccatcgactacgtggtcactaaaatcccacgctttaacttcgaaaaattcgccggcgctaacgaccgtctgaccacccagatgaagtctgtcggcgaagtgatggcgattggccgtacccagcaggaatctttgcagaaagcgctgcgcggtctggaagtgggcgctaccggcttcgacccgaaagtgagcctcgacgatccggaagcgctgaccaaaatccgccgcgagctgaaagatgccggcgctgagcgtatctggtatatcgctgacgcgttccgcgcgggcctctcggttgacggcgtcttcaacctgaccaacatcgaccgctggttcctggtacagattgaagagctggtccgtctggaagagaaagtggcggaagtgggcatcaacggcctcgacgctgacttcctgcgcaccctgaagcgtaaaggctttgccgatgcgcgtctggcgaagctggcgggcgtgcgggaagcggaaatccgcaagctgcgcgatcagtatgacctacacccggtctacaagcgcgtggacacctgcgctgcggaatttgctaccgataccgcctacatgtactccacttatgaagaagagtgtgagtccaacccgtccgttgaccgcgataaaatcatggtcctcggcggcggcccgaaccgtatcggtcagggtatcgaattcgactactgctgcgtacacgcctcgctggcgctgcgcgaggacggttacgagaccatcatggtcaactgtaacccggaaaccgtctctaccgactacgacacctccgaccgtctgtattttgagccggtgaccctggaagacgtgctggaaatcgtgcgcatcgagaagccaaaaggcgttatcgtccagtacggcggccagaccccgctgaagctggctcgtgccctggaagctgccggcgtgccggttatcggtaccagtccggacgctatcgaccgggcggaagaccgtgagcgcttccagcacgcggttgaccgtctgaagctgaagcagccggcgaacgccaccgtcaccgccattgagcaggcggtagagaaagcgaaagagattggctacccgctggtagtgcgtccgtcttatgtgctcggcggccgggcgatggagatcgtctatgacgagcaggatctgcgccgctacttccagaccgcggtcagcgtctccaacgacgcgccggtgctgctggatcgcttcctcgacgatgcgattgaagtggatgtcgatgccatttgcgatggcgaaatggtgctgattggcggcatcatggagcatatcgagcaggcaggcgtccactccggcgactccgcctgttccctgccggcctacaccctgagcaaagagattcaggatgtgatgcgcgagcaggtgcagaagctggccttcgagctgcaggttcgcggtctgatgaacgttcagttcgcggtgaaagataacgaagtttatctgattgaggtcaacccgcgtgcggcgcgtaccgtaccgttcgtctccaaagccaccggcgtcccgctggcgaaagtggcggcgcgcgtgatggccggtaagacgctggcgcagcagggcgtgaccaaagagatcatcccgccgtactactcggtgaaagaggtggtcctgccgttcaataaattcccgggcgttgacccgctgttaggaccagaaatgcgctccaccggggaagtgatgggcgtcggccgcacctttgccgaagcgttcgccaaagcgcagctgggcagcaactcgaccatgaagaaacagggtcgcgcactgctctccgtccgcgaaggcgataaagagcgcgtggttgacctggcggcgaagctgctgaagtttggcttcgagctggatgcgactcacggtacggcgattgtgctgggtgaagcgggcattaacccgcgtctggtgaacaaggtgcatgaaggtcgtccgcacattcaggaccgcatcaagaatggcgaatatacctacatcatcaacaccaccgcaggtcgccaggcgattgaagactccaagctgattcgccgcagcgcgctgcagtacaaagtgcattacgacaccaccctgaacggcggctttgccaccgcgatggcgctgaacgctgacgccaccgagaaggtgatttcggttcaggaaat

SEQ ID NO: 24040 - DNA, 1980 bp, Klebsiella pneumoniae
atgaaccactttattttgagcgatagccgaaagtgcatcggctgccaggcctgcgaagtggcctgcgtgatggcgcataacgaggagcaacacgtgctgaccccgcagcgctttttgccacgtatcaccgtgatcaaagcggagggccagcgtaacgccatcacctgccgccactgcgaggacgccccctgcgtccgcagttgtcccaacgacgccatcgcccagtccggcgacagcgttcaggtccgtcaggagaaatgcattggctgtaaatcctgcatggtggcctgcccgttcggggtgatgcaggtggtggtgacgccgcaggccgcagacctggtgaaagccagcgcgcacaagtgcgatctatgccagggccgcgaggcggggccggcctgtgtggaaaactgtcccgcgcaggcgctgactctcgccgacgatgagacgttgatcaccctggcgaagcagcggcgactgcgctcggcatgccaggaggtgcagccgtggcagcgcgctacgccgctctgcagccagcccaatgctggcgcgaaggtcaggcaaatggcgatgacgcccccgcgcggggagccggataagctggcggcggaggtgcgtaagagccactttgaggagatctatcagccgttcaccccgcagcaggcgcagcagcaggccgcccgctgtctcacgtgtggggagcacagtatttgcgaatggacctgcccgctgcataaccatatcccgcagtggatcgagctggttaaagcggggaatatcgccgccgcggtcgcgctttcccatcagaccaactgcctgccggagatcaccggccgcgtctgtccccaggaccggctgtgtgaaggcgcctgcaccctgcgcgatgaaagcggggcagtcaccatcggcaatattgagcgctatatttccgaccaggcgctggccagcggctggcgtccggacctttcgcaggttaagccgagcggcaagcgggtggcgattatcggcgccgggcctgccgggctggcctgcgccgatatgctggtgcgccacggcgtccagccggtggtcttcgaccgtcatgcggagattggcggtctgctgaccttcggcattccggcgttcaagctggataaatcgctattggcccggcggcgggcgatcttcagcgagatgggtatccgctttgagctcaattgcgaggtggggaaagatatctccatggcgacactgctggccgattatgacgcagtgttcgtcggcgccggaacctatcgctccatgaaggcggggctgccgaacgaagaggcccccggggtctacgatgcgctgccgttcctcatcgccaacaccaaacaggtgatggggctggcggcatcggcgcaagagccttatgtcaacaccgccgggctgaacgtggtggtgctgggcggcggcgatacggcgatggactgcgtgcgcaccgcgctgcgccacggtgcccgccaggtgacctgcgcctatcggcgagatgaagccaacatgccgggctcgaaaaaagaggtcaaaaacgcccgcgaagagggggcgctctttgagtttaacgtccagccggtgacgcttgagctggacgagaacgggcgggttaacggggtacgctttttgcgcaccgagctgggcgctccggacgccgggggaagacgccgtccgacgccgatccccggcagcgagtttgttatgccggcagatgcggtgatcatggcctttggcttccacccgcaccgcatgccctggctggaagcggcgggggtggcgctggacagtcaggggcgtattaaagccggagtggagagccgttaccgttatcagaccagtcaggagaagatctttgccggcggcgatgccgtgcgcggcgcagaccttgtagtgacggcgatggcggaaggccgtcacgcggcgcaggggatcctggactatctggcgcggaaaacgacgccgcttcac

SEQ ID NO: 24041 - DNA, 377 bp, Klebsiella pneumoniae
aagcccgtgatggagatggtgaatacgatgctgacggtgcgttcccgaagctcagacccgggagatgctccgcctctgcactcggatcaggctggcattacaggatgaggagctatcaggaacgtttaaaggcgcatgggatgacgcagagtatgtcgcgtaaaggaaactgcctggataatgcagtgatggaaaacttcttcgggaccctgaaatcggagtgtttttatctgagggagttcaggagtgtcagtgcgctaagaaaagccgtagaggactatatccattactacaacaacgagcggataagcctgaaattaaaaggcctgagtccggtagagtaccgaacccaggctctgagagccgcttaatatgaa

SEQ ID NO: 24042 - DNA, 960 bp, Klebsiella pneumoniae
atgattaagaaaatcggtgtgttgacaagtggcggtgatgcgccgggcatgaacgcagcaattcgtggcgttgtgcgcgcggcattaacggaaggtctggaagtttttggaatctatgacggttacctcggattgtatgaagaccgtatggttcagctcgaccgttacagcgtttccgacatgatcaaccgcggcggcaccttcctgggctccgctcgcttcccggaattccgcgaagaacacatccgcgctgtggctatcgaaaacatgaagaagcgcggcctggacgcgctggtggttatcggcggtgacggttcctatatgggggcgatgcgcctgaccgagatgggcttcccatgcatcggcctgcctggcaccatcgacaacgatatcaaaggcactgactacaccatcggcttctttactgccctgagcaccgtggtggaagcgattgaccgtttgcgcgacacctcctcttcgcaccagcgtatctccgtggtggaagtgatgggccgttactgtggcgacctgaccctggcggcggcgattgccggcggctgtgagttcatcatggtgcctgaagtggaatatacccgtgacgatctggtggcagaaatcaaagccggtatcgcgaaagggaaaaaacacgctatcgtggccatcaccgagcacatgtgcgacgttgacgagctggcaagctacatcgagaaagagactggccgtgaaactcgcgccaccgtcctcggccacattcagcgcggcggttccccggttccttacgaccgcatcctggcttcccgcatgggcgcctatgcgattgagctgctgctgcagggccatggcggccgttgcgtcggcatccagaacgagaagctggtgcaccacgacatcatcgatgccatcgagaacatgaagcgtccgttcaagaacgactggctggattgcgcgaagaaactgtac

SEQ ID NO: 24043 - DNA, 574 bp, Klebsiella pneumoniae
attggtcagtatgaactgctgggcgagtcgattgacgatgcggcgggcgaagcctttgataagacggcgaagctgctgggactggattatcccggcgggccgatgctgtcgaaaatggcgtcccagggcaccgaaggccgctttgtcttcccgcggccgatgaccgaccgtccggggctggacttcagcttctccggcactgaagaccttcgccgccaacaccattcgcagcaacggcgacgatgagcaaacccgcgccgacatcgcccgggcgtttgaggatgcggtcgtcgatacgctgatgattaaatgtcgccgcgcgctggagcaaaccggctttaagcgtctggtgatggcgggaggcgtgagcgccaaccgtaccctgcgggcgaagctggcggagatgatgcaaaaacgcggcggcgaggtgttctacgcccgccctgagttctgtactgacaacggcgcgatgatcgcctacgccggcatggtgcgtctgcaaaccggcgccaaagccgagctcggcgtgacggttcgcccgcgctggccgctggccgagctgcctgccgcctaa

SEQ ID NO: 24044 - DNA, 768 bp, Klebsiella pneumoniae
atgttacgtattgcagacaaaacgtttgaatcccatcttttcaccggtaccggcaaattcgccgccccggaggtgatggtcgaggcgattcgcgcctcgggcagccagctggtaaccctggcgatgaagcgcgtcgatttacgccagcgcaatgacgccatcctcgccccgctgctggcggcgggagtcagcctgctgccgaatacctcgggcgccaagacggcggaagaggcggtgtttgccgcccgtctggcgcgggaagccctgggtacccactggctgaagctggagatccacccggacgcccgctggctgctgcccgacccgattgaaaccctgaaagcggcggagctgctggtccgcgaagggttcgtggtgctgccctactgcggcgccgatccggtgctgtgtaaacgactggaagaggtgggctgcgcggcggtgatgccgctgggtgcgccgatcggctccaatcaggggctggaaaccaaagccatgctggagattattatcgagcaggcgacggtcccggtggtggtcgacgccgggatcggcgtcccgagccatgcggcgcaggcgctggagatgggcgcggacgcggtgctggtcaataccgccattgccgtcgccgacgaccccgtggccatggcccgcgccttccgtatggcgatcgatgccggattactggcgcgtcaggccggaccgggggcacgcagtacgcaggcgcaggccaccagcccgctcaccggattcctggaggcgctggca

SEQ ID NO: 24045 - DNA, 642 bp, Klebsiella pneumoniae
atgaatatgatcccggtgatcatcgtcgccgtgctggtggcgctggggctgaagtttattccggaaaaaatgatcaacggcttccagatcttcgccaaattcctcgtggcgctgatcaccatcggcctggcggcggcggtgatcaagttcctgctcggctgggagctgatcccggggctcgatccgatctttatggcgcctggcgaccagcccggcgaggtgatgcgcgccatcgaagtcattggctctatctcctgcgtgctgctcggcgcttacccgatggtgctcctgctgacccgctggtttgaaaaaccgctgatgcgcgttggtaatctgctaaaaatcaacaatatggctgccggcggcatggtcgctaccctggcgaacaatatcccgatgttcggcatgatgaagcagatggatacccgcggaaaagtgatcaactgcgccttctcggtgtcagcggcgttcgccctcggcgaccatctcggttttgcggcggccaacatgaacgccatgatctttccgatgattgtcggcaagctggtcggcggcgttaccgcgattggcgtggcaatgctgctggtgccaaaagatgaaaacgtaccggcgcctgccaacaacgaagcggaggcgcactcg

SEQ ID NO: 24046 - DNA, 666 bp, Klebsiella pneumoniae
atgtttgatcttattgataccgccatcaccggcgatcagtttctgctggcgctgcatgacaccctgattatggtcgccgtctcgctgggctttggcgcgctgatcggcgtcccgctggggattgtgctggtggtttgccgtcccggcggcatcgtggccaacccggtggtgcatcaggcgctgaatccgctgattaacgtgctgcgctcgctgccgtttatcattttgctgattgtgatcctgccctttaccagactgctggtgggcaccactatcggcaccgcgggagccatcgtgccgctgatcgtctttgtcgccccctatattgcccgactagtggagagctcgttgctggaggtggatgaggggatcctcgaggccgcggacgccatgggcgcaacccccctacagactgtctggcactttatgctgccggaggcagcggcatcgctgattctggccctcaccacggcgaccatcggtctgctcggcgccacagccatggcgggtacagtgggcggcgggggaatcggggatctggctattacctatggctatcagcgcttcgacgctttcgccaccctcactaccgccctggtgctgattgtgattgtccagcttatccagacgctgggcacccgactggctcgccgactgcgtcgcgat

SEQ ID NO: 24047 - DNA, 651 bp, Klebsiella pneumoniae
atgaatcagacgctcctttcttcttttggtaccgcttttgaacgtgtggaacacgctttggacgccctgcgcgaaggccgcggcgtgatggtgcttgatgatgaagaccgtgaaaacgaaggcgatatgatcttcgccgccgaaaccatgaccgttgagcagatggcgctgaccattcgtcacggcagcggcattgtgtgcctgtgcctgaccgaagaacgccgcaaacagctggatctgccgatgatggtagagaacaacaccagcgcctacggcactggcttcaccgtgaccatcgaagcggccgaaggtgtgaccaccggcgtctccgctgccgaccgcgtgaccaccgtccgcgcggccatcgccgacggcgcgaaaccttccgatctcaaccgtcctggtcacgtcttcccgctgcgtgcgcagccgggcggcgtactgacccgcggcggccacactgaagccactatcgacctcgtgaccctggctggctttaaaccggcaggcgtgctgtgcgagttgaccaatgacgatggcaccatggcccgcgcgccggagtgcatcaagttcgctcagcagcataatatggcggtagtcacgattgaagatctggtggcctatcgtcgcgaacatgagcgtaaagccagc

SEQ ID NO: 24048 - DNA, 312 bp, Klebsiella pneumoniae
atggaattagaagaacaggtgatggggatcatcatcaatgccggccagtcacgtagcctgtgctacgaagcgctgcacgccgctaaagcgggtgatttcgccaccgccgacgccaaaatgcaggaagcggcgcactattcccgcgaagctcaccttgtacagacccagcttatcgaagctgacgaaggcgagggaaaaaccaaaatgacgctggtaatggtccatgctcaggatcacctgatgacatccattctggcgaaagagcttattgccgaactgattgcgatttaccgcgcgcagccgcttcacgcc

SEQ ID NO: 24049 - DNA, 660 bp, Klebsiella pneumoniae
atgatgaagaaaataattgccgttgcggcttttctgctgtgcaccacggcagcgcaggccggtattgtcatgggtggaacccgtgtgatttatcaggaagggaagcgtgaagccgctatttcagtcaccaatgccgatacccatacgccctatctggtgcagtcgtgggtggaaaattacgcggaaaacgataaggccagggtgcccttcattgtaacgccgcccttgttccgtctcgatccggagcaaaataacgttctgcggattaactttattggcgcctcgctgccccgcgaccgtgaatcggtcttctggctgaacgtcaaaagtatcgccccgacgcctcagggcgaggtgaataagctgcaggtgaatattaaatcgaaattcaaaatcttctatcgccccaacgacctggcgggcgacccggcaaaggcctggcagcagctgaagtttagccagtccggcggtcggctgacggtgataaatcccactccctacttcgtctctttttacgccgtcgaagtgggcgggcaaagcatcgacgatcccggcatggtggctcccttcggcgagaaaacgtggccggtgagcgggcacggcaccgtcaaatggcgggcgattaacgactacggcggcgtcagcgatttcgcccagcag

SEQ ID NO: 24050 - DNA, 2181 bp, Klebsiella pneumoniae
atgagcgcaatatccctgatccaaccggatcgtgaccttttttcctggccgcaatactgggctgcctgttttggccctgcgccttttttaccgatgtcgcgtgaagagatggatcaacttggctgggatagctgcgacattattctggttaccggcgacgcctatgtcgaccacccgagcttcgggatggctatctgcggccgcatgctggaagcgcagggtttccgggttgggatcatctcccagccggactggaacagcaaagacgactttatgcgtctgggaaaaccgaacctgttcttcggcgtgaccgccggcaacatggactcaatgatcaaccgttacaccgccgaccgtaaactacgtcatgacgatgcctatacggcgggtaacgtggcgggcaaacgtccggaccgcgctaccctcgtctatacccagcgctgtaaagaggcgtggaaagatgtgccggtgatcctcggcggcatcgaagccagcctgcgtcgtaccgcccactatgattactggtccgacaccgtgcgccgctcggtgctggtggactccaaggccgatatgctaatgttcggcaacggcgagcgtccgctggtggaagtggctcatcgcctggcgatgggcgaaaccatcgaccagatccgcgatgtgcgcaataccgccatcatggtgaaagaggcgctgccgggctggagcggcgtggactccacccgtctggatacgcccggtaaaattgaccccatcccgcatccgtacggtgaagatctgccgtgcgccgataacaaaccggtcgcgccgaaaaaacaggaagcgaaaagcattactgtgcagccgccgcggcccaaaccgtgggaaaaaacctatgtgctgctgccttccttcgagaaggtgaaaggcgataaggtcctgtacgctcacgcctcgcgcattttgcaccacgaaaccaaccccggctgcgcccgggcgctgatgcaaaagcacggcgagcgctacatctggatcaacccgccggcaatcccgctctccaccgaagagatggacagcgtcttcgcgctgccgtacaagcgggtgccgcatccttcctatggcgatgcgcgtattccggcgtatgagatgatccgcttctcaatcaacatcatgcgcggctgcttcggcggctgttcgttctgctcgatcaccgagcacgaaggacgcataatccagagccgttctgaggattcgatcattaatgagatcgaagccattcgcgacaccgtgcccggctttaccggggtgatctccgatctcggcgggccaacggccaacatgtatatgctgcgctgtaaatcgccgcgcgctgagcagacctgccgccgtctctcctgcgtctatccggatatttgcccgcacatggataccaaccatgagccgacgatcaatctttatcgccgcgctcgcgagctgaagggcatcaagaagatccttatcgcctccggggtacgctatgacatcgcggtcgaagatccgcgctatatcaaagagctggcgacccaccacgtcggcggctatctgaagatcgccccggagcataccgaagagggaccgctgtcgaagatgatgaagccgggaatgggcagctacgaccgctttaaagagctgttcgacacctattcgaagcaggcgggtaaagagcagtatctgatcccgtactttatctccgctcatccggggacccgtgatgaagatatggtgaacctggcgctgtggctgaagaagcatcgcttccgtctcgaccaggtgcagaacttctatccgtcgccgctggcgaactcgaccaccatgtattacaccggcaagaacccgctgggtaaaattggttataagagcgaagaggtggtggtgccgaagggcgataaacagcgccgtctgcacaaagcgctgctccgctaccacgatccggcaaactggccgctgatccgtcaggcgctggaggcgatgggcaagaagcacctgattggctcccgtcgcgactgcctggtgccagcgccaaccctggacgaaatgcgtgaagcgcgtcgccagaaccgccatactcgtccggcgctgaccaagcacacgccgatcgcccatcagcgccagacgcctgccgctgcgggcgcgaaaaaacgcgttaagccgaaggccgtatcacgc

SEQ ID NO: 24051 - DNA, 2001 bp, Klebsiella pneumoniae
atgatggacgcgctgcttaacctcaccgcgcaaatggcgcgggaggggatccgtcgcctgctggtgctcagcggcgatgagagctggacgctgcagcaggcgcaggcgctacgggagaggctcggcggcgatggcctgtgggttggccccgagccggtttctgcgccctgcgtggcgcccggcgcgctgaaaacgctgctggggcgggaagtgatgcacgcctttttcgatgcccggcgcgggtttgatgtggccgccatggcggccctgagcggcacgctgcgggcgggaagctggctggtgctgctgacgccccccttcgccgactggccgacccgggcggatgaggactctctgcgctggagcgatacgcctgaccctatcgttacccctaactttgttcaccgctgctgtcggcagtttatcgccgatccggaggtgttgctctggcggcagtcggaccggccacgtttcccgctggccgccccgcgtcccgactggcatcccgccgatggccgcccgcaggccgagcaggcggcaatccttgagcaactgatacgcctgccgcccggtatcgcggcggtgacggcggagcgtggacgggggaagtccgcgctggcgggcatgctcctgcgccagcttgggggcgaggccatcgtcaccgccccaacgcgtagcgctgtcgaggtgctggccagctttgccggggagacgttgcgctttatggcgcccgatgcgctgctggcgtcgaaagaaaaggcggcgtggctgatagtcgatgaggccgcggctatcccggctccgcttctccggcaactggtgagccgttttccccgcacgctactcaccacgacggtgcaagggtacgagggcaccggtcgcgggttcctgctgaaattttgcgccagtctgccccatctgcaatcgttcaccctgaacgccccgatccgctgggcggcgggctgtccgctggagtcagccatcggtcagttgcttatctttaacgatgaggcatttcgcgacgcgccgatgggggagctagccctggaggcggtcaatcagtcctgctggcaaacgcagccagcgctaccggaggcgatgtaccagctattgtccggggcgcattaccgaacttccccgctcgatctgcggcgcatgatggatgctccgggccaggctttccgctgcgctcgcgccggcggcgcggtagcgggcgccctgtggctggtggccgaggggggactttctcgcgaactgagccgggcggtatgggcgggttttcgccggccgcgcgggaatctggtcgcccagtcgctggcggcgcacggcggcagtcccctggcggcgacgctgcgcgggctgcgggtcagtcggatcgctgtccatcccacccgccagcgggaaggcctcgggcggaagatgatcgccgatatcgccgccgatgccgctggctatgactatctctccgtcagcttcggctataccgctgagctgtggcgcttctggcaacgctgcgggtttaccctcgtacggctgggtacccatcgcgaggccagcagcggctgctatacggcgatggccctctatccgttgaccgcggcagggcgccagctggcgcagcgggaggcgcagcggctgcagcgcgatgaatactggcttcgcccgtggcgagaggaatccgcgccgctgccggccgtcgcagacgctatgcttagtgatgaggactggctggaagcggcgagctttgccttcgcccaccgcccgctggccgcggcgctgggctgcctcaaccgcctactgatgcaggccgacatgccgttgccggccctgcggggacgactgcagggcaaagaggaggccgcactctgcgccgtgctgcagctgacggggcgaaaagccttgcaggcgagatggcgtcgggaggccgctgacgccttgcgcttccttgatgcagcgcgcgctgaggcgctgcgtcagcaggtggcgcatctgcaatttttt

SEQ ID NO: 24052 - DNA, 1248 bp, Klebsiella pneumoniae
gtgagtcgtacaacaaccgttgacaccgtgccggcgggcgaggtcagcgtcgctggtgcatcccgcccggatccgtttattaagcgtggcaccccgcagtttatgcgcgtcactctcgcgctgttctccgccggtctggccacctttgccctgctctactgtgtgcagccgatcctgccggtgctgtcgaacgagtttggcgtgtcgccggccagcagcagtatttcgctttcaatttccacggcgatgttggcggtgggcttgctgtttaccggcccgctgtcggacgctataggccgcaagccggtgatggtcaccgccctgctgctggccgcctgctgttcactgttgtcgactatgatgaccagctggcacggcatcctgattatgcgcgctctcatcggcctgtcgctgagcggcgtagcggcggtcggcatgacctatctgagcgaggagatccaccccagtttcgtcgccttttcgatggggttatatatcagcggcaactccatcggcggcatgagcggccgcttgctgaccggggtctttaccgatttcttcggctggcgcgtggcgctggcggcgatcagcggctttgcgctggccgcggcgattatgttctggcgtatcctgcccgagtcgcgccatttccgcccgacctcgctgcgaccgaaaacgctgctgattaacttccgtctgcactggcgcgaccgtggcctgccgctgctgttcgtcgaaggttttctgctgatgggcgcttttgtcaccctgtttaactatattggctaccggctgatgatgtcgccgtggtcgttaagccaggcggtggtaggcctgctgtcggtagcttatctcaccgggacctggagttcaccgaaggcaggggccatgaccgtacgctttggccgcgggccggtgatgcttggctttacagcggtgatgctctgcggcctgctgctgacactcttttcttccctgtggcttattttcatcggcatgctgctgttttccgctggcttcttcgccgcgcattccgtcgccagcagctggattggcccacgcgcccgccgcgcccgcggtcaggcatcatcgctgtatttgttcagctattatttgggttcaagtcttgccgggacgttaggcggggtattctggcatcactacggctggaacggcgtcggtgggtttatcgcgctgctgctccttgccgcgctgttgaccggcacctgcttacatcagcgactgaaa

SEQ ID NO: 24053 - DNA, 882 bp, Klebsiella pneumoniae
atgattatgactcaacacgatcaattacatcgttatctgtttgaaaactatgccgtgcgcggcgagctggtgacggtgtcggaaaccctggaacagattctggcgaatcacacctatccccaaccggtcaaaacggtgctggcggagctgttggtcgccaccagtctgctgaccgcgacgctgaagtttgccggcgacattaccgtacagctgcagggggatggccctttacagctggcggtgatcaacggcaataaccagcagcagctgcgcggcgtcgcgcgcgtgcagggcgagattgcggacgatgcggatctgaaaacgatggtcggcaacggctacctggtcattaccatctctccggaagaaggtgagcgctatcagggcgtggtcggtctggaaggcgatacgctggccgcctgcctggaagattatttccagcgttcagagcagctgccgacgcgccttatcatccgcaccggcgatcatgaaggccagccgatggcgggcgggatgctgctgcaggtgatgccggcgcaggatgcccagactgccgacttcgagcacctggcgacgcttaccgagaccattaaggcggaagagctgttcaccctgccggcaaatgatgtgctgtggcgcctgtatcatgaagaagaagtcacggtctacgacccgcagagcgtggagttcaagtgcacctgctcccgcgaacgctgcgccggcgcgctgaagacgctgccggatgaagagattgatagcatcctcgccgacgaaggcgaaattgatatgcactgcgactactgcggtaaccactatatcttcaatgccatggacatcgccgagatccgtaataacgcctctccggccgatccgcaggttcat

SEQ ID NO: 24054 - DNA, 849 bp, Klebsiella pneumoniae
gtgaaagcgatgaatactttacaatcgactaactggcttcagtacggtataaaagacattaaacacctcaaacacgccaatatgcacgatccattgattccattcgaaccggtgttttcaccccagggacccactttactcgtcgcggtacgtcagtctgaggtaatacgggagactccacgccaccatcacagctgtgggcagttaatcggtgccatacgtgggctacttacggtcgatggcggtgattgtcgctgggtggtaccggcaacacatgccgtctggataccgccaggtgttccgcacggcctgcgctcgcacggtccatattcaggatggagtgtttatgtttctgccaaagcctgtggcgagctacctgataagccatctgttctctcaatgacaaatctgctgcgtgaagcgataacgcgagcggctgcatggcaaggtgtagagcttactgcgtcccaaaaacgtttagctggcgttattcttgatgaaattggttcccttcccagggttaatcttgggcttccaatgccgcaagatagccgattgctcagaatcgcgcaggcgctgtcagcaaacccggacgacgggcgcaggttggaagaatgggcagcctgggccggcatgtcatcacgcacgctcacgcgacgattccgagccgaaacgggttttagcttcaatgaatggcgacagcggatacgcttactcagggctcttgagctactggctgccggcaagccagtgacggcgatagcgctggatctgggatatgacaatgtgagtgccttcatagccttgttccgtcggatgttcggcactactccagggcggtataaaatt

SEQ ID NO: 24055 - DNA, 1294 bp, Klebsiella pneumoniae
atgaacacatattccgtttcccgtctggcgctggcgctggccttcggcgtgacgctgtccgcctgtagctcgacgcctgccgatcaacagccctcaacgcagactgcaccgggcactaccgcgcgtcccatactcaacgccgaagaagcgaaaaacttcacgccggcggcctatttccagtcgctggctcccaacgccgccgcctggacgccgtctgctatcagcctgccggcgcagcctgactttatcgtcggccctgcgggaacccagggcgtaacccataccaccattcaggcggcggtggatgccgcaattgcccgtcactctaaccgtcgtctgtatatcgcgattatgccgggcgagtacccgggaaccgtctacgttccggcggcgccgggcgccctgaccctgtatggtactggcgataagccaatcgacgtgaaaatcacgcgaagccattgattcgcgagatggatcgcaacacctggcgtcgtctggtcaatccaggcggtaaatatatgccgggtaaaccggcgtggtatatgttcgacagttgccaagcaatccgcggcgaccgtcggcgtaatgtgttccgcagtcttctggtcacagaataatggtctgcagctgcagaacctgaccatcgccaacaacctcggcgacagcgttgacgccgatacccaccaggcggtggcattgcgcagcgatggcgaccaggtgcagatcaataaggtcaatattcttggccgtcagaacaccttcttcgtgaccaacagcggcgtgcaaaaccgtctgcaggacaaccgccagacccgcaccctggtgaccaacagctacattgaaggcgatgtggatatcgtttccggccgcggcgcgggtggtgtttgataacaccgatttccgcgtggtgaactcccgtacccagaaagaggcttatgtcttcgcgccggctactctgaagagcgtgacctacggcttcctggcgaccaacagccgcttcaccgcctccggggataacgtcgcgcagctcggccgcgcgctggatgtcgatggcaacagcaacggccaggtggtgatccgcgacagcgctatcaatgaaggctttaatattgcccagccgtgggcggcggcggtaggctccggccgcccgttcagcggcaacaccggcagcgccgatgacaaaggcaatctgcagcgcaacctcaacgacaacggcttcaaccgcatgtgggagtacaataaccgcggcgtgggaagcaccgtggtcgccgagccgaaacagtaaagcgcaaca

SEQ ID NO: 24056 - DNA, 777 bp, Klebsiella pneumoniae
atgaatcaggttgctgttgtcattggcggtggacaaaccttaggagagtttctgtgccgcgggctggccgccgagggctaccgcgtggcggtggtcgatattcagagcgaaaaagccagccgcgtcgcccaggagattaacgctgagtatggcgaaggtatggcgtacggcttcggcgccgacgccaccagcgaggccagcgtcaccgccctggcccacggggtggatgagattttttcgcgcgtcgacctgctggtgtacagcgccgggatcgccaaggcggcgtttattagcgacttcgcgctgggggatttcgaccgctcgctgcaggtcaatctggtgggctattttctctgcgcccgcgagttctcgcggttgatgatccgcgacggcattaaggggcggatcattcagatcaactcgaaatccggcaaagtcggcagtaagcacaactccggctacagcgcggcgaagttcggcggcgtcgggctgacccagtcgctggcgctggatctggcggaatatggcattaccgtgcattcgctgatgctcggcaatctgctgaagtcgccgatgttccagtcgctgctgccgcagtatgccaccaagctcggtatcgatgagagcgaagtcgagcagtactacatcgacaaggtgccgctgaagcgcggctgcgaatatcaggatgtgctgaacgtattgatgttttacgctagcccacaggcgtcgtactgcaccgggcagtcgatcaacgtcaccggcggccaggtgatgttt

SEQ ID NO: 24057 - DNA, 420 bp, Klebsiella pneumoniae
atgctcaaaaccatttccccgctgatatcgccggaactgctgaaagtgctggccgaaatgggccatggggatgaaatcattttttccgatgcccatttcccggcgcacagcatggggccgcaggtgatccgcgccgatggcctgcgagtcagcgatctgctgcaggcgattatcccgctgttcgaattagacagctatgcgccgccggtggtgatgatggccgccgtcgaaggcgatgcgctcgacccgacggtggaacagcgctatcggcaggcgctctcagcgcaagccccctgcccggatatcgtgcggattgaccgctttgccttctacgaccgggcgcaaaaagcctttgcgatcgttatcacaggagagtgcgctaagtacggaaatatccttttaaaaaaaggagtcacgccg

SEQ ID NO: 24058 - DNA, 231 bp, Klebsiella pneumoniae
atgaacccaaccattaaaaccgcaattaatattgtcggctctcagaaaaagcttggtgaagcctgcgatgtttctcagcaggcggtttacaagtggctccacaacaaggcaaaggtttcgcctgaacatgtaaacagcatcgtaaatgcaactaatggggaggttcaggcgcatcaaattagaccagaccttccaaaactattcccttctccgaagggcgttccggccgcc

SEQ ID NO: 24059 - DNA, 1341 bp, Klebsiella pneumoniae
atggatcagacgtgcactctggaaggctttctcacccgcgttcaacagcgcgatcctcatcaaaccgaatttgctcaagccgtccgggaggtgatgaccaccctgtggcctttccttgaggaaaatccgcgctatcgtcagcttgcattgctggaacgtctggtggaaccggagcgcgtgatccagttccgcgtggtgtgggtggacgaccgcaatcaggtccaggtcaaccgcgcgtggcgcgtgcagttcaactcggccatcggcccgtataaaggcgggatgcgttttcacccgtcggttaacctgtcgattctcaaattccttggcttcgagcagaccttcaaaaacgccctgaccactctgccgatgggcggcgggaaaggcggcagcgatttcgatcctaaaggcaagagcgatggcgaagtgatgcgtttctgccaggcgctgatgaccgaactctatcgccaccttggcccggataccgacgtaccggcgggcgatatcggcgtcggcggtcgcgaagtcggctttatggccggaatgatgcgcaagctctccaacaacagcgcctgcgtcttcaccggtaaaggactctcctttggcggcagcttgatccgtccggaagccactggttacggcctgatctacttcaccgaagcgatgctcaaacgtcacggcctcggcttcgaaggcgctcgcgtggcggtctccggctccggcaacgtcgcgcaatacgccattgagaaagcgatggagcttggcgcgcgggtggtgacggcctccgactccaacggcaccgtcgttgacgaagcgggcttcaccaaagaaaaactggcccgcctgatcgacattaaagagcgtgcccacggccgcgtggccgattacgcccgcgaatttggcctcacctatcttgaaggccagcagccgtggtcagtgccggtggatattgccctgccttgcgcgacccagaacgaactggacgtcgatgccgcccgccagctgattgccaatggcgtcaaggccgtggcggaaggcgccaacatgccgaccaccatcgccgcaaccgacctgttcctggaagctggcgtgctgtttgccccgggcaaagcggccaacgccggcggcgtggcgacttccggtctggagatggcgcagaacgccgcgcgcatgggctggaaagcggaaaaagtggatgcccgcctgcatcacatcatgctggatatccaccacgcttgcgtgcagtacggcggcgaagcgaagcagaccaactacgtgcgcggcgcgaatatcgccggtttcgtgaaggttgcggatgctatgctggcccagggcgtgatt

SEQ ID NO: 24060 - DNA, 1341 bp, Klebsiella pneumoniae
atgtctgctaaccatgctgcgtttaatttgatatttcgctttgtagaaaattacataagccccatagcagggcggatctcgtcgcagcgccacgtcatggctatccgtgacggatttatctcagcgatgccgtttatgatcgtcggatcgttcctgttagtgtttgcttatccaccgttctcaccggataccacctggggttttgcccgcgcctggctggagctggcgaaagagtttgaggggcgtattctgaccccctttgatatgacgatggggatcatgtcgatctacatctgcgcggcaatctcctataacctcggtaagcattacgagaaatccaatcagctcgatccctttatgtgcgcaatgctgtcgatcatggcctttttgctgattgccgcgccgaaaaccaatggcacgctgccggtggatagcctcggggggaccgggatctttaccgccattctggtggcgatctactgcgtggagatgatgcgtttcttgaaagcgcacaacattgggatccgcttgccggaccaggttccgccgatgatcaaaaactcgtttgatctgttgatcccggtgttggtggtagtgctgacgctctatccgctgagcctgtttatccagcaccattttgacatgctgatcccgcaggccattatggccattttcaagccgctggtttcggcagccgactctctgccggcaattctgttggcggtgctgatcggccacctgctgtggtttgccgggatccacggtgcggcgatcgtgtccgggatgctgcagatgttctggctgactaacctcggtatgaaccagcaggcgctggcccagggcgcgcctctgccgcatatctttatggaagcgttctggaccttctttatcgtggtcggaggttccggggcgaccatgggactggtgttctgttatctgcgcagccgttcagcgcatttgcgctccattggtcgtttgagcgtggtgccaagcctgttcaatatcaacgagccggtgatctttgggacgcctatcgttatgaacccagtgttctttattccgttcctgctggcgccgatggtgaacgcggtgctggcctgggcggcaatgaagctggatctgattggccgcgtcatctccgtcgtaccatggacggcgccagcgccaattggtggcgcctgggcgctgggctgggatttccgggcggcgattctggtcattgttctggcctgcgtgtcggcaatcatctacttcccattctttaaggtatatgagaaacagctgcttgctcaggaagcggaagaggccgagcgggcggagcaggagagtcaacagaccgca

SEQ ID NO: 24061 - DNA, 2328 bp, Klebsiella pneumoniae
atgatgaatgattcgctctgccgcattattgcgggtgaacttcaggccagagccgaacaggtagaagctgccgttcgcctgcttgatgaagggaacaccgtgccgtttattgcacgttatcgtaaagaagtcaccggcggtctggatgacacgcagctgcgtaatctggaaactcgcctcggctatctgcgcgaactcgaagaccgtcgtcaggcgatcctcaaatccatcgctgaacagggcaaactgaccgacgcgctggaaaaagccatcaacaccacgctcagcaaaaccgaactggaagatctctacctgccctacaagccgaagcgccgtacacgcgggcagatcgctatcgaagccgggctcgaaccgctggctgacctgctgtggaacgaaccggcccacgatccggaagcggaggccgcaaaatatattgatgccgataagggcgtagccgacagcaaagcggccctggacggcgcgcgctatattctgatggagcggtttgccgaagacgccgcgctgctggcgaaggtccgtgactatctgtggaaaaacgcccacctggtctccaccgtcgtcagcggtaaagaagaggaaggcgctaaattccgcgactacttcgatcaccatgaaccgatcgccaccgtgccgtcgcatcgcgcgctggcgatgttccgcggtcgcaacgaaggcgtcctgcagctctctttaaacgctgacccgcagtttgacgagccgccgaaagagagccacggcgagcaaattattatcgaccacctgggcctgcgcctgaataacgccccggcggacagctggcgtaaaggcgtcgtcagctggacctggcggatcaaagtcctgatgcatctcgaaaccgagctgatgggcaccgtgcgcgaacgcgcggaggacgaggcaatcaacgtcttcgcccgcaacctgcacgatctgctgatggccgcgcccgccgggctgcgcgccaccatgggactcgatccgggcctgcgcaccggggtgaaagtggccgtcgtcgacgccaccggtaaactggtcgctaccgataccatctatccccacaccggccaggccgccaaagcggccgtcgccgtcgccgcgctgtgtgagaagtacaacgttgagctggtggccatcggcaacggtaccgcctcgcgtgaaaccgagcgtttcttcctcgacgtgcagaaacagttcccgaaggtcaccgcccagaaggtgatcgtcagcgaagccggggcttccgtttactccgcctccgagctggcggcgcaggagtttccggacctcgacgtgtcgctgcgcggcgcggtctccatcgcccgccgtctgcaggatcccctggccgagctggtgaaaatcgacccgaaatccattggcgtcggccagtatcagcacgacgtcagccagacccagctggcgcgtaagctggacgcggtggtggaagactgtgtgaacgccgtcggcgttgacctgaacaccgcctccgttccgctgctgacccgcgtcgccggcctgacccgcatgatggcgcagaacatcgtcgcctggcgcgacgagaatggtcagttccagaaccgccagcagctgctgaaagtcagccgtctggggccgaaagcctttgaacagtgcgcgggcttcctgcgtatcaaccacggcgacaacccgctggatgcctccaccgttcacccggaagcttacccggtggtcgaacgtattctggccgccacccagcaggcgctaaaagatctgatgggcaatagcagtgcgctgcgccacctgaaggcagtggacttcaccgatgagaagtttggcgtcccgacggtcaccgacattatcaaagagctggaaaaaccgggccgcgatccgcgtccggagtttaagaccgcgaagttcgccgatggtgtggagaccatgaatgacctgctgccgggaatgattctggaaggtgccgtcaccaacgtcaccaacttcggcgcgtttgttgatatcggcgttcatcaggacggactggtacacatttcgtcgctttctgaccggtttgttgaggatccgcacaccgtggtgaaagcgggcgacatcgtcaaggtcaaagtgatggaagtcgatctgccgcgtaagcgtatcgccctgaccatgcgtctcgacgagcagccgggcgacagcaacgcccgccgcggcggtggtcaggagcgcccgcagggaaatcgcccggctgcgaaagccgccaaaccccgcggtcgcgaggcgcagcctgccggcaacagcgcgatgatggatgccctcgccgcagcgatgggtaaaaaacgc

SEQ ID NO: 24062 - DNA, 1851 bp, Klebsiella pneumoniae
gtgcccctagagtatccgcattatccttgtgccggagtggttatgtccagcaatgctcaagtccgccgtcgcgccgtgcaggccgcgcgcggtgaatccccgtttgatctgctgctgatcgatgcgcagatcgtcgatatggccacgggcgaaattcgccccgctgacgtcggtatcgtcggcgagatgatcgccagcgtccatccgcgcggcagtcgcgaagacgcccatgaagtgcgttccctggccggtggctacctgtcccccggcctgatggacacccacgtgcatctcgaaagctcgcacctgccgccggagcgctatgcggaaatcgtcctcacccagggcaccaccgcagtgttctgggatccgcatgagctggccaacgtcctcggcgtcgctggcgtgcgctatgcggtggacgccagccgccatctgccgctgcaggtgatggtcgccgcgccgtccagcgtcccctccacgccgggtctcgaaatgtccggcgctgatttcgctggcgaggagatggagaccatgctcggctggccggaagtgcgcggcgtggcggaggtgatggatatgcacggcgtgctgcacggtagcgagcggatgcaggagattgtccaggccggtctcaacagcggcaaactgattgaaggccacgcccgcggcctgagcggcgctgacctgcaggcctacctcgccgccggcgtcacctccgatcacgaactgacctcggcggacgacgcgctggaaaaactgcgcgccgggctgacgatcgagatccgcggctcgcacccctatctgctgccggatatcgtcgcggcgttaaaaacgctgccgcacctctcctcgcagatcaccgtctgcaccgatgacgtgccgccggatatgctgctggagaaaggcggcatcatcgccctgcttaatctgctgatcgagcacggtttaccggcggttgatgcgctgcgattcgccaccctcaacgccgctattcgcctgcagcgccacgatctcgggctgattgccgccgggcggcgcgccgatctggtggtgtttgattccctggagaaactggtggcccgcgaagtctacgtaggcggtaagctgctggcccgcgcgggcaacctgctgacaccgatcgcgcccgccgcgggcgtcacgccgccgcgcgatactttgcagatcgctcccctccgcgccgatgactttattctgcgcgtccagggcattcgtcacggcatcgcccgcctgcgccatatccgcggcgcgcgcttcacccagtggggcgaagtggaagtgcaggttcgtgacgggaaagtccagctacccgccggcttcagtctgatctgggtcaagcaccgccacggccgccatcaggcgacgccgcaaatcgccctgcttgaaggctggggtgagctgcgcggcgccatcgccaccagctactcccacgactcgcataatctggtggtgctcgggcgcgacgctaatgatatggcgctggcggccaaccagcttatcgcctccggcggcgggatggcgctggcgcaacagggcgagatcctcgcccatgtggcgatgccgattgccggcatgctgtcggatctcccggccgcggaactggcgcgtcagttccgcgagctgcgcgatctgagcagccaagtcgccgactgggagccgccgtaccgggtcttcaaggccattgaaggcacctgccttgcctgtaacgccgggccgcatttaaccgatttgggtctgaccgacggcggcagccgccagatagtcgacccgttgatagcctgccgggagatcccggagccaaccgatcacaacaataatcctcagggagcc

SEQ ID NO: 24063 - DNA, 1212 bp, Klebsiella pneumoniae
ctggcggtagtgattatcgccggggccgcctactggttctggcacgatcgcgggacgagcggcagcggggctcccgccgccgtggcagggcccgcagtgcgccgggcggcgcacggccatgtgccgctttggcgccgacgctggcgccggtgcaggcggccacctgcaccgaccgaagcggtcccgcgctatctcaccgggctgggtacggtgacggcggccaacaccgtcaccgtccgcagccgggtcgacggccaactgctgagccttcacttccaggagggtcagcaggtcaaagccggcgacctgctggcgcagatcgaccccagccagtttaaagtcgctctcgcccaggcgcagggtcagctggcgaaagatcaggccaccctcgccaacgcccgccgcgatctcgctcgttaccagcagctggtgaagaccaacctcgtctcccgccaggagcttgacactcagcagtcgctggtggtggaatccgccggcacggtgaaagctgatgaagcggccgtcgccagcgcccaactgcagctcgactggacccgcattaccgcgccaattgacggccgcgtcggcttaaagcaggtcgatatcggcaaccagatctccagcggggataccaccgggatcgtggtccttacccagacgcacccgatcgacgtggtctttaccctgccggaaagcagcatcgccacggtggtgcaggcgcagaaagcgggcaaaacgctcagcgtcgaagcctgggatcgcaccaataagcagaaaatcagcgtcggcgagctgctgagcctcgataaccagatcgatgcgaccaccgggaccatcaagctgaaggcgcgctttagcaatctggacgacgcgctgttccccaatcagttcgttaacgcccgcctgctggtggacacccagcagaacgcggtggtgatccccgccgccgcgctgcagatgggcaacgaagggcatttcgtatgggtgctgaacgatgagaataaggtcagcaaacacagcgtgacgcccggcatccaggacagccagaaagtagtcatcagcgccgggctttccgccggagatcgcgtggtcaccgacgggattgaccgcctgaccgagggggcgaaggtggaagttgtcaccgccagcagcggcgagcaggcgcagcccgccccgcgccagagcggtaaacacggagcgcgttcctgatgc

SEQ ID NO: 24064 - DNA, 1035 bp, Klebsiella pneumoniae
atgaccagaaccactttttcccgccgccgttttttacagctcagcggcggcctggcgctggccggggtctctctgccgctgtgggctcatgatatggcggacatggccggcggcgatgcccatccggcgctgcgcctgccagagccctacaagatcaagctggcgatcaacaaaagcgcggtatgcctcgcgccggtcgccgtcgccgagcagcagaagatattcagtaaatacaacctcgacgttgagtttgttaacttcggcaactccaccgatgtgctgctggaggcgatcgccaccggtaaggccgacgccggggtggggatggcgctgcgctggctgaaggcgctggagcagggctttgacgtcaagctcaccgccgggacccacggcggctgtctgaacctgctgacggctaaagactcgccgttcggcggcctcgagagcctgaagggtcaaaccatcggcgtcaccgacatggccggaccggataaaaacttcttcgccattctgcttaagcgccacggtatcgacccgatcagcgacgtgcagtggaaagtctacccggcggatctgctcagcgtggcgctggacaagcgcgaaatcgccgccatcagcggcagcgagccgttcagctatcgtctgctggagaccggtaagtatcagctgatcgccagcaatatgaccggggattatgccaacctcagctgctgcgtgctgggggtgagcgggagcctggcgcgggaccataaaccggccgccgcggcgctcacccaggcgatccttgaggcgcacagctatgccgctgcgcatccggaaagcgtggcgcaatccttcctcgcccatgccctgaataccagtgaagcggaggtgagcggcatcctccacgggcagggccacggccatcacgcggtgggcgaagcgttcgtgaaagagctgacgcagtatgcggtcgacctgcagcgggtgcaggtgatcaagccgggtaccgatccccatcagttcgcggagagtatctatgccaacgtattcgcc

SEQ ID NO: 24065 - DNA, 1365 bp, Klebsiella pneumoniae
atgatcagcgtattcgatatctttaaaatcggcattggcccttccagctcccataccgttggaccgatgaaagcgggcaaacaattcactgacgacctgatcgcgcgcggcctgctggccgaggtgagcaaagtcgtcgtcgacgtcttcggctccctctccctgaccggtaaaggccaccataccgatatcgcgattatcatgggactcgccggcaacctgccggacaccgtcgacatcgacgccattccgggctttattcaggacgttaatacccatggccgcctgatgctggccaacggtcagcacgaagtggacttcccggtggatcagtgcatgaatttccatgccgacaacctgtcgctgcatgagaacggcatgcgcatcaccgccctggccggcgacaaggtgctctacagccagacgtattactctatcggcggcggctttatcgttgatgaggagcacttcggccagactaccgaggcgccggttgccgttccttacccttacaaaaacgccgccgacctgcagcgtcactgccgtgaaaccgggctgtcgctctccggcctgatgatgcagaacgaactggcgctgcacagcaaagaagcccttgagcaacacttcgccgcggtgtgggaagtgatgagcgccggtatcgagcgcggcatcaccaccgaaggcgtcctgccgggcaaactgcgcgtcccgcgccgcgccgccgcgctgcgccgtatgctggtgagccaggacaccaccaacagcgatccgatggcggtggtcgactggatcaatatgttcgccctggcggtgaacgaagagaacgccgccggcggccgggtggtgaccgcgccaaccaacggcgcctgcggtatcgtgccggcggtgctggcctactacgacaagtttatccgcaaggtgaacagcaactccctggcccgctatatgctggtcgccagcgcgattggttcgctgtataagatgaacgcctccatctccggcgccgaagtcggctgccagggtgaagtgggggtcgcctgctcgatggcggcggccggtctggcggaactgctgggcggcagcccgggtcaggtgtgcatcgcggcagagatcgctatggagcataacctcggcctgacctgcgacccggtcgccggccaggtgcaggtgccgtgcatcgaacgcaacgctatcgctgccgtgaaagcggtcaacgccgcgcgaatggcgctgcgccggaccagcgagccgcgcgtgtgtctcgataaagtgatcgagaccatgtacgaaaccggcaaagacatgaacgccaagtaccgggaaacctcccgcggtggtctggcgatgaagattgttgcctgcgat

SEQ ID NO: 24066 - DNA, 300 bp, Klebsiella pneumoniae
atggaactgaccccccgagaaaaagacaagctgttgctgtttaccgccgcgctggtggcggagcgtcgcctggcccgcggcctgaagctcaactatccggagtccgtggccctcatcagcgcctttattatggaaggcgctcgggacggcaaaagcgtggcctcgctgatggaggaaggccgtcacgtcctgacccgcgagcaggtgatggagggcgtcccggaaatgatcccggatatccaggtcgaagccaccttcccggacggctcgaagctggtcaccgttcacaacccgattatc

SEQ ID NO: 24067 - DNA, 894 bp, Klebsiella pneumoniae
atgaacctaaagcaactttattattttaaacgtctgtctgaaactgagcattacaccgaagccgcctccagtctgtgcatcacccagccctcgctaagccacgcgatatcggagctggagaaggagttaggggtcgcgctattcgccagacaggggcggaacgtaaaaattacccaaaacggcaagcgttttttgccgtatgttgaagatgcgctggcctcgctggagaacggacgcatgatattgcaaaaaaatggcgctgagaataaagagaatattcgcatcgcctttatttacacgatgggggagtatgttgttccacagttaattaataaatattctctttcacctgaatgtcacaatgtgactttttcttttactcaagggacatcgctgacgctgttgcaggagctgaaggccggaaaagtcgatctggcgatctgctcttatattgccgatgaacccgatatcgattttattccggtgatccagcaggaactggtggtggtcacggcaaaggatcatccgctggcccggctatatgaacatgaagtcgatctggtggagacgattcattatccgtatatctatttttcagaaaatagcggcttacgtccgtttatcgataatgtatttatgcagcaaaagctggtgccggagatcgcctgctatgtggatgaggatacggcgatggccgggctggtgagtattgactacgggatcgcgattatgccgcgcatcaccgcgctctcctattacaatgtccatatcctgaagattaaaaacaccatccccccccgctatatctatctggcgaccatgaaagacaaggggctctctccggcgctggagtcatttaaaaatgtggttatccacgacagccagaagatctgt

SEQ ID NO: 24068 - DNA, 1027 bp, Klebsiella pneumoniae
tgtcatgtaaccaactcaaatgttaataatattttgctatctggttatcaaatttaaacaagtccgcttgtctctttcaccgctgtgtttttaacatcatcttactatggaaaaaaatggtctcttcagtcagcgcattcgcttgcgccatctacacaccttcgtggccgtcgctcaacagggaacgctggggcgcgcggctgaaacattaaatctgagccagccagcactctcgaaaacgcttaacgagctagaacagctgaccggtacccggctgttcgagcggggtcgtcttggggcgcagctaaccctggtcggcgaacagtttctgacgcatgccgttaaggtgcttgacgcccttaattcggccggccaggcgctgaaccgcaaagagggcctgaataacgacatcgtgcgcatcggcgcgctgcccaccgccgcgctggggatcctgccgacggtgatcggccagtttcacaagcagcaaaaagatatcacgctgcaggtcgccactatgaacaacaccatgctgcttgccggcttaaaatccggggagatcgacatcggcattggacgtatgtccgacccggagctgatgagcgggctgcattacgaactgttgttccttgaatccctgaagctggtggttcgcccgggacatcccctgcttcaggagacggtgacccttagtcgggtgatggagtggccggtggtggtctcacctaaaggcaccgtgccgcggcaaaacgccgaagcgctgctccagagccagggctgtaagatgcccgccggctgcatcgagaccctctccgcctccctgtcgcgccagctgacggtggattttgactatgtctggtttgtcccttccggggcggtaaaagacgatcttcgccgtggcgtgctaaccgccctgccgatcaccacccagggcgccggagagcccatcggcattttaacccgcgtcgatgcgacactgaccccgggtacgcagacgctgctcagcgctatccgtaagtccatgcctgcc

SEQ ID NO: 24069 - DNA, 543 bp, Klebsiella pneumoniae
gtgacggctcaccggcataaccagtatgataacggttcaaccaacccgggaccgactatggacaaagacacagtagtaacgctgttgaaatacaagcgctggattgaccttgccaccttacaggcgatccgcgcgattgacggaacggtacatggcgaaaagcgtcacctgaccatcaggctgatgaaccatatccatgtcgttgatatgattttccgggcgaacctgcgcggcaggccgcacggctacaccgcgctgaatacccctgagacgccaaccgttgatgagctggaaacggccatgaccgcctgtacggacgaatacattcagtacgtcagcgccatgacccccgccgatttccacgaacgtatcgccttcaaatttgtcgacggcggcgacggcaatatgaccgcgatggagatgctgaaccacatgctctttcacggcgcctatcaccgcggcgcggtgggctggatgattggcgaatgcggcggggtgccgccgaaagaggtgctgaccgttttcctgcgcgaccatcattcc

SEQ ID NO: 24070 - DNA, 1437 bp, Klebsiella pneumoniae
atgaaagttgactggcttttcaaaaacgtcacggtgatcgacgggagcggcgggccgcaataccgtgctgatgtggcggtgaagggcgatcgaattatggctatcgccccggcgctggacgttgcggcggagcaggtgattgatggccaggggcgggtactggcgccgggctttattgatgtgcatacccatgatgatatcaacgtgatccgcatgccggagtacttgccgaagctcagccagggggtgacgacggtgatcgtcggcaactgcgggatcagcgcggcgaccgccaccatgcggggggaagtgccggacccgatgaatctcctcggcgagcagcaacactttatctatcccaccgtggaggcttatgcccatgcggtggaagcggcgcgaccgtcgctgaatgtcggcacgttaatcggtcacaccgcgctgcgtaataaccatatggacgatctgtttcgtccggcgaacgagacggaaatcgccggtatgcgcgtacagctacgcgatgcgctgcgccagggagcattagggctcagtaccgggctggcctacgccagcgccttccagtcgactaccgaagaggtgatggcgctggcggaagagctggcggccgggaagggcgtctataccacccatttacgttcagagtttgagccgattctcgaggcgctggacgaagcctcccgtattggccgtcacggcaacgtgccggtggtggtttcgcaccacaagtgcgccggggcgaaaaactgggggcgtaccaaagagacgctggcctttttcgatgagatgcgccagcagcaggatatcgcctgcgactgttatccctattcagccagctcatcgacgctggatatgaaacaggtgaccgacgagtttgatatcgtgatcacctggtccgaagcgcagccggagcaggcggggaaaacgctgcagcagatcgccgatgagtggcaggtgagcctgcacgacgccgcggcgcggctgatgccggcgggcgctatttatcacaacatggatgagcaggacgtacggcgggtgatgcgctatccggtcaccatgattggctctgacgggctgccgaacgatccgatgccgcatccgcgcctgtggggcgccttcccgcgggtgctcggccactatagccgcgacgagcagctattcccgctgactaccgcggtacacaagatgaccgggctgtcggcggcgcgcttccagctggcggatcgcgggctggtgaaaattggctactttgccgacctggtgctgtttgacccgcagacggtgcgcgatgtcgccagtttctccgacccgaaacgaccggcggacggcattgaggcggtgatggtcaacggcgtgatgagctacggcagtgataagaaaattaccggacgggcagggcgtttcctgcgtcgtcggatggac

SEQ ID NO: 24071 - DNA, 810 bp, Klebsiella pneumoniae
atggagcgccgctacaagctgatgtcggcgctgggcgtgcgtaacctcgcgggctacaacgagaagatcgccgaagccgcgcgcatgggacgtccgatcccggatccgtactggaagcctggcgacagcatggacgccgtacatccggtgctggaaaaactgccgtacatcgtggtgctggtggatgaattcgccgatctgatgatgaccgtcggcaaaaaggtggaagagctgatcgctcgcctggcgcagaaagcgcgcgcggcggggatccacctggtgctggcgacacagcgtccgtcggtagatgttattaccggcctgataaaggccaacatcccgacgcgcatcgcctttaccgtgtcgagtaaaattgactcacgtaccattctcgatcagggcggcgcggaatcgctgctgggtatgggggatatgctttactccgggccgaactctaccacgccggtgcgtgtccacggggcgtttgtgcgcgaccaggaagtccacgccgtggttcaggactggaaagcccgcggtcgcccgcaatatgtggatggcattacctccgacagcgaaagcgaaggcggcggtggcggcttcgacggcggggaagagctggatccgttgttcgatcaggcagtcaactttgtgaccgagaagcgcaaagcgtcgatttccggggttcagcgtcagttccgcatcggctataaccgtgccgcgcgtattatcgaacagatggaagcgcagggtatcgtcagcgagcagggccataacggtaaccgcgaagtgctggcgccgccgccctttgaa

SEQ ID NO: 24072 - DNA, 900 bp, Klebsiella pneumoniae
atgaagtatatcattctgttgatcattgttattgctgtactgtatgtccattaccgcggacgggtgcgctatcgtttctggcggcagctctccgaccattccacatttaccgcgccgctgaatggatttatgtatttattttcccgcgtgccgaatacgccttatctgcggccggagatgtttcccgagctggcgatattgcagcaaaactggcaggttattcgcgacgaaggtctccaccttcagcagctggagcagattaaagcggccgataaatataacgatgccgggtttaactcatttttcaaaaccggctggaaacgcttttatctgaaatggtatgaggatgcccatccttccgccagccagctctgtccgcaaactaccgcgctgctgcgcgatatcccgtcggtgaaagcggccatgttcgccactctgccggacggtagccgtctgccgcgccatcgcgacccctacgccggctcgctacgctttcatctgggcctggcaacgccgaacgatgaccgctgctttatcgaggtggatggccagcgttacagctggcgcgatggagaaggcgtgctgtttgatgagacctatatccactatgcggaaaataccagtggtgagaatcgcctgattctgttctgcgatattgaacggccgatgcgctaccgctgggcgcagaaagttaaccactggctgggacgccatctgatgagcgccgcttcggcgcccaacgatatcggcgatcgcaccggcgggattaaccgggcgtttcgctatatttaccagatccgtattgttggtaagcggttgaaaaaatggaataagacggtctattacatcgtcaaatggctgctcttcggcggcattgcctggcttatctggagcgcgttt

SEQ ID NO: 24073 - DNA, 417 bp, Klebsiella pneumoniae
atgaaaaaagtattagctctggtcgttgccgctgctatgggtctctcttccgccgctttcgctgctgacgcagtaagcaccactcaggcaccggctgccacccacagcacggctgccaagaccacccatcacaaaaaacaccacaaagccgcggcaaaaccggccgcagagcagaaagctcaggctgccaaaaaacacaaaaaagcagaagctaaaccagccgctgctcagaaagcccaggccgctaaaaaacacaaaaaagtagcagctaaaccagctgctccgcagaaagctcaggcggcgaaaaagcatcacaaagctgcggctaaaccggcagcccagaaagcgcaggcagcgaaaaaacaccacaaaaccactaaacaccaggccgctaaaccgactgcacagccggcagca

SEQ ID NO: 24074 - DNA, 1310 bp, Klebsiella pneumoniae
cagaccatggcgatgcagctgggcggccatgtagaaggttctaacgagcgtgagtttggttacgcgcaggttgaagtggttaacgacagcgcgctggtgcgcggtatcgaagattccctgaccgcagacggcaaaccgctgctggacgtgtggatgagccacggcgacaaagtgaccgccatcccggcggacttcgtaaccgtcgccagcaccgacaactgcccgttcgccattatggccaacgaagaaaaacgcttctacggcgtgcagttccacccggaagtgacccacacccgtcaggggatgcgtatgctggagcgcttcgtgcgcgacatctgccagtgcgaagcgctgtggaccccggcgaaaatcattgacgacgccgttgagcgtatccgtcagcaggttggcgacgacaaagtgatcctcggcctctccggcggtgtggactcttcggtgactgcgatgctgctgcaccgcgctatcggcaaaaacctgacctgcgtattcgtggacaacggtctgctgcgcctgaacgaagcgcagcaggtgatggagatgttcggcgaccactttggcctgaacattgttcacgttgaaggcgagcagcgtttcctcgacgcgctggcgggtgaaagcgatccggaagcgaagcgtaaaattatcggtcgcgttttcgtggaagtgttcgacgaagaagcgctgaagctggacgacgtcaaatggctggcgcagggtaccatctaccctgacgttatcgaatctgccgcttccgccaccggtaaagcgcacgtcatcaaatctcaccacaacgtgggcggcctgccgaaagagatgaagatgggcctggttgagccgctgcgtgagctgttcaaagacgaagtgcgtaagatcggcctggaactgggcctgccgtacgacatgctctaccgtcacccgttcccgggccccggccttggcgtgcgcgtgctgggcgaagtgaagaaagagtactgcgacctgctgcgtcgtgcggacgctatcttcatcgaagagctgcacaaagctgacctgtataacaaagtcagccaggcgttcaccgtgttcctgccggttcgttccgtcggcgtgatgggcgatggccgtaaatacgactgggtggtttccctgcgtgcggtggaaaccatcgacttcatgaccgcgcactgggcacacctgccgtacgatttcctcgccgcgtctccaaccgtatcatcaatgaagtgaacggtatctcccgcgtggtgtatgacatcagcggcaagccgccagcaacgattgagtgggagtaa

SEQ ID NO: 24075 - DNA, 477 bp, Klebsiella pneumoniae
atgatcagtctgattgcggcgttagcggtagatcgcgtcattggtatggaaaacgccatgccatggaacctgcctgccgatctcgcctggttcaaacgcaacacgttaaataagccggtggtgatggggcgtctgacctgggaatccattgggcgcccattgccggggcgtaaaaatatcgtgatcagcagcaaacccggcagcgacgatcgcgtgcagtgggtctcctccgtagaagaagcaattgctgcctgcggcgatgtggaagagattatggtgatcggcggcggccgggtgtatgagcagttcctgccgaaagcgcagaagctctacttgacccatattgatgcggaagtggaaggcgatacccatttcccggattacgatccggacgaatgggagtcggtgttcagcgagtttcatgacgccgacgcgcagaactcccatagctactgctttgagatcctcgaacgccgt

SEQ ID NO: 24076 - DNA, 897 bp, Klebsiella pneumoniae
atgttagacaacacccgtttacgcatagctattcagaaatcaggccgtttaagcgaagattcacgcgaattactcagccgctgcggcattaaagtcaatttgcacacccagcgtctgattgcgctggcggaaaatatgccaatcgatattctgcgcgtgcgtgatgacgatatcccgggcctggtgatggacggtgttgtcgacctcggtattatcggcgaaaacgtgctggaagaagagctgctcagccgccgcgcccagggcgaagacccgcgctacttcaccctgcgccgtctcgacttcggcggctgccgcctgtcgctggcgactccggtggatgaagcctggaacggcccggcggcgctggacggcaaacgtatcgccacctcttacccgcacctgctgaagcgctacctcgatcaaaaaggtatctcctttaaatcctgtctgctgaacggctccgtggaagtggcgccgcgcgccggcctcgccgacgctatctgcgacctcgtctccaccggcgccaccctggaagctaacggcctgcgcgaagtggaagtgatctaccgctccaaagcctgtctgatccagcgcgacggtgaaatggccgacgccaaacagcagctgattgaccgcctgctgacccgtattcagggcgtgattcaggcccgcgagtcgaaatacatcatgatgcacgccccgaccgaacgcctggaagaagtggttgccctgctgccgggcgccgagcggccgactattctgccgctggcaggcgacaagcagcgcgtggcgatgcacatggtcagcagcgaaaccctgttctgggagaccatggaaaaactgaaggcgctgggcgccagctccattctggtgctgccgattgagaaaatgatggag

SEQ ID NO: 24077 - DNA, 294 bp, Klebsiella pneumoniae
caggtgggagagctggcgaagcgtgccggactgacggtacgtacgctgcatcattatgaacagacggggctgttaacgccttcggccagaagcgaggcgggctatcggctctataacctgtccgcggttcagcgcctgcatatgataaaggcgctggcgcaggccgggctaacgctcgccacaatcaaggactatctcgatcggcaaacgctgtcgctgcccgagctgctgacgcagcagatagatatgctcaacgcccagctacgcgatgttggcaggctgcgcgaccgacta

SEQ ID NO: 24078 - DNA, 90 bp, Klebsiella pneumoniae
gtgtccgagaacgccaacgccatcgtcatccagtatcagggcaagccttatgtccagctgaatggcggtagctgggtgccttatccgcaa

SEQ ID NO: 24079 - DNA, 469 bp, Klebsiella pneumoniae
atggatattcgtaagattaaaaaactgatcgagctggttgaagaatcaggtatctccgaactggaaatttctgaaggcgaagagtctgttcgcatcagccgctctgcaccggccgcaagctatccggttatgcagcaggcttatgctgcgccgatgatgcagcctcaggcgcctgccgccgcgactgccgcaccagctgctgcggctgaagcgccggcgaaagcggaaatcagtggtcacatcgtacgttccccgatggttggtactttctatcgtacgccgagcccggacgcgaaagcgtttgtggaagttggccagaaagttaacgtgggcgacaccctgtgcatcgtcgaagcgatgaaaatgatgaaccagatcgaagccgacaaaagccggcgtggtgaaagccattctgatcgaaagcggccaaccagtagaattcgacgagccgctggtagttatcgagtaa

SEQ ID NO: 24080 - DNA, 198 bp, Klebsiella pneumoniae
atgctcccgttggtcagcaaccatcgcactcgcattttcgaggcgataatggccggggagccggagcaggcgcgtgaagcgtcgcaccgtcacctggcgttcattgaggaaattttgctggatcgtagtcgtgagcagagccgtcgagagcgctcactgcgtcgtttacagcaacgaaaggacgagaactccggttct

SEQ ID NO: 24081 - DNA, 1725 bp, Klebsiella pneumoniae
gtggttgaaatggcggatgaagttgttagtccgtctcagtatttaattgattggatgttgagtaagcactggaatgttcctgaagaacgtcatgtaattttaaattgcgagccatttcaagggtttgtgacgagagatgatgttacagttaaaataaatgaaaagccagcttctggcgttgagcttgtatttttcggccgccttgaaacccgtaaaggacttgacatattcctgcgtgcattaagaaaactatctgatgaagataaagagagcatttctggagtaaccttcctcggaaaaaatgtcactatggggaaaactgattcatttacttatattatgaatcagactaaaaatttgggactcgcagttaatgtcatcagcgactatgatcgtaccaacgctaatgaatatataaaaagaaaaaatgtattagtcatcattccatcacttgtagaaaactcaccctatactgtttatgaatgcttgattaataacgttaatttcctcgcttcaaacgttggtggaattccagagcttattccgcaggagcatcatgcggaagttctatttattcctacacctgtcgatttatacgggaaaatccactatcgcttaaaaaatataaatataaaaccagggcttgctgaatcacaagacaatattaaagaagcttggtttgccgcagttgaacgaaaaaacaaccgcgcattcaagaaaatcaatgaagctaacagcccgttagttagcgtgtgtataactcacttcgaacgtcaccatttgcttcagcaagcactcgcatcaataaaatctcagacgtaccaaaatattgaggtcatcttggttgatgatggaagtacgacagaagattctcatcgttatttaaatctcatcgagaatgattttaactctcgaggctggaaaattgtccgtagttctaataactatctgggtgctgcaaggaatttggctgcgcgacacgcctctggcgaatatctgatgtttatggacgatgataatgttgctaagccttttgaggtagaaacgtttgttactgcagcattaaactctggggccgatgtgttaaccacaccaagcgatcttatttttggtgaggagttcccttctccgttccgtaaaatgacgcactgctggcttccgttagggcctgatttaaatatcgccagctttagtaactgctttggcgatgctaatgcgctgatcagaaaagaggtttttgaaaaagtaggcggatttactgaagattacggtttaggtcatgaagactgggagttttttgccaaaatatcattacagggatataaattgcaaatcgtcccggaacctctattttggtatagagttgcaaactccggcatgttgttaagtggaaataagagtaaaaataactaccgcagtttccgtccttttatggatgagaatgttaaatataactatgcaatggggttgataccttcctacctcgagaagattcaagaacttgagagtgaagtgaatcgcttgcggagcatcaatggtggtcattctgtcagtaacgagttacaacttttaaataataaggttgatggtcttatttctcagcaaagagatggctgggcccatgaccgttttaatgctctgtatgaagcaattcatgtccaaggcgcaaaacgaggcaccagcctggttcgccgggttgcccggaaagtgaaatcaatgttaaaa

SEQ ID NO: 24082 - DNA, 417 bp, Klebsiella pneumoniae
gtgaaacctgctgctcgtcgccgcgcccgtgagtgtgccgttcaggcgctctactcctggcagttgtcccacaacgacatcgctgatgtcgaataccagttcctggcggaacaggacgtaaaagatgttgatgttctgtatttccgcgaactgctgtccggagtggcgactaacagcgcgtacctcgacggcctgatgaagccctacctgtcccgccagctggaagagctgggccaggttgaaaaagcggtgctgcgtatcgcgctgtttgagctgtccaaacgtgatgacgtaccgtataaagtggccatcaatgaagctatcgaactggcgaaaaccttcggcgctgaagatagccacaagttcgttaacggcgtgctggacaaagcggctccggtaattcgtccccacaagaag

SEQ ID NO: 24083 - DNA, 1203 bp, Klebsiella pneumoniae
atgtcaggcagtatgactcgcgaagattttgacgcttacctggttccctgttttgcccccgcgccgtttattccggtcagagcggcgggctcccgcgtctgggaccagcaggggaaagagtatatcgatatggcgggcggcatcgcagtgaacgccctgggccatgctcatccggcgctggctcaggccctgcaggatcaactggcgaaactgtggcatatcggcaatggctataccaacgagccggtgctgcagctggcaaaaaccctcgtgcagtcgacctttgccgacaaggtgtttttctgcaactccggcgccgaagccaacgaggcggcccttaagctggcgcggaaatatgcccacgataagtttggcggtgaaaaaagcgaaatcatcgccttcaaccacgccttccacggccgcacgctgttcaccgtctccgttggcggccagccgaaatattccagcgattatgctccgctgccgcagggcattacccatctgccctataacgatatcgaggcggtcaccgcggcgatctcctcgcgcacctgcgcggtgatcgtcgagccgattatcggcgaaggcggggtgatcccggcggacccggcgttcctgcaggcgctgcgtaccctctgcgatcgccatcatgccaccctgatattcgatgaggtgcagaccggcgccgggcgtaccggccatctctacgcctaccagcattacaacgtcgtcccggacattctcaccagcgccaaagggctggggggcggcttcccgatcggcgcgatgctggcgaaagaggcctgggcgcaggtcttccagccaggcacccatggcaccaccttcggcggcaacccgctggcggcaaccgtcgctaacgccgtgctggcccatctcgatgcgccgctgctggcgggcgttggcgagcgccatgcgctgatcgttgaccagttgaatgcgatctctgcccgatacgatgcgttcagcgccgtgcgcggcaccggtctgctgatcggcgctgagctggcggggccgctgcgcggcaaggccaaaacgttgactaacctggcggcggaagaggggctgatcgccctgattgccggcccggacgtgctgcgcttcgcgccggcgctcaatatcccgctggcggatattgcggaagccttcgtgcgccttgatcgcgccgttgcccgcttaacccgc

SEQ ID NO: 24084 - DNA, 1304 bp, Klebsiella pneumoniae
atggattcaacaataagcgtgcagcccggcgaggcgccagattcactacatcgggcccggcgggcggcctggggtagttttgccggcgcggtggtcgactggtacgattttcttctctatggcattaccgccgcgctggtgttcaaccgcgaatttttcccgcaaatcggcccggcgatgggaacgcttgccgcctttgccaccttcggcgtgggtttctttttcgcccgctcggcggaattatttttggccacttcggcgatcgcctcgggcggaaacggatgctgatgatgaccgtctggatgatgggtatcgccactgcctgcatcggcctgctcccctcgttcaaccagatcggctggtgggcgccggtgctgctggtgttcctgcgagcggttcagggattcgccgtcggcggcgaatggggcggcgcggcgctgctctcggtggagaatgccccacaggggaaaaaagccttttacagcagcggggtgcaggtgggctacggcgtcggcctcctgctctctaccgggctggtatcgctgattagcagcctgaccagcgaccagcagttcctcagctggggctggcgcgtaccgttcctgttcagcgtggtgctggtccttattgcgctgtggatccgcaacggcatggcggaatcgcaggagtttgaagcgcagcagagcctggacaacgcgccgcagatgaaaaagcggctaccggtagtggaagcgctgcttcgccatccgggagcgtttttactgattatcgccctgcggctgtgtgaactgctgacgatgtatatcgtcaccgccttcgccctcaactactccacgcaaaacctcggcttgccgcgcgagctgtttctcaacattggcctgctggtgggcggtcttagctgcctgactatcccctgtttcgcctggctggcagaccgctttggccgtcggcggatctatatcaccggggcgctgatcggcactttgagcggtttcccgttctttatggcgctggagagtcagtccgttttctggatcctgttcttcgccctgatgctggccaatatcgcccatgatatggtggtctgcgtccagcagccgatgtttaccgagctgttcggcgccagctatcgctatagcggcgccggcgtcggctaccaggtggcgagcgtggtcggcggcggctttaccccgtttattgccgcggcgctggtcaccttctccggcggatcgtggcacagcgtggccctctatctgaccgcaggatgcctgctgtcagcgctcaccgcgctgctgatgaaaaag

SEQ ID NO: 24085 - DNA, 1350 bp, Klebsiella pneumoniae
atgagcaaacattatgattacctcgccatcggcggcggtagcggcggtatcgcctcaattaaccgcgcggccatgtacggccagaagtgcgcgctgattgaagccaaagagctgggcggcacctgcgtcaacgtcggctgcgtgccgaaaaaggtgatgtggcatgcggcgcagatccgcgaagcgattcatctttacggcccggactacggtttcgataccaccatcaaccattttgactgggagaagctggtcgccagccgtagcgcctatatcgaccgtattcatacctcttacgacaacgtactgggtaagaataaagtcgacgtgatcaaaggcttcgcgcgctttgtcgatgcccacaccgtggaagtcaacggcgagatcatcaccgctgaccatatcctgatcgccaccggcggccggccgagccacccggatattccgggcgtcgaatacggtattgattccgacggtttcttcgaactgccggcgctgccgaagcgcgtggcggtggtcggcgcaggctatatcgccgttgagctggcgggggtgattaacggcctcggcgccgaaacccacctgttcgtgcgcaaacacgcgccgctgcgcagtttcgatccgctgatcgttgagaccctggtggaagtgatgaacgccgaaggcccgcagctgcataccaatgcgatcccgaaagcggtggtgaagaatgccgacggcagcctgacgctggagctggaagatggccgcagccagaccgttgactgcctgatctgggcgattggccgcgaaccggcgaccgacaacttcaatctggcggcaacgggcgttaaaaccaacgataaagggtacatcatcgttgataaattccagaacaccaacgtgccgggcatctacgcggtgggcgataataccggcgccgttgagctgacgccggtcgccgtggccgcaggccgtcgtctctccgagcgcctgtttaacaacaaaccggaagagcatctggactacagcaacatcccgaccgtggtcttcagccatccgccaatcggcaccgtcggcttaaccgagccgcaggcgcgcgagcagtacggcgacgacgccgtgaaggtctacaaatcttccttcaccgcgatgtataccgccgtgacctctcaccgtcagccgtgccgcatgaagctggtgtgcgtcggcccggaagagaagattgtcggcatccacggcatcggcttcgggatggatgagatgctgcagggctttgcggtggccctgaagatgggcgccaccaaaaaagacttcgacaacaccgtcgccattcacccgacggcggcagaagagttcgtcaccatgcgc

SEQ ID NO: 24086 - DNA, 2584 bp, Klebsiella pneumoniae
ataaaactaaatgggaaaacaccggtgaagttcgtaaagtatctattgatccttgcagtctgttgcgtactgctgggagcaggctcgatttttggcctctacaaatacatagagccgcaactccccgacgtcgcaaccctgaaggatgtgcgtttgcagatcccgatgcaggtctatagcgccgacggtgagcttattgcgcagtacggcgaaaagcgccgtatccctgtgacgttgcagcaaattcccctcgagctggtgaaagcgtttatcgccaccgaagacagccgcttctatgagcaccacggcgtcgatccggtaggtattttccgcgccgccagcgtggcgatgttttcaggccacgcctcccaggggcgccagcaccatcacccagcagttagcgcgtaacttctttctcagccccgagaagacgttgatgcgtaagattaaagaggcctttctggccatccgcatcgagcagttgctgaataaagatgaaatccttgagctgtatctgaacaagatctacctcggctaccgcgcctatggcgtcggcgccgcggcgcaggtctattttggcaaacctatcgaccaactgaccctgagtgagatggcggtgattgccggtctgccgaaagcgccttccacttttaacccgctctattcgatggatcgcgcgaccgcccgtcgcaacgtggtgctgtcgcgtatgctgagcgaaggatacatcacccaggcgcaatacgatgaggcgcgcagcgaacccatcgacgccagctatcacgcgccgaaaatcgccttctccgccccttacctgagtgaaatggtgcgccaggagatggtgaatcgctacggcgagcaggcctacgaagatggttatcgggtctataccaccattacccgcaaaaaccagcaggcggcccagcaggcggtacgcaataacgtgctggattacgatatgcgtcacggctaccgcggcccggccagcgtactgtggaaagtcggtgaaacgccgtgggagacgaagaagatcgtcgattcgctgaagcgtcagtctggctacggtccgcttttcccggcggtggtcacctccgcgaatgcccaggaggctgtcgcgctgttggctaacggcgactccgtttcgctgacgatggagggcgtgcgctgggcccgtcgctttatctctgatacgcagcaaggggcgaccccgcgtaaagtcaacgacgttgtgcaggccgggcagcagatctgggtacgcaaggtgggtgacagctggtggctgtcccagctcccggacgtcaactcagcgctggtctccattaacccgcaaaacggcgcgattattgcccttgtcggcgggtttgactttaaccagagcaaattcaaccgcgccacccaggcgctgcgccaggtcggctccaacattaaaccgttcctctataccgccgcgatggataaaggcttaacgctggcaagtatgctcaacgatgtgccgatctcgcgctgggatgcgggcgcaggttccgactggcggccgaagaactcgccgccgcagtatgccggtccgattcgtttacgccagggcctggggcagtcgaaaaacgtggtgatggtgcgcgctatgcgcgccatgggcgtagactacgccgccgagtatctgcagcgctttggcttcccggcgcagaacattgtccacacggaatcgttggcgctgggctcagcctcctttacgcccctgcaggtcgctcgcggttattcggtgatggccaacggcggcttcctggtcaatcctttctttatcagtaagattgagaacgatcagggcggggtcctcttcgaggagcgtccgaaaattgcctgtccgcagtgtgatttaccggtaatttacggcgatacgccaaaatccaacgtgctggaaaacaaggatgtggaagatgtcgccacctccgcggaaccgcagaatggcaacgtgccgccgcagccgcagctggagcaggccaaccagtcgctggtcgcgcagagcggcgcacaggaatacgcgccccatgtgattaacacaccgttggccttcctgatcaagagcgcgctgaacagcaacatctttggcgagccgggctggatgggcaccggctggcgcgccggacgcgatctgcagcggcatgacatcggtgggaaaaccgggaccaccaacagctcgaaggacgcctggttctcaggctacggaccgggcgtggtgacctcggtttggatcggctttgacgatcatcgtcgcgatcttggccggaccaccgcctccggagcgattaaagatcagatctctggctatgaaggcggtgccaaaagcgcccagccggcctgggacagctttatgaagagcgtgctggaaggcgttccggaagaaccgttaactccgccgccgggtatcgtcacggtgaatatcgaccgcagcaccggtcagttggcgaacgggggcaatagccgggcggagtactttattgaaggaacccagcccacccagcaggcagtccgtgaggtgggcaccaccctgactgacggcggcggtgaaacccacgaattgttctga

SEQ ID NO: 24087 - DNA, 939 bp, Klebsiella pneumoniae
atgttagacaaagttttgaaaattgccacacggcaaagcccgcttgcgctatggcaggcgcagtatgttaaagcgcgcctggaacaagcgcatcccggactgaaggtcgagctggtgccgatggtcacgcgcggggatgtcatccttgatactccgctggcaaaggtggggggcaaaggcttatttgtgaaagagttagagctcgccatgctcgaagggcgcgccgatatcgccgtccattcgatgaaagatgtgccggtggaattcccggagggcctggggctggtgactatctgcgagcgcgacgatccgcgcgacgcgtttgtctccaatcgctatgcctcgattgacgaactgccggccggcagcgtcgttggcacgtcaagtttacgccgtcagtgccagctggccgccacccgtccggacctggcgatccgctctctgcgcggtaacgtcggtacccggctgagtaagctggataacggcgagtacgacgccatcatcctcgccgccgccggcctgaagcgcctgcagctggaagcgcgtattcgccagccgctgtcgcctgagcaatctctgccggcggtcggccagggcgcggtcggcatcgaatgccgtcttgatgatgcatggacccgggggctgttagcgcctctcaaccatacggaaacggcggtgcgcgtgctcgccgagcgggcgatgaacacccgcctcgaaggcggctgccaggtgccgatcggcagctatgcggaactgaaggacggggaactgtggctgcgggcgctggttggcgctccggatggttcacagctggtgcgcggcgaacgacgcgggccagcggaacaggcggaagccctcggcatctcgctggcggaagagcttctggataatggcgcccgcgagattctcgcggcggtttatgatggagaagccccgcga

SEQ ID NO: 24088 - DNA, 2295 bp, Klebsiella pneumoniae
atgaaatggctctgcactgtaggcgtcgccgtgagtctggcgctgcaacccgcgctggcggatgaactgtttggtaaccaccccctgaccccgcaggcgcgggatgcctttgtcaccgacctgctgaaaaaaatgacggtggacgagaaaatcggccagctgcgtctgataagcgttggcccggataacccgaaagaggcgatccgtgaaatgatcaagaacggtcaggtgggggcgatttttaacaccgttacccgcccggatatccgtgtgatgcaggatcaggtgatgcagcttagtcgcctgaagatcccgctgttctttgcctacgatgtgctgcacggtcagcgcaccgtgtttccgataagcctcggcctggcctcgtcgtttaaccttgatgcggtgaagaccgtgggccgcgtgtcagcttatgaagccgccgatgacggcttgaacatgacctgggcgccgatggtcgacgtctcccgcgacccgcgctggggacgcgcttccgaagggttcggggaagacacctatctgaccacgatgatgggccaggcgatggtggagtcgatgcagggcaagagcccggcggaccgctattcggtgatgaccagcgtcaagcatttcgccgcctacggcgcggtagagggcgggaaagagtacaacacggtcgacatgagcccgcagcgcctgttcaacgactatatgccgccgtacaaagccgggcttgatgccggcagcggcgcggtgatggtagccctgaactcgctgaacggcaccccggcgacctctgattcctggctgctgaaagacgtcctgcgcgaccagtggggctttaaaggcatcaccgtttccgaccacggcgccatcaaagagttgattaagcacggcgtggcctccgacccggaagacgcggtgcgcgtagcgctgaagtccggcatcaacatgagcatgagcgacgagtattacagcaagtacctgccggggctggtgaagtccggcaaggtgaccatggccgagctggatgatgccacccgacacgtgctcaacgtgaaatatgatatgggactgttcaacgatccctacagccacctgggaccgaaagattctgacccgcaggacaccaatgcggaaagtcgtctgcatcgtaaagaggcgcgcgaagtggctcgcgagagcctggtgctgctgaagaaccgtcttgatacgctgccgctgaaaaaatccggcactatcgcggtggttggcgcgctggcggacagcaagcgcgacatgatgggcagctggtccgcggccggggtggccgaccagtcggtgaccgtcctgaccggcatcaaagaagcgctgggcgataacggcaaagtgatttacgccaaaggggcgaacgttaccgatgacaaaggcattgtcgatttcctcaatttgtatgagaacgcggtgcaggttgacccacgctcgccgcaggaaatgatcgacgaagcggtcgcggcggcgaagcaatccgatgtggtggtcgccgtggtgggcgaggcgcagggcatggcgcatgaggcctccagccggaccgatatcaccctgccgcagagccagcgcaatctgattgccgctcttaaagccaccggcaaaccgctggtgctggtgctgatgaacgggcgtccgctggcgctggtgaaagaggatcagcaagccgatgcgctgctggagacctggtttgctggcaccgaaggcggccacgccatcgccgacgtgctgtttggcgactacaacccgtcgggcaagctgccgatgtctttcccgcgctcggtggggcagatcccaacctactacagccacctgaataccggccggccgtataatccggagaagccgaacaagtacacctcgcgttacttcgatgaagccaatggcccgctgtatccgtttggttacggcctgagctacaccacctttagcgtctccgatgtcaacatgtcgtcggccaccatgccgcgcgatggcagcgtgaccgccagcgtgcaggtgaccaacaccggcaatcgcgaaggggcgacggtgatccagctctacctgcaggacgtcaccgcctccatgagccggccggtgaaaatgctgcgcggctttaaaaaggtcaccctcaaaccgggcgaaacgcaaaccgttagcttcccaatcgacgtcgacgcgctgaagttctggaatcagcaaatgaaatacgttgctgagccgggcaaattcaatgtctttatcggcgtggactccgcccgcgtgaagcagagcgagtttgagctgctg

SEQ ID NO: 24089 - DNA, 771 bp, Klebsiella pneumoniae
atgcctgagctgttgaatcccgcgcctgtcgcgcacctgcgccatctgctgcgcgcccattccccccttgtgcactgcatgactaatgacgtggtgcagacctttaccgccaatgttctgctggccgtcggcgcctcgccggcgatggtgatcgatccccgcgaagcggcgcaatttgccgctatcgccgatgcgctgttaattaacgtcggtaccctgaccgaagatcgcgccgtggcgatgcgcgctgcggtggagcacgcccggcaggccggcaagccctggacgctggatccggtggcggtcggcgccctgaccgtgcgcacggccttttgtcacgagctgctggccctccagccggcggccattcgcggcaatgcctctgaaattctggcgctggccgggatgagcgccggcgggcgcggggtggataccaccgatacggctgccgcggcgctgccggcggcccaggcgctggctcgtcggctggccaccgtagtggcggtcactggcgaggtggactacgtcaccgacggcgagcgggtgctcagcgtggcggggggcaatccgctgatgacccgggtggtgggcaccggctgcgcgctgtcggcggtggtggcggcgagcgcggcgctgccgggagaccggctggaaaacgtggccgccgcctgcgggctgatgaagcaggccggggagatcgccgcccgtcagggaggcccaggcagctttattccggcgtttctcgacgcgctgtatcaggaggtgcaggga

SEQ ID NO: 24090 - DNA, 939 bp, Klebsiella pneumoniae
atgctcgactggaccgaccgacactgccgctacttcctgcggctgctgtcgcggcatacgctgctgtataccgaaatggtgaccaccggggcgattattcacggcaaaggggactatctggcctatagcgaagaagagcacccggttgctctgcagctcggcggcagcgatccccaggccctggcgcagtgcgcaaagctggccgaggcgcgcggctatgatgagatcaacctcaacgtcggctgcccctccgaccgcgtgcagaacgggatgtttggcgcttgcctgatgggcaatgcgccactggtggccgactgcatcaaggcgatgcgcgatgtggtatcgattccggtcacggtgaaaacccgtatcggcattgacgaccaggatagctatgagtttctgtgcgatttcattgagacagtctccggcaagggcgagtgtgagatgtttattattcacgcccgcaaagcctggctctccggcctgagtccaaaagagaaccgcgagatcccgccgctggattacccccgcgtctggcagctgaagcgcgatttcccccaccttacgatggcgatcaacggcggcatcaaatcgctggacgaagccagagtacagcttgagcatatggatggggtgatggtcgggcgtgaggcctatcagaacccgggcattctggcctcggtcgaccgcgaaattttcggcgtcgccggcgcggatgccgatccggtagcggtggtgcgagccatgtacccctatattgagcgcgagctcagcaagggcacctatctgggccatattacccgccatatgctggggctgtttcaggggatccccggcgctcgccagtggcgtcgctacctgagcgaaaatgcgcataaagccggcgccgatattgcggtgctggagcatgccctgaagctggtggccgataaacgt

SEQ ID NO: 24091 - DNA, 968 bp, Klebsiella pneumoniae
atgaaaacgttactcaagaatcgcgaactgagcgccttctttgccatcgtggcgctctttgttgtgctggtggcgctcaatccggcctatttcagcctgcagaccctggcgatgattttctccagctcgcaaatcctctgcctgctggcattgggcgcgacctggtgatgctgacccgcaatattgacgtgtcggtaggttcgaccgttgggctatgcgccatcgccgtcggcgtggcgctgaacaacggctatgggttggcgacggctatcgccttcgcgctggcgattggcgcgctggccggagcttttaacggcctgctggtcgtggggctgcgcatcccggcgatcgtcgcgacgctcggtacgctggggttgtatcgcggggtgatgttgctgtggaccggcgggaaatggatcgaaggcttgcccgacagcctgaaatcgctctcggagcccgcgtttatcggcgtgtcgccgctgggctggctggtgctggcgctgctgctggcgggcggctggctgctgtcgcgcaccgcctttggtcgtgatttttacgccgctggcgataacctcgccgccgcgcgccagctgggcgtggcggtcaaccgcacgcggatgctggcctttaccctcaacggtatgctggcggcctgcgccgggatcgtcttcgccgcgcagattggttttgtgcctaatcagaccggcagcggcctggagatgaaagccatcgccgcctgcgtgctgggcgggatctcgctgctcggcggtaccggcacgctgcttggcgcgtttctcggcgcctttttcctcacccaaatcgacaccgtactggtgctgttccgccttcccgcctggtggaacgactttatcgccggtctggtgctgctcggcgtgctggtgctcgatggccgtctgcgtcaggcgctggcccgccatcagcgggcgctgaagtacagccgtttccag

SEQ ID NO: 24092 - DNA, 1523 bp, Klebsiella pneumoniae
atggcaaaagagaaaaaacgtggcttcttttcctggctgggcttggacagaaagaacaggcacaggaaaccgagactgagcaaaaagtagaagaacagcaagcggttgccgaagagataccggcggttgaaacccctgctgagccgagcgcgccgaaagcagacccggaggcgtttgccgaagacgtcgtcgaagtgaccgagacggtggtcgaaagcgaaaaagcgcacctcgcggagcctgccagcgcgcaggaagaagagtgggtggaaacgcctgttctgaccgaagaaacgcctgttgttgaaccggagcccgcggtcagcgaaccgcctgaacagcctgcggtggttgagccgctggcggaagaggttatcgccgaaccggtggtggcggaagccgtagcagagcagcctgtggaaggcatcgttgtccagccgcaggagacagaagcgcccgaagaggacgcgccgttaagcgatgaagagctggaagcgcaggcgctggcggccgaagcggcagaagaggcggcggtagtggtgccggcgcccgaggacgaggcgccgcttgaagcgctggctcaggagcaggaaaaaccgacaaaagaaggtttcttcgcccgcctcaaacgtagcctgctgaaaacgaagcaaaatctcggttccggatttatcagcctgttccgcggtaagaagatcgacgatgatctgtttgaagagctggaagaacagctgctgatcgccgacgtcggggtggaaaccacccgcaagatcattaccaacctgacggaaggcgccagccgtaagcagctgcgcgatgcggaagcgctgtacggcctgctgaaagaagagatgggcgagattctcgccaaagtagacgagccgctgaacgttgaaggcaaaacgccatttgttattctgatggtcggtgtgaacggggtggggaaaaccactaccatcggcaagctggcgcgtcagtttgaacagcagggtaagtcggtgatgctggcggcgggggataccttccgtgcggcggcggtggaacagctgcaggtctggggccagcgtaataatatcccggtgatcgcccagcacaccggcgccgactccgcctcggtgattttcgacgccattcaggcggcgaaggcgcgccatgttgacgtactgattgccgataccgccgggcgtttgcaaaataaatcgcacctgatggaagagctgaagaagattgtccgggtaatgaaaaagctggacgtcgacgcgccgcacgaggtgatgttaaccattgacgccagcaccgggcagaatgctattagccaggccaaactgttccatgaggcggtaggtttgaccgggatcactttgaccaagctggacggcaccgccaaaggcggcgtgatcttctcggtggccgatcagttcggcattccgattcgctatattggcgtcggcgagcgtattgaggatctgcgtccgtttaatgcgggcgactttattgaggcactttttgcccgagaggattaa

SEQ ID NO: 24093 - DNA, 1431 bp, Klebsiella pneumoniae
atgaaagtaacgctgccggagtttgaacgtgcaggagtgttggtggtgggtgatgtgatgctggaccgctactggtacggccccaccagtcgtatttccccggaagccccggtgccggtggtgaaggtggaaaatatcgaagaacgtcctggcggcgcggcaaacgtagcgatgaacattgcctcgctgggggcaacctcgcgcctggtgggattgaccgggattgatgacgccgcccgcgcgctgagccaggcgctggccaacgtcaatgtgaagtgcgacttcgtctccgtcccgactcacccgactatcaccaagctgcgggtgctgtcgcgcaatcaacagctgatccgcctcgactttgaagagggcttctccggcgtcgatccgcagccgatgcacgagcgcattcagcaggcgctgggctctattggcgcgctggtcctttcggactatgccaaaggggcgctgaccagcgtccagaccatgatccgactcgcacgcgaagcgggcgtgccggtgctgatcgatccgaaaggcaccgatttcgaacgctatcgcggcgcgacgttgctcaccccgaacctctctgagtttgaagcggtggtgggcaagtgccaggatgaagcgcagatcgttgagcgcggcatgaagctcatcgccgaattcgaactgtcggcgctgctggtgacgcgctctgagcaggggatgacgctgctgcagccggggcgtccgccgctgcatatgccgacccaggcccaggaagtgtacgacgtgaccggcgccggcgacacggtgattggcgtgctggcggcgaccctggcgtccggcaacaccctggaagaggcctgctatttcgctaacgccgcggcgggcgtggtggtcggtaagctgggtacatccaccgtttcccctgtcgagctggaaaacgcggtccgcggccgggctgagaccggctttggcgtgatgagcgaagaggagctcaaacaggcggttgcggcggcgcgcaagcgcggcgagaaagtggtgatgaccaacggcgtcttcgacattctgcatgccggtcatgtctcctatctggcgaatgcgcgcaagctgggtgaccgtctgatcgtggcggtcaacagcgatgcctccaccaaacgtctgaaaggcgaaacccgcccggtgaacccgctggaacagcggatgatcgtgctgggggcgctggaagccgtcgactgggtggtctccttcgaagaagatactccgcagcgcctgatcgctggcatcctgccggatctgctggtcaagggcggcgactacaaaccggagcagatcgccggcagcgaagaggtctgggcgaacggtggcgaagtgctggtgctcaactttgaagatggctgctcaactaccaatattattaagaaaatacaaaaagatagcgacaaa

SEQ ID NO: 24094 - DNA, 522 bp, Klebsiella pneumoniae
atggccagcagaggcgtaaacaaggtgattctcgtcggtaatctggggcaggacccggaagtacgctacatgccaagtggcggcgctgtcgccaacttcacgctggcaacttccgaatcctggcgtgacaagcagaccggcgaaatgaaagagcagaccgagtggcaccgcgttgtgctgttcggcaaactggcggaagtcgctggtgagtatctgcgtaaaggctctcaggtgtacattgaaggccagctgcgtacccgcaagtggaccgatcaatccggtcaggacaaatacaccaccgaagtggtggtgaacgtgggcggcaccatgcagatgctgggcggccgtcagggcggcggcgcaccggcaggcggcggccagcagcagggcggttggggtcagccgcagcagccgcagggcggcaaccagttcagcggcggcgcgcagtcccgtccgcagcagcaggccccggcagcgccttccaacgaaccgccgatggacttcgacgacgacatcccgttc

SEQ ID NO: 24095 - DNA, 912 bp, Klebsiella pneumoniae
atggcctgcgtatttaataaacaacttttacacccgcgtaactggctgacctggttcgggctcggcatcctctggttaatcgtgcaactgccttatccgctgctgcattttatcggcaccagcgctggtcgcctttcccgtcgctttcttaaacgccgcgaacatatcgcccggcgtaatatcgaactctgcttcccggacatgtcgccagcggcgcgcgagacgctgatcgatcaaaactttatgtcgctgggaatggggcttatcgaaaccggcatggcctggttctggagcgacgagcgggtcaaaaaatggtttgatgtcgaggggttcgccaaccttaatcacgcgcttagcggtgggaaaggggtaatggtcgtcggcgtgcactttatgtcgctggagctgggcggccgcgcgatggggctgtgtcggccaatgatggccacctaccggccgcacaacagcccgctgatggagtgggtgcaaacccgcggtcgcctgcgttcgaacaaagcgatgatcgatcgcaacaacctgaccggtctggtgcatgccttaaaatccggtgaagcggtgtggttcgcgcccgatcaggattacggtcccaagggcagcgtctttgcaccttttttctccgtcccgcaggcggcgaccaccaacggcacctatgtcctgtcccgcttatcgggcgcgaaaatgttgagcatcagcatggtacgtaagctggatcgccggggctatagcctgcatatcagcgaggtgatgaatgactatccgggtgaggataagcagatcgccgccggctatatcaacaaggttattgagcgcgagatcctgcgcgctcccgagcagtatctgtgggtacaccgtcgttttaaaacccgcccgctgggcgaaccttccgtctat

SEQ ID NO: 24096 - DNA, 1129 bp, Klebsiella pneumoniae
atgacgactcacgccagagtgacacttttatccggtttaattatctcggccttattgctaaccggttgcgataattctgacaaccagcaaccccatgcgcaggcgccgcaggtgacggtccatgtcgtgaacagcgcgccgctatcagtcaccaccgaactgccgggccgaacctctgcttttcgcgtagcggaagtccgcccccaggtgagcggtatcatcctgaagcgtaactttgttgaaggaagtgatgtcgaagcaggccagtcgctctatcagatcgatccggcgacctaccaggcggcgtggaacagcgccaaaggcgatgaggccaaagccgaagccgcggccgctatcgcccatttgacggtgaaacgctacgttccactgctgggtactaaatatatcagccagcaggaatacgatcaggcagtggccaccgcccgccaggccgatgccgatgtcatcgccaccaaagctgccgtggaaacggcccgtatcaacctggcctacaccaaagtaacctcccccattagcgggcgcatcggtaaatcaagcgtcaccgaaggggcgctggtcaccaacggccagtcggatgccctggctaccgtccagcagctcgatcccatctatgttgacgtgacggagtccagtaatgacttcatgcgccttaagcaggaaagcctgcagcgcggcggtaataccaaaagcgttgagctggtcatggagaacggccaggcctatccgctcaaaggttcactgcagttttctgacgtcactgttgatgaaagtacgggctcaattactctgcgcgctatcttccctaacccgcagcatgtcctgctgccagggatgttcgtccgcgcccgcatagacgaaggcgtcgatccgcaggctatcctggtaccgcagcaacggggtgacccgcacgccgcgtggtgatgcctccgtgatgctggtgaatgacaaaaaccaggttgaaacccgggaagtggtcgcgactcaggccgttggcgataagtggcttatcaccagtgggctgaagccgggcgataaagtgattgtcagcggcttacagaaagtccgtccaggcgtcactgtcaaagcggaagcggagcgtgcggcgccg

SEQ ID NO: 24097 - DNA, 972 bp, Klebsiella pneumoniae
atgacagatttaatcactcgcccccgccgtctgcgtcaatccgctgcgctgcgcgccctgtttgaagagacaacactgagtttgaacgacctggtgttgccgatctttgttgaagaagaaattgatgattacaaagcgatagaggccatgcccggcgtgatgcgcattccggaaaaatatctggcgcgcgagatcgaacgcatcgccaacgccgggatccgctcggtgatgacctttggtatttctcatcacaccgatgccaccggcagcgatacctggaatgaaaatggtctggtggcgcgtatgtcgcggatttgtaagtccacggtgccggagatgatcgtcatgtccgatacctgcttctgcgaatatacctcccacggccactgcggcgtgctgtgcgaccacggggtggataacgacgcgaccctggaaaacctcggcaaacaggccgttgtcgccgccgccgcgggggcggatttcatcgctccttccgccgcgatggacggtcaggtgcaggcgattcgccgctcgctggacgccgccggcttcaccaatacggcgatcatgtcctactcgaccaagttcgcttcttccttctacggtccgttccgcgaagcggccggtaccgcgctgaagggcgatcggaaaacctatcagatgagcccgatgaatcgccgggaggccattcgcgagtcgctgctcgatgaagcccagggcgccgactgcctgatggtgaaaccggctggcgcctacctggatattctgcgcgatatccgcgaacgcagcgatctgccgctcggcgcctatcaggtcagcggggagtacgcgatgatcaaattcgctgcccaggcgggcgctatcgatgaagagaaagtggttctggaaagcctcggcgctatcaaacgcgcaggcgccgacctgatcttcagctatttcgccctcgatctggccgagaaaaagatcctccgt

SEQ ID NO: 24098 - DNA, 1386 bp, Klebsiella pneumoniae
atgtataaaaccacgctatcgggccaggtatggcgctttgatagtctgaaaacgctgatggcgaaagcgtcgccggcccgctccggcgacgccctcgcagggattatcgccacctcagccgaagagcggatggcggcgaaaatggccctcgccgaggtgccgctgaccgacattctcgacaacccgcttatcccttacgagcaggacgaagtgactcgcctgatcctcgacacccatgatgcgcagggctttgccgccctgcgtcacctgacggtcggcgattttcgcgactggctgctggatgatgctaccgataccgccacgctgcagcgggtcgcccgcgccatcaccccggagatggcggcggcggtcagtaagctgatgcgcaatcaggatctgatccttgccgccagcaaatgccaggtggtgacgcgctttcgcaacaccatcggcctgcccggccacctcagcgtacgcctgcagcccaaccatcccaccgacgacctgaaaggcatcgccgccagtatgctcgacgggctgctgtacggcgccggggacgcggtgatcggcatcaacccggccagcgacagcttaccggtgctggcgcagctgaacgtcatgctggacgatattattcagcgcttcgccatccctacccagtcctgcattctgacccatgtgaccaatacgctgcagctgattgagcgcggcgcgccggtggatctggtgttccagtcggtggccggtaccgaagcggccaacagcggcttcggcatcaatcttgccatgctgcaggaggcccgcgaggcggccctgagcctcaggcgcggtaccctcggcaacaatgtgatgtattttgagaccggccagggaagctgcctgtcggccaacgcccaccacggcgtcgatcagcaaacctgtgaggcgcgggcctacgccgtcgcccgccactttgaaccgctgctggtcaatacggtggtcggctttattggtccggagtatctctacgacggcaagcagattattcgcgccgggctggaggatcatttttgcggcaagctgatgggcctgccgatcggctgcgacgtctgctataccaaccacgcggaagcggatcaggatgatatggacaccctgctgaccttgctgtgcgccgccgggctcaccttcctgatcggcgtgcccggagcggacgatatcatgctcaattaccagagcacctcgttccatgacgcgctgtacgcccgtcgcctgctgggcttaaagcatgccccggagttcgccgactggctggcgaaaatgcaaattatcgatccgcatggcgcgctgcggctcaccgacgcccgccatccgctgctgtccgtcctgccgcaaggagcctccgta

SEQ ID NO: 24099 - DNA, 2322 bp, Klebsiella pneumoniae
atgcgcgtattgcctcgggtaaaacgccgctggcgctggctggcggcgtttatttttctgctgtggctggcggtgctggcggccgatcgcctgtggccgctgccgctgcatgacgtcacgcctgcccgtgtggtggtggcggaagacgggacgccgctgtggcggtttgccgacgcgcagggcgtctggcgttatccggtcacgctcgccgacgtgtcgccgcgctatctgcaggcgctcatccagtatgaagaccgctggttctggcgccatccgggggtcaatcccttcgcggtgctgcgcgccgcctggcaggatcttacttccgggcgagttatctcgggcggcagcacgcttaccatgcaggtggcacgcctgcttgatccccatccacgcaccttcggcggcaagctgcgccagctgtggcgagcgctgcagctggagtggcatctgtcaaaaagcgacattctaaccctctatttgaaccgcgcgccgtttggcggcaccctgcaggggatcggcgcggccagctggacctatctcggtaagccgcctgccaggcttagctacggcgaggcggcgctgctggcggtacttccccaggcgcccagtcgtttacgtccggaccgctggccgcagcgggcccaggcggcgcgtgataaagtgcttacgcgaatggtcagccagggcgtctggccggagcaggcggtaaaggaagcgatggaggagccagtatggctgtttccgcgccagatgccgcagctggcgccgcttttttcacgccgggcgctggcgaccagtcgtgatgaaaaggtggtgacgactctggatgccggactgcagcggcaactggaagatctggcgctgaactggaaatcgcgcctgccgccgcgcagttcgctggcgatggtcgtcgtcgaccacacggatatgaaagttcgcggctgggtaggctcggcggatatcaccgacgacagccgcttcggccatattgatatggtctcggcggtacgctcgccggggtcggtgctgaaaccctttatctacgcgatggcgatggatgaggggctgattcacccggcatcgctattacaggatgtgccacggcgttttagcgattatcgccccggtaatttcgacagcgggtttcatggcccggtgagcgccagcgaggctctggtgcgttcgttgaatctgccggcggtgcaggtgctcgaagcctatggaccaaaacgctttgcggctaatttacgcaacgccgggctgcccctgacactgcccgctggcgcagagccgaatctgtcgctaatcctcggcggcgccggggcgcggctggaagatattgtcgcggcgtacagcgccttcgctcgccatggcaaggcggcgcggctgcgcctgaagccgagcgatccattgaccgagcgcgcgctgatgtcgcccggggcggcatggatcgtccggcgtattttggccggcgaagcgcaaccggttcccgatgcctcgctgccgcaggcggtgccgctggcgtggaaaaccggcaccagctacggctatcgcgacgcgtgggcggtcggcctcaatgcgcgatatctgataggtatctggaccgggcgcccggacggtacgccggtggtgggccagtttggcttcgccagcgccgtaccgctgctcaaccaggtcaataatctgctgctggcccgcccggcgatgagccgcggcgggctgccgagcgatccgcgcccggcaacggtcagccaggggacaatctgctggcctggcgggcaggatctgccggcgggcgacagcaactgtcgtcgtcgcctggccagctggcttttggatgccagccagccgccgactctgctgctgccggggcaggagagcgtacgcgggatccgcttcccggtgtggcgcaatgaacacggcgaacgggtggcggcggattgtcccggcgctcgggaaagccaggtcgaagtctggccgctgccgctggatccctggctgccggccagcgaaaggcggcgcgcgcgcctgggaccggcatcggagtcatgcccgccgttacagactcaggataccgcgccgctggtgctgtccggcatccgtgatggggcggtgataaaacgtctcccgggtgaggcgcgggtgatgttgccgctacaaaccagcggtggggaggggcggcgctggtggtttattaatggcgacccgttagaggccgccggcgcaagaaccacgctaatgctggataaacccggcgagtggcagttggtggtgatggatgaagcgggtcagacggcggccgccagcttcaccctgcaa

SEQ ID NO: 24100 - DNA, 477 bp, Klebsiella pneumoniae
atgactctggtctatatcgctcttggcagcaaccttgcttctccactggagcaggtgcaggcggctatccgcgccctgggcgaaattccgcacagccgcgtggtcgccgtctcttcgttctaccgcacgccgccgctgggcccgcaggatcagccgaactatctcaacgccgccgttgcgctggaaaccgccctgccccccgagacgctgctcgatcatactcagcgcatcgaactgcagcaggggcgagtgcgcaaagccgaacgctgggggccgcgcacgctggacctcgatatcatgctgtttggcgatgctgtcattaacagcgagcgcctgaccgttccgcactacgatatgaaaaaccgcggctttatgctctggccgctgttcgagatcgccccggaccttcactttcctgacggcctggcgctgcgcgccgtgctggataatctcggcgcggaaaagcccgccagctgg

SEQ ID NO: 24101 - DNA, 541 bp, Klebsiella pneumoniae
ggaagcagcgctcagaataatatgataaaatccgccccccttgcggggcacatgaacccgaaggaagagtatgaacattattgaagctaacgttgctaccccggacgctcgcgtcgccatcaccattgcgcgtttcaacaactttatcaatgacagcctgctggaaggcgcgattgacgccctgaaacgcattggtcaggtaaaagatgaaaacatcaccgtcgtttgggttccaggcgcgtatgagctgccgctggcggctggcgcactggcgaaaaccggtaaatatgacgcggtgatcgcgctggggacggtgattcgcggcggtaccgcccactttgaatatgtggcaggcggtgccagcaatggcctggcgcatgtcgctcaggacagcgaaatcccggtagcctttggtgttctgaccactgaaagtattgaacaagccattgagcgcgctggcaccaaagccggtaacaaaggtgcagaagctgcgctgaccgcgctggaaatgattaacgtattgaaagccatcaaggcctga

SEQ ID NO: 24102 - DNA, 1314 bp, Klebsiella pneumoniae
atgccattagtcatcgttgctatcggggttgccctgttgttgctgttaatgatccgtttcaaaatgaacggcttcattgcgctggttctggtggcgctcgccgtcggattaatgcagggtatgccactggataaagtgatcgtctccatcaaaaacggcgttggcggcacccttggcagcctcgcgctgatcatgggcttcggcgctatgctcggtaagctgctggcagactgcggcggcgcccagcgtatcgccaccacgcttatcaataagttcggtaagaagcatattcagtgggcggtggtcctgaccggcttcaccgttggcttcgccctgttctatgaagtgggcttcgtgctgatgctgccgctggtgttcaccatcgccgcctcggcccgtattccgttgctgtacgtcggcgtaccgatggcagccgcgctctccgtcacccacggcttcctgccgccgcatccgggtccgaccgcgatcgccaccatcttccatgccgatatgggcaaaacgctgctctacggcaccattctggctatcccgacggttatcctggcgggaccggtgtttgcgcgcttcctgaaagggatagataagccgatcccggaaggcctgcataacccgaaagtgttcactgaagaagagatgccaggctttggcgtcagcgtctggacctcgctggttccggtgatcctgatggcgatgcgcgccgtggctgagatgatcctgccgaaaggccacgccttcctgccaattgccgagttcttcggcgacccggtgatggccaccctaattgcggtactgattgccctgttcaccttcggtttgaaccgcggccgctccatggagcagatcaacgataccctgacctcttcgatcaaaatcatcgccatgatgctgttgattatcggcggcggcggcgccttcaagcaggtgctggtggatagcggcatggataaatacatcgcctctatcatgcacgaatcgaacatgtctccgctgtttatggcgtggtctatcgccgcggtgctgcgtatcgcgctgggttcggcgaccgtagccgccatcaccgcgggcgggattgccgcgccgctgatcgccaccaccggcgtcagcccggagctgatggttatcgccgttggctccggcagcgttatcttctcccacgtcaacgatccgggcttctggctgttcaaagagtactttaacctgaccatcggcgagaccatcaagtcctggtcggtgctggaaaccattatctcagtctgcggcctggtgggctgtctgctgctggggatggtggtg

SEQ ID NO: 24103 - DNA, 1287 bp, Klebsiella pneumoniae
atggaaaccactcaaaccagcaccatcgtttcgggcgaaacccgcagcggatggcgtaaaaccgacaccatgtggatgctgggcctgtacggtacagcgattggcgcgggcgtcttgttcctgccgatcaacgccggcgttggcggcatgatccccctgatcatcatggcgattctggccttcccgatgactttcttcgcccaccgcggcatgacccgcttcgtgctctccgggaaaaacccgggcgaagacatcaccgaagtagtggaagaacacttcggcgtaggcgcaggtaagctgattaccctgctttatttcttcgctatctacccgatcctgctggtttacagcgtggcgatcactaacaccgtcgaaaccttcatggcgcatcagctgcacatgacgccgccgccgcgcgccattctgtcgctgatcctgattgtcggcatgatgaccatcgtgcgtttcggcgagcagatgattgtgaaagcgatgagcgtgctggtgttcccattcgttatcgcgctgatggtgctggctctgtatctgatcccgcagtggaacggcgcggcgctggagacgctctccctgagcggcgcttccgttaccggcaacggcctgctgatgaccctgtggctggcgatcccggtgatggtcttctccttcaaccactcgccgatcatctcttccttcgcggtagccaaacgtgaagagtacggcgaaggcgctgagaagaaatgctccagtatcctcgctcgcgcccacatcatgatggtgctgaccgtgatgttcttcgtcttcagctgcgttctgagcctctctccggcagacctggcggcggcgaaagagcagaacatctcgattctgtcttacctggcgaaccactttaacgcgccaatcattgcctggatggcgccgatcatcgcgatgatcgccatcaccaaatccttccttggccactatctgggcgctcgcgaaggctttaacggcatggtgattaaatccctgcgcagtaaaggcaaatcgattgaaatcaacaaactgaacaagctgaccgcgctgttcatgctgatcaccacctggattgtggcaaccctgaacccgagcatcctcggtatgatcgagacccttggcggcccgattatcgcgatgatcctgttcctgatgccgatgtatgcgattcagaaagtcccggcgatgcgtaaatacagcggccatatcagcaacgtcttcgtggtgattatgggcctgattgccatctccgcgatcttctactctctgttcagc

SEQ ID NO: 24104 - DNA, 1203 bp, Klebsiella pneumoniae
atgcgcctccttcacacctccgactggcacctgggccagaatttttacagcaaaagccgcgcggccgaacacgacgcttttcttacctggctactggaccgcgcgcaggagcatgaagtcgacgccattatcgtggctggcgatatttttgataccggctcgccgccgagctacgcccgcgaactgtataaccgtttcgtcgtccagttgcagcagaccggctgtcgcctggtggtgctggcgggcaaccacgactcggtggcgatgctcaatgaatcccgcgatatcctcgcctttttacacaccaccgtggtggcgaacgccggctacgcgccgattgagctgccgctgcgcgacggcacgccgggcgccatcttctgtccggtgccgtttttacgcccgcgcgagctggtgaccagccaggccggtcactccggtcgggaaaaacagcagcagctgctgcacgccatcagcgactattatcaggagcagtatcagcaggcctgcgcgctgcgcggcgatcggccgctgcccatcattgccagcggccatctgaccaccgtcggcgccagcaaaagcgatgccgtccgcgacatttacatcggcacactggatgcctttccggcgcaacacttcccccctgccgactacattgcgctgggccatattcaccgggcgcagatggtcggcggctgcgagcatatccgctacagcggctcgccgctgccgctgagcttcgatgaaaccggcaaagcgaaatcggtgcatctggtgagctttagcgaggggcgacttagcgccgtggaaaccctggaggtgcccgtgacccagcctctggcggtaatcaaaggcgatctggccgccatcaccgcccagctggagcagtggcgcggcgtcgagcaggacccgccggtgtggctggatatcgaaatcaccaccgaggactatctgcacgatattcagcggcatattcaggcgctgacggaggatctgccggtggaagtgctgctggtgcgccgcagccgcgagcagcgcgagaaaatactgctcaacgcccagcgggagacgctcagtgaactgaaggtggaggaggtattcgagcgccggctggcgctgaccgaaattgacgagatgaagcgcgcccggctgcatgagctgttcgcccatacggtgcatacgctcaccgcggaggacgaaaacgca

SEQ ID NO: 24105 - DNA, 1677 bp, Klebsiella pneumoniae
atgacaaataaaaaaacgaccgcggcaccgcttccgctctggcagtactggcgcggccttggcggctggaacttctactttctggtcaagtttgccctgctgtgggccgggtatctcaatttccatccgatgctgaacctggtatttctcgcctttctgctggtgccgatcccgcgcgaaaagctacaccgtatccgccactggatcgctattccgctgggattcgcgctgttctggcacgatacctggctgcccgggccagagtcgatttttagccaggggtcgcaaatcgccggcttcagcgccagctatatctgggatctgattgtccgctttatcaactggagcatggttggcgccttctttgttttactggtgctatggttgtttatcagccagtggctgcgcgtcaccgtgtttgtctcggcaatggtcgtctggctggcggtcagcccgctgctgccggcctttaccctatggccctccggtcagcccaccacggccgccgccacgaccgcacaggccaataccggggccaacgccgccgctggcgccgcgtccagccccgccaacagcgatattccgccgcagaccgagccgccgacctcagccaacctgaccaactggctgaacgctttctatgccgccgagcagaagcgcaagacgccgttcccggaccagctgccggcggatgcgcagccgtttgacctgctggtgatcaacatctgctccctctcctggtcggatattgaagccgccggtctgatggatcatccgctatggaagcactttgatattgtcttcaaaaactttaactccgcgacctcctacagcggcccggcggcggtgcgcctgctgcgcgccagctgcggccagctgtcgcatactaatctgtatcagccgtccggcgccgactgctacctgtttgaaaacctggcaaagctcggcttcaaccagcagctgatgctcggccataacggtctgttcggcgacttcctgaaagagctgcgttcgctgggcggtatgcagagtccgctgatggaccagaccggtctgccggtcagcctgcaggcgtttgacggctccccggtgtatgaggatctggcggtcctcaaccgctggctgaagaccgaagaggccagcagcaatccgcggaacgccaccttctataacaccctgccgctgcatgacggcaaccacttcccgggacaaagcaaaaccgcagactacaaagtgcgggcgcagaagctgtttgatgacctggataacttcttcaccgagctggagaaatcggggcggaaagtgatggtggtggtggtgccggaacacggcggcgcgctgaagggcgataagatgcaggtatctggcctgcgcgatattccaagcccgtcgatcactaacgtcccaacggcggtgaaattcttcggcatgaaggcgccgcatgaaggggcgccgattatcatcgatcagcccagcagttatctggcggtgtcggagctggtggtgcgcgccctcgacggcaaaatgttcagcgaggacagcgtcaactggcagcagtatgtcgccaacctgccgcagagcgcggcggtgtccgagaacgccaacgccatcgtcatccagtatcagggcaagccttatgtccagctgaatggcggtagctgggtgccttatccgcaa

SEQ ID NO: 24106 - DNA, 1959 bp, Klebsiella pneumoniae
atgcgcctgcacaatcatcgtcttgaacttcttagtcctgcccgcgacgccggtatcgctcgcgaagcgatccttcacggcgccgatgccgtttacatcggtggacctggctttggcgcccgccacaacgccagcaacagtctgagcgatatcgccgggctggtgcctttcgctcatcgctttggcgcaaaggtatttgtgacgctgaacaccattctgcatgacgatgaactggagccggcgcagcggctgattaccgatctctacgacgcaggcgtcgatgcgctgatcgtccaggatatggggatcatggagctggatctgccgccgattgagctgcacgccagcacccagtgcgatattcgcagtgtggaaaaagcgaagtttctctccgacgccggcttcagtcagatcgtgctggcgcgcgaactgaacctcagtcaaatcaaagccatttacgaccacactgacgccactatcgaattctttatccatggcgcgctgtgcgtggcctattccgggcagtgttacatttcgcacgcccagaccggacgcagcgccaaccgcggcgactgctcgcaggcttgccgcttgccgtataccctgaaggacgatcaggggcgggtggtggcctatgagaaacatctcctgtcgatgaaggataacgatcagaccgccaacctggcggcgctgatcgacgctggcgtacgctccttcaaaattgaaggccgttacaaagacatgagttatgtgaaaaacatcactgcgcactaccgtcaaatgctggatgccattatcgaagatcgcggcgacctggcgcgcgcctcggctggacgcaccgagcatttctttatcccgtccacggataaaaccttccaccggggcagcactgactactttgttaatgcccgcaaaggcgatatcggcgcctttgattcgccgaaatttatcggcctgccggtgggtgaagttctgaaggtaggcaaagaccacctcgacgttgaagtcagtgaaccgttaaccaacggcgatggtctcaacgtgatgattaagcgcgaggtggtgggcttccgtgctaataccgtggaaaaaaccggcgaaaaccgttatcgggtatggccgaacgagatgccagcggatctgcataaagtgcgcccccatcagccgctcaaccgcaacctcgatcataactggcaacaggcgctgctaaagacctccagcgaacgccgcatcgcggtagacgtgacgttgagcggctggcaggagcagctggttctcaccatgacctgtgaagatggcgtcagcgtgacccacacccttgacggggagttcgccgaagctaaccaggcggagaaagcgttggccaacctgcgtgacggtgtcacaaaactggggcaaaccatctactatgcgcgcgaggtgcaggttaatctgccgccgctgtttgtgcccaacagcctgctcaaccagctgcgtcgggaaactgcggagatgctggatgaagcgcgcctcaacgcctggcagcgtggcacccgcaagccggtctccgtaccgccgccggtctacccggagacccatctctccttcctcgccaacgtctataaccacaaggcgcgggcgttctaccagcgctatggcgtacagctgatcgacgccgcctatgaagcgcacgaagagaagggcgatgtgccggtgatgatcactaagcattgtctgcggttcgccttcaacctctgcccgaagcaggcgaaaggctccatcaagagctggaaagcgacgccgatgcagctgatccatggcgatgaggtcctgaccctgaagtttgactgccgtccgtgcgaaatgcacgtggtcggcaagatcaaaaaccatatcctcaaaatgccgcacccgggcagcattgtggcctccgtcagcccggacgatctgatgaagacgctgccgaagcgcaaaggggcc

SEQ ID NO: 24107 - DNA, 798 bp, Klebsiella pneumoniae
gtggctaagtcgctatccttcgcgcttgccgcgctgctgttactcgccccggcgtggctgctggccgcgccgcgggtgatcaccctctcccccgccaataccgaactggcctttgccgccgggatcacgccggtcggcgtcagcagctattccgattatccttcgcaggccaaaacgatcgaacaggttgccagctggcagggaatgaacctggaacgcatcgtggcgctcaagccagacgtggtgctggcctggcgcgggggcaatgccgaacgccaggttaaccagctgcagtctctgggtattcacgtcctgtgggtacagacctcgaccatagaagagatcatcgctaccctgcgtgagctggcgcagtggagcccgcagccggaaaaagcacagcaggcggcgcaggcgatgcagcaggaatacgatgcgttgaaagcgcgctatgccaacgcgccgaagaaacgcgtcttcctgcagttcggctccgcaccgctgttcaccagcggccccggttcgattcaggatcaggtgctaaggctttgcggcggcgagaatatcttcgccaccagccgcgttccctggccgcaggtgagccgcgaacaggtgctggcccgccagccgcaggcgatcgtggtgaccggggatgccagccgcattgccgaagcgcagcgcttttggcaacatcagctcaccatttcgttgattgcgttacacagcgactggtttgaacgcgccggcccacgtattatcctcgccgccaaacaactttgtgcggcgcttgaccaggtaaaa

SEQ ID NO: 24108 - DNA, 774 bp, Klebsiella pneumoniae
atgtcagatacaaaaaatgaattagaaaccctgctggaaaaagcggcgactgagcccgcccatcgtccggcatttttcagcgcgctgctggaggccaccgtctgggtgccgggcagggcagccgatggcgagcagattgtcgaagatagcgcgctggatctgcagcattgggaaaaagacgacggtacctcggtgatcccattctttacctcgctggaggcgctgcagcaggcggtggcggatgaacaggccttcgtgatgatgccggcccgcacgctgatggcgatgacgctgggcgaatcgttattcctcaacccgaagctgccgagcggcaaagagttcaccccacgggaaatcagccatctgttaggcgaagaaggcagcccactgagcacccagacggtactggaaggcggcgaagcgctgctgctgtctgaagtcgccgaaccgccggcgcagatggtcgattcgctgaccacgttgttcaaaacgctgaagaccgtcaagcgggcgtttctgtgctcgattaaagagcgcgccgacgcgccggcaaacttattgatcgggattgaagcggaaggagatattgaagccattatccagaccaccggcagcgtggccaccgataccttgccaggcgacgaaccgatcgatatttgccaggtggtggaaggcgagaagggcatcagccactttatgattgcccatatcacgccgttctatgaaaagcgctggggcagcttcctgcgcgattttaagcagaaccgcatcatc

SEQ ID NO: 24109 - DNA, 2458 bp, Klebsiella pneumoniae
ctggatggcctctcctgcggccactgcgtcaaacgcgtgaaagagagtctggagcagcgtcctgacgttgagcaagcggaagtcaccctcactgaagcccatgtgacgggcagcgccagcgcgcaagcgctgattgataccgttaaacaagccggatacggcgcggagctcagccacccaaaggctaaaccgctggcagaatcatcaatcccgtcggaagcactgacagcggccactcctgagcttccggcagcccatgacgaagatgacagtcaacagctgctgatcaacggcatgagctgcgccagctgcgtctcccgggtacaaaacgcgcttgccgcggtgccgggcgtctcacaggcgcgggttaacctggcggaacgcacggcgctagtgatgggcagtgcgtccgccgcagaattagtgcaggcggtggagaaagccggctatggcgcggaggcgatcgaagacgatctgcaacgccgcgaacgccaacaggaaaccgccctcgcgacgatgaaacgttttcgctggcaggcaattgtcgccctgctggtcggcgtgccggtgatggtctggggcatgatcggcgataacatgatggtcagcgacgacaaccgttcgctgtggctggttatcggccttgtcaccctcgccgtcatggtctttgccggcggccacttctaccgcagcgcgtggaaaagcctgaaaaacggcaccgccaccatggatacgctggtggcgctcggcaccggcgtcgcctggctgtactcgatgagcgtcaacctatggccgcagtggttcccgatggaagcccgccatctctattacgaagccagcgcgatgattatcggcctgattaacctcggccatatgctggaggcccgcgcgcgtcagcgctcctcgaaagcgctggaaaaactgctcgacctgacgccgccttcggcgcgggtcgtcacgcccgagggcgagaaagatctgccgctcgcggaagttcaggccggcatgaccctgcgcctgactaccggcgaccgcgtcccggtcgacggcatgataagccagggcgaagcctggtttgatgaagcgatgctcaccggcgaaccggtgccgcagcaaaaaggcgatggcgacgccattcacgccgggaccgtggtgcaggatggcagcgtgctgtttaccgccagcgccgtcggcagccagaccacgctggcaagaattatccgcatggtgcgccaggcgcagagcagcaaaccggagatcggccagctggcggataaaatctccgccgtatttgttccggcggtggtcgtcattgcgctgattagcgctgcgatctggtacttcttcggcccggcgccgcagatcgtctataccctggtcattgccaccacggtactgattatcgcctgtccgtgcgccttaggcctggcgacgccgatgtcgattatctccggcgttggccgggcggcggagtatggcgtgctggtgcgcgatgccgatgcgctgcagcgcgccagtgaactcgacaccctggttttcgataaaaccggcaccctgaccgaaggcaagccgcaggtggtggcagtgaaaactttcgctggcgttgatgagcataccgcgttgcgtcttgccgccgcgctggagcagggctcaagccatccgctggcgcgagcgatccttgataaagctgccgacggcccattgccggaagtcagcggcttccgtaccctgcgcgggccttggcgtcagcggcgaggcggaaggtcatcgtctgctgctcggtaaccaggcgctgctcaacgagcagcatatcaataccgccgaggtggaaagcgagatgacagcccaggcctcacgcggcgccacgccggtgctgctggcggtggatggtcgggccgccgcgctgttcgccatccgcgacccgctgcgcgaagacagcgtcgacgccctggcgcgtttgcatcggcagggctaccggctggtgatgcttaccggtgataaccccaccaccgcgaaggctatcgccaaagaagccggcattgatgaagtgatcgccggcgtgctgccggacggtaaagccgatgccattaagcgtctgcagagccaggggcacaaagtggcgatggttggcgatgggattaacgacgccccggcgctggcccaggcggatgtcgggatcgccatgggcggcggcagcgatgtcgctattgaaaccgcggcgatcaccctgatgcgccatagtcttcacggcgtggccgatgcgctggcgatttcgaaagcaacgttacgcaatatgaagcagaacctgctgggcgcgtttgtctacaactcgctgggtatcccgattgccgccgggatcctctggccgctgaccggcaccctgctcaacccggtggtcgccggcgcggcgatggcgctgtcgtcgatcaccgtagtgagtaacgccaaccgcctgctg

SEQ ID NO: 24110 - DNA, 273 bp, Klebsiella pneumoniae; identical to SEQ ID NO: 19918

SEQ ID NO: 24111 - DNA, 1308 bp, Klebsiella pneumoniae
atgacggtgatcccgcgtgagcagcatgctatttcccgcaaagatatcagtgaaaacgccctcaaggtcatgtaccgcctcaacaaggcgggctacgaatcctggctggtcggcggcggcgtccgcgacctgctgcttggcaaaaagccaaaagattttgacgttaccaccaacgccacgccggatcaggtacgcaagctgttccgcaactgccgtctggttgggcgacgtttccgcctggcgcatgtgatgttcgggccggaaatcattgaggtcgccaccttccgtggccatcacgaagggcataccaccgatcgcgtcacctcccagcggggccagaacggcatgctgctgcgcgataacatcttcggctcgatcgaggaggatgcccagcgtcgcgacttcactatcaacagcctctattacagcgtggcggactttaccgttcgcgactacgtcggcggcatgaaggatctgcaggacggcgtgatccgtctgatcggcaacccggaaacccgctatcgcgaggatccagtgcgcatgctgcgcgcggtgcgctttgccgccaagctcaatatgaccatcagcccggaaacggctgaaccgctgccgcgcctggccgccctgctccacgatgtgccgccggcgcgtctgttcgaagaagtgcttaagctgctgcaggccgggtatggctaccagacctacatgctgctgcgggaatacagcctgttccagccgctgttcccgaccatcacccgctactttaccgagcgcggcgacagcccgatggagcggatcatcagccaggtgctgaagaataccgatacccgcattcataacgctatgcgcgtcaatccggccttcctcttcgcggtgatgttctggtatccgctgctggagacggcgcaaaaaatcgctcaggagagcggcctggcgtactacgacgccttcgccctggcgatgaacgatgtgctggacgaagcctgccgtacgctggcgatccctaagcgcatcaccacccttattcgtgatatctggcagctgcagctgcgcatgtcccgtcgtcagggcaaacgcgcctggaagctgatggagcatccgaaattccgcgccgcctatgacctgctggagctacgcgccggcgccgagaacaaccacgaactgcagcgcctgaccaaatggtggggcgaattccaggtcgccgcgccgccggcgcaaaaagatatgctcaacgacctcggggacgatcctgcgccgcgccgtcgtcaccgtcgtccgcgcaagcgcgcgccgcgccagggtagcgca

SEQ ID NO: 24112 - DNA, 330 bp, Klebsiella pneumoniae
atgctgcccctgcgcctgcgcagaccgtcgtttcccattaaagaagaaggccccgccggtatccggcgaggcctggtattaatgcgtttcttcctgtggagtaaacttcagctcaatcaacgcgatcgctttttgcaccgcgcgaagggtcaccggatcggcagaggccggatggctggcgaagtcgatagctttcagctgagtggtcattttttcacgcacttccaccggcgcaatgacgtcaatgacatcgaggatctgtttgataaccagctggcaggcaaccacatcggaaaccagctcgtcgtgttcggtaagatgttgagacat

SEQ ID NO: 24113 - DNA, 501 bp, Klebsiella pneumoniae; identical to SEQ ID NO: 19919

SEQ ID NO: 24114 - DNA, 945 bp, Klebsiella pneumoniae
atgattgaatttcaaggggtcagcaaagtgtttgccggccacccggcggtgaaggacctgaccctggagctgcgcgaaggcgctttctcggtgctggtggggacttccggctcgggcaagtcgacgacgctgaagatgatcaaccgtctgctggagccggaccggggcaccattcgctttgccggcgaggacattcgccagcagccggtcctgaccctgcggcggcggatgggctatgccatccagtccatcggcctgtttccccactggacggtggcgcagaatatcgccaccgtgccgcagttgcaaagatggccgcgggcaaggatcgccgaccggatcgacgagctgatggcgctgctggggctggaggcgacgctgcgcgaccgttacccgcatcagctctccggcggccagcagcagcgggtgggggtggcgcgggcgctggcggcagatccggaggtgctgttgatggatgagcccttcggcgccctcgacccggtgacccgcgaggcgctgcagcaggagatgctgcgcatccaccgtctgctgggccggacgattgtgctggtgacccatgatattgacgaagcgctgcgtctggcggaccacctggtgctgatggacgggggcgaggtggtccagcagggggcgccgctggagatgctcctgcgaccgaaaaatagctttgtacagaccttttttggccgcagcgagctgggtgtgcgcctgctgtcgctgcgcgaggtgggggactatttgcgtcccgacgaacggctggcgggcgaggggctgaccatcaccatgaccctgcgggaagcgctgtcgcagtttgtcgcccggcgctgcgagacgctgccggtggtcgatgccgaaggcaggccctgcggtacgctgcattttgccgatctgctgcgtcaggagatgagccatgaaggcgcttcg

SEQ ID NO: 24115 - DNA, 1431 bp, Klebsiella pneumoniae
atggcaaaaataacgaaagagatgatagcgcggatcctcgcccacgtgggcggcgccgcaaacgtcgcgcaggcgggcaactgcatgacgcgcctgcgcttgaccctgcgcgatgaaagtctggccgacagcgccgccatccgccagattgacggcgtgatgggggtgatcgtcagcgacgagcagttccaggtggtgctcggccccggcaaggcgcaaaccgccgccgaaatgatgaacggcctgctggaggcggcgcccgccgccgcgccgacgctggccgacgtcgcggcggagaaaaagcaggcgctgaagggcaggcagaccagcgcggtgcagaagtttctcgccaaattcgccaccatctttacgccgctgatccccggctttatcgccgtcgggctgctgctgggcttcgccaccctggcggaacaggttttcgtactggagaacgcccatccgaacgccagcctggtggcgttgattggctatatgaaggtcttcagcaaagggatgttcacctttctgagtatcctgattggctataacgcgcagaaggcgttcggcggctccggcgtgaacggcgcgattatcgcctcgctgttcgtgctgggctacaacccggaggcaaccagcggcttctacgccggcatttccaccttcttcggccatggcatcgatccgcgcggcaatatcatcggcgtactgatcgccgctatccttggcgcgtgggttgaacgccaggtgcggcgggtgatgccggccaacctcgatatgatcctcacttcggcggtgacgctgctgatcatgggcgcggtgacctttacggtgatcatgccgattggcggctggttgtttaccggcatgtcgtggctgttcctgcatcttaacggcaacccgtttggctcggcggtgctggccggcctgttcctgctggcggtgatgttcggcgtccatcaggggtttgtcccggtctattttgcgctggtggacgcccagggctttaactcgctgttcccgatcctggcgatggccggggccgggcaggtgggggcggcgctggcgctgttctggcgggcgaagcgcgattcgctgctgcgaacccagattaaaggggcgattattccgggcttcctcgggattggcgagccgctgatctacggcgtcaccctgccgcggatgaagccgtttgtcaccgcctgcctcggcggcgcctgcggcgggttcttcgtcggactgatcgcctggctggggctgccggtcggcctgaacacggtgttcggcccgtccggtctggtggcgctgccgctgatgacctccggcagcggaatttacgccgggatggcggtctacgccggcgggctggcggtctcctacctgtgcggctttgtcctcacctggctgttcggcagtaaaaatgtcgatttaagc

SEQ ID NO: 24116 - DNA, 120 bp, Klebsiella pneumoniae
gtggcccagtgcttcagcccgtgcttcgcggtgggtaccccgctgcacagctggcagctggtgagccagggcctttccagcacattggagcttcagctgctcgagttctatagtgtcacc

SEQ ID NO: 24117 - DNA, 1296 bp, Klebsiella pneumoniae
atggctcaagaaatcgaactcaagtttatcgtcgctcaggatggggtagagacgctgcgcgagcagctcaatgcgctcgaggcgaaacatacgcccgcgggccagttgctgaacatttattacgaaaccgccgataactggctgcgtcgtcacgatatgggcctgcgcatccgcggcgatcaggggcgttatgagatgacgctgaaaatcgccggtcgggtggtcggcggcctgcaccagcgcccggaatataatattccactggataaaccggagctggcgcttgagcgcctgccggcggaggtctggccgcaaggggaacttccggccgcgctggcggagcatgtccagccgctgttcagcaccgattttgcccgtgaacgctgggtgatccaggaaggaaagagtgagattgagattgccctcgatcgcggcgaagtaaaggcgggcgaacatcaggaaccgatctgcgaactggagctggagctgctcgccggggagaccaccgatctgctgcgcctcgcgcatcgtttgctggagagcggcgtcctgcgtcaggggagcctgagcaaagccgcgcgcgggtatcatctggcgcaaggtaacaatgagcgtccggtgacccggctggcggtgctgccggtggcagcgaaggccagcgtggagcaggggctggaggcggcgctggagagcgccctggcgcattggctgaatcacgacgagatctggctgcgcggcaacgcaaaagccaaagcggaaattctgctggcgatagcccgcgtgcgccatgccctcgtgctgtttggcggcatcgtgccgcgtaaggcgaccacccacctccgcgcgttgctgaacgacgccgacgccgttctgctggctgcggacaccgccgacgaagcgttattccgcaccgaggtcgttggcgccaaactggccctgaccgaatggctggtccagcgcgggtggcgtccgttcctcaacgaggcgggagagaaaaaaatagccggatcgttcaaacggtttgccgatattcacctctcgcgggtggcggccgagctgcgcagcgccgtgcagcatctggcggtagaagatgccgctgaccagttgccgaagctgtcccgcgacatcgacagcgtccagctgctggcgggcgcctatggcgacgccgtcgcgccctggctggagaactggcaggaacttcagcgtgcgatagagcatgacgaccgcagcgtgtttgaatatttccgtcgccaggcgctggctgccgagccgttctggctgcatagtggaaaacga

SEQ ID NO: 24118 - DNA, 747 bp, Klebsiella pneumoniae
atgaaagcaattaaaaacaaaggacaggataagaccatgaatgaaacaacccgtcgttttgcacgtttagttgatctgagcgcagttcaggccaccagtaccgaagcggatgttcgcgcctgcgccgagctggctgccagatacaacattatttccgtccacgtactgccttgctggacgcgctttctcagtacgttgctgccgcagcagggtacgggagaggtgatgattggcggtccggtcggctttcccggcggtgggcataccaccgataccaaggttcaggaagtgcggcagctgattgccgacggcgctcgggaagtggatatggtcgtgaatatcggcaaagtgctctccggcgattatgactatgtgcgcgaagatttgcgccgcgtggtggaagccgccgccccggtaccggccaaagtgatccttgaaacgcactatcttaatgaggagcagattcgtcgcgtgtgcgaaattgccgtagaggtggggatgaagtgggtcaaaacctctaccggctgggcgcccaccggcgccacggtggaaaaagtcagcatcatcgccgaccagcttaaaggccgaatcgatatcaaaggcgccgggggcattcgcgatctggccacggtgcgtgcgctgtaccagcttggcgtgcgccgctttggcatgagccatggcgcggtaaccaaggtgctggctgaactggagcagcacccggaacgttttcccgagctgaacgccgat

SEQ ID NO: 24119 - DNA, 1254 bp, Klebsiella pneumoniae
atgacattttcccttttcggcgacaaattcacccgtcattcaggcatcacccgcttgatggaagaccttaatgacggtctgcgcacgccgggcgctattatgctgggcggcggcaaccccgctcagatcccggaaatgaatgactacttccagcagctgctggccgacatgctggataatggcaaagcccttgatgcgctttgtaattatgatggtccacagggcaaaagcgagctgctggctctgctggcgaatatgctgcgcgacgagctgggctgggagatcgaaccacagaatattgcgctaacaaacggcagtcagagcgcatttttctacttatttaatctgtttgcaggccgtcgggcagatggcaccacccgtaaggtactgttcccactgacgccggaatatatcggctacgccgatgccggtctggaagaggatctgttcgttgccacccggccgaacatcgaactgctgccggaaggccagtttaagtaccatgttgattttgagcatctgcaggtgacggaagagaccgggatgatctgcgtctcgcgccccaccaacccgaccggcaacgtcatcactgatgaagagctgatcaaactggatgcgctggcgaatcagcacggggtcccgctggtgattgataacgcctacggcgtaccgttcccgggcattatctttagcgacgcccgaccgctgtggaatccgaacatcgtgctgtgtatgagcctgtccaagctgggcctgccgggcagccgctgcgggattatcatcgccaacgaaaaaatcatcaccgccatcagcaacatgaacggcattatcagcctcgcccctggcggcatcgggccggcaatgatgtgcgaaatgattaaacgacaggatctgctgcgcctgtcagagacggtgatcaagcccttctattaccagcgggtgcaggaaaccatcgccattattcgccgctatctgccggaggagcgctgccttattcacaaaccggagggggcaatcttcctctggctgtggtttaaggatctgccgatctccaccgagctgctgtatcagcggctgaaaaagcgcggcgtgctgatggtgccgggggattacttcttccctggtctggataaaccgtggccgcacacccaccagtgtatgcgcatgaactatgtaccggacccgcaaaaaatcgaagccggagtgaaaatcctcgccgaagaggttgaatttgcctggcgcgaacaggaagca

SEQ ID NO: 24120 - DNA, 1077 bp, Klebsiella pneumoniae
atgcaagcggcaactgtagttatcaaccgccgcgctctgcgacacaacctgcaacgtctgcgtgaactggcgcccgccagcaaactggttgcggtagtgaaagcgaacgcctacggacacggtcttctcgagaccgcgcgaacgctgaccgacgccgacgcctttggcgtcgcccgcctggaagaggcgctgcgcctgcgagcggggggcatcgcccagccgatcctcctgctggaaggcttttttgctgcggaagacctggcggtgatcgccgcccagcgcctgcatacggcggtgcatagccccgaacagctggcggcgctggagcaagccgatctccccgagccggtgaccgtgtggatgaagctggataccggcatgcatcgcttaggggtgcgcccggaggaagccgaggcgttttatcagcgtctgagccagtgtaaaaacgtccgccagccggtgaacgtggtgagccacttcgcgcgcgccgatgagccgacctgcggcgccaccgaacgccagctggatatcttcaccacctttaccgaaggcaagccgggcttgcgctctatcgccgcctcgggcggcattctgctgtggccgcaatcgcattacgactgggtgcgccccggaattatcctgtatggcgtgtcgccgctggacgatcgctccaccgggaaagatttcggctgccagccggtgatgaccctgacgtccagcctgattgcggtgcgcgagcataaagcaggggagcccgtcggctacggcggcacctggatcagcgaacgcgatacccgtctcggcgtggtggcgatgggctatggcgacggttatccgcgcgccgcgccgtcgggcacgccggtgctggtcaatggccgggaagtgccgattgtcggccgggtggcgatggatatgatctgcgttgacctcggaccgcaggcccaggataaagccggcgacgcggtagtgctgtggggagaggggctcccggtagagcgcatcgccgagatagcgaaagtgagtgcttacgaacttattacgcgactgacctcccgcgtcgccatgaaatacctcgac

SEQ ID NO: 24121 - DNA, 657 bp, Klebsiella pneumoniae
atgtaccaacatcataactggcagggtgcgcttctggattatccagtaagcaaagtagtgtgcgtcggcagtaattatgcgaaacacatcaaggaaatgggcagtgtgacgccggaagagccggtgctgtttattaaacctgagactgcgctgtgcgatcttcgtcagccgttggtgcttcctgaggggctgggctcggtgcatcacgaagtcgagctggcggtgcttatcggcagcacgctgcgtcaggcgacggaagagcatgtgctgaaagggattgccggctatggcgtcgcgctggatctcacgctgcgcgacctgcaggcgaaaatgaaaaaagcgggacaaccctgggagaaggccaaaggcttcgataacgcctgtccgatctccggctttatcccggccgctgagttccacggcgacccgcagaatacgtcgttaagtctgaagattaatggcgaagtgcgccagcagggcaccactgccgacatgatccataggattgtgccgctgatcgcctatatgtcgcgcttctttaccctcaaagccggggatgtgatcctcaccggcaccccggaaggcgtggggccgctgcacagcggtgacgagctggaggtcggcttcaacggcctggcgctcactacccgcgtgctg

SEQ ID NO: 24122 - DNA, 1980 bp, Klebsiella pneumoniae
ttgccaaccatgaaacgcctgcgaaaaatgctgcctgcgctgctgatattaaccccattgctattttctccggccgccgcggaggaattttccgccagttttaaaggcaccgatatccaggaatttatcaataccgtcagcaaaaacctgaataaaacggtgattatcgatcccagcgtacgcggtactatcaccgtgcgcagttacgatatgctcaatgaagaacaatattatcaattcttcctcagcgtgctggatgtatatggcttcgccgtgatcaatatgaataacggcgtgctaaaagtggtccgcgccaaagacgccaagacctcggccgtgccggtcgccagcgcggccgctccgggcgaaggcgatgaagtggtcacccgggtggtgcccctgaccaacgtcgccgcccgcgatctcgccccgctgctccgccagctgaacgataacgctggcgccggcagcgtggtccattatgagccctccaacgtactgctgatgaccggccgcgcggcggttatcaaacgcctgctgaccattgtcgagcgcgtcgacaacgccggggatcgcagcgtggtgaccgtgcccctctcctgggcctccgccgcggaagtagtcaaactggttaccgagcttaataaagataccagcaagtcggcgctgccgggctcgatggtggcgaacgtggtggccgatgagcgcaccaacgcggtactggtgagcggcgaaccaaactcgcgccagcgcatcatcgccatgatcaaacagctcgaccgccagcaggcggtacagggtaacaccaaagtgatctacctgaagtacgccaaagccgccgatctggtggaggttctgaccgggatcagcagctcgctgcagagcgacaagcaaagcgccaggccagtggccgcgatcgacaaaaatattattatcaaagcccacggccagaccaacgccctgatcgtcaccgcggcgccggacgtgatgaacgatcttgagcgggtgatcgcccagctcgatatccgccgcccgcaggtgctggtggaggcgattattgccgaagtgcaggatgccgatggccttaatctcggtatccagtgggcaaacaaaaacgccggcatgacgcagttcaccaacagcggtttgccgatatcgacggctatcgccggtgccaaccagtacaacaaagacggtaccatcagcagctcgctggccagcgccctcggctcgtttaacggtatcgccgccggcttctatcaggggaactgggcgatgctgctcaccgccctctccagcagtaccaagaacgatattctggccacccccagcatcgtcaccctcgataacatgcaagccacttttaacgtcggccaggaagttccggtattaaccggctcgcaaaccacctccggcgacaacatcttcaataccgtcgagcgcaaaaccgtcggcattaaactgaaggtgaagccgcagattaacgaaggcgatgccgtgctgctggagattgagcaggaggtatcgagcgttgccgactcggcctccagcaccagcagcgatctcggggcgaccttcaatacccggacggtgaataacgccgtgctggtcggcagcggcgaaacggtggtggttggcgggctgctggataaaaccgtcaccgataccgctgacaaagtgccgctgctcggggatatcccggtgatcggcgccctgttccgctccgacagcaagaaagtgtcgaaacgcaacctgatgctgtttatccgcccgaccatcattcgcgatcgcgatgagtaccgccaggcttcttccggccagtacaccgccttcaacaatgcgcaaactaaacagcggggtaaagaaagcagcgaagcgtcgctcagcaacgacctgctgcatatctatccgcagcaggagacccaggctttccgccaggtcagcgccgccattgacgccttcaatctcggaggccgccca

SEQ ID NO: 24123 - DNA, 783 bp, Klebsiella pneumoniae
atgtcccgtagcacgtggtattacaatatgaatgcactgaagcaaggggacaggtatgcgggtcttaaagagaacatcaggaagatataccactatcacaaaggtcgttatggctaccgcaggatcacgctcgcactgagaaaacaggggctgcggataaaccataaaacagtgcagcggctgatggcagaactgtcactccggtctatgataagggcgaaaaaatatcgtgcctggaaagggagaacgggcgaggccgcgcccaatatcctgagccggaacttcggtgcgtcaaaagccaacgaaaaatgggtaacagatgtgacagagttcccggtacagggaaaaaagctttacctgtcgtcagttctcgatctgtttaaccgggaggttatcgcctacagcctgtcggaaaggccggtgatggagatggtgaatacgatgctggacggtgcgttcccgaagctcagaccgggagatgctccgctgctgcactcggatcagggctggcattacaggatgaggagctatcaggaacgtttaaaggcgcatgggatgacgcagagtatgtcgcgtaaaggaaactgcctggataatgcagtgatggaaaacttcttcgggaccctgaaatcggagtgtttttatctgagggagttcaggagtgtcagtgcgctaagaaaagccgtagaggactatatccattactacaacaacgagcggataagcctgaaattaaaaggcctgagtccggtagagtaccgaacccaggctctgagagccgct

SEQ ID NO: 24124 - DNA, 897 bp, Klebsiella pneumoniae
atgtttgccttctcccgatttctgctctatttcaccgaagtggcccgtcagggatcgtttcgtaaagcgtcagaggcgctgcatgtgtcggcgtcttccatcgaccgtcagattttgcgcgtggaacaggagctggcgatgccgctcttcgagcgccatcccaccgggctgaggctgaccgccgccggggagctgctcctgcacgcggccaataactggaaaaaggactttacccgggtctgcgagcagctggacgatctgcgcgggttgcggcgggggcatgtgcgcatcgccaccatcgatgccattaaccggcatttcttttcgacgatgctcaaagaggtgcataaacattatcccaacatctcttttacattgaccaccatcaacaatatccacatccagcaggcgctgatctccggcgaggcggatttcggcatcatgctcaatccccagacctctcgtgaactgcaggtccgggcgtttgccgagatgaatatggggattgtggtgcccaccggccatccgctggccagccgcagcgcggtgcgcttttgtcagtgcctcgactacccctttatcctgccgtccgccccattgatgatcagcgagccggtggaggcgctggtgaacatcagcggcaacgaggtaaaggaggtggcggtatcgaataacattcacatgatccgcaccctgatcaaagagcagatgggcatcggcattctgtgccggctggatattctcgatgagattgagtccggccagttggcgtttgtgccgctaaccgatccgcagcttaagcctttcacgctggcgctgtgcgtctcgcccgcccgccagctttcccttgccgcctcgatgatgctgaaccagctggagatactcttcagccagctg

SEQ ID NO: 24125 - DNA, 1347 bp, Klebsiella pneumoniae
atgctggataaaattgtcatcgctaaccgtggcgagatcgcactgcgcatcctgcgtgcctgtaaagaactgggcatcaagactgtcgctgtgcactccactgcggatcgcgatctaaaacacgtattgttagcggatgagacggtctgcatcggtccggctccgtccgtaaaaagctatctgaacattccggccattatcagcgccgctgagatcactggcgcggtagcgattcacccgggttatggcttcctctctgagaacgctaattttgctgagcaggttgagcgttccggctttatcttcatcggcccgaaagccgacactatccgcctgatgggcgacaaagtgtccgcgatcaccgccatgaagaaagccggcgtcccgaccgttccgggttctgacggcccgctgaccgacgacatggacgctaaccgcgcccatgctaaacgcatcggctacccggttatcatcaaagcctccggcggcggcggcggtcgcggtatgcgcgttgtacgtagcgacgctgaactggcgcaatccatctccatgaccaaagcggaagccaaagcggctttcaacaacgacatggtctacatggagaaatacctggaaaacccacgccacattgaaattcaggtgctggcggatggtcagggtaacgctatctatctggctgaacgtgactgctccatgcagcgccgtcatcagaaagtggtcgaagaagcgccggcgccgggcatcaccccggaactgcgtcgctacatcggcgagcgttgcgcgaaagcctgtgtggatatcggctaccgcggggcgggtacctttgagttcctgttcgaaaacggcgagttctacttcattgaaatgaacacccgtatccaggtagagcatccggtaactgaaatgatcaccggcgttgacctgatcaaagagcagctgcgtatcgcagccggccagccgctgtccatcaagcaggatgaagtggtggttcgcggccatgcggtggaatgccgtatcaacgccgaagacccgaacaccttcctgccgagcccgggcaaaatcacccgtttccacgcgccgggtggctttggcgtgcgctgggagtcacatatttacgccggttacaccgtaccgccgtactatgactccatgatcggtaaactgatctgctacggcgaaagccgtgacgtggcgattgcccgcatgaagaatgcgctgcaggagctgatcatcgatggcatcaaaaccaacgtcgatctgcagatgcgcattatgagcgacgagaatttccagcatggtggcaccaatatccactatctggagaaaaaactcggcttgcaggaaaaa

SEQ ID NO: 24126 - DNA, 1743 bp, Klebsiella pneumoniae
atgataaaaacaacaatatggcgtcaggtggtcatcgctgcgttgctggcggggggcagctttaccgtcgccgccaatccgccaccgccgccgccggtctcttatggcgtagaggaagatgtgttccacccggtacgcgcccggcaggggatggtggcctcggtggacgcgctggcgacccgcgtcggcgtggatatcctgcgccagggcggtaacgctgtcgatgcggcggtagcggtaggctacgcgctggcggtcacccatccgcaggccgggaatattggcggcggcggttttatgatgctgcggactaaagacggcaagaccacggcgatcgatttccgcgaaatggcgccagagcaggccacccgcgacatgttccttgacgaccagggcaacccggacagtaaaaaatcactgacttcgcatctggcctccggcacgccaggcagcgtcgccggtttctccctcgcgctggaaaagtatggcaccatgccgttgaacaaagtgatccgtccggcgattaagctggcggaagaggggtttatcgttaacgatgcgctggcggacgatctgaagacctacggcagcgaagtgatcccgcagcatgaaaatagtaaagcgatcttctggaagaacggcgagccgctgaagaagggcgatcggctggtgcagaagaacctcggtaagagcctggagctgattgccgagcacggcccggacgccttctataaaggggccatcgccgaccagatcgctgacgagatgaaaaagcacggcgggctaatcaccaaagccgatctcgccggctataaggccgtggagcgtacgccggttagcggcgagtatcgcgggtatgaggtttactctatgccgccgccgtcctccggcgggatccatatcgtgcagatcctcaatatcctcgaaaacttcgatatgcagaaatatggttttggcagcgccgacgccatgcaggtgatggcggaggcagagaaacacgcctacgccgaccgctctgaatatctcggcgaccctgacttcgtcaacgtgccgtggcaggcgctgaccagcaaggcttacgccaaagcgatcgccgccgagattgatgtcaacaaggcgaagccttccagccagatccgtccgggcaagctggcgccctatgaaagcaaccagaccacccacttctcggtggtcgataaagacggcaatgcggtggcggtgacctatacactgaatacgaccttcggtaccggcattgtggccggtaattccggcattctgctcaataaccagatggatgatttctcggcgaagcccggcgtgcctaacgtctatggtctggtgggcggcgacgccaatgcggtggagccgaaaaaacgcccgctgtcgtcaatgtcgccgaccattgtggtgaaagatggcaaaacctggctggtgaccggcagcccgggcggcagtcggatcatcaccaccgtactgcagatggtggtcaataccatcgatttcgggatgaacgtcgcggaagccaccaacgcgccgcgtttccaccatcaatggctgccggatgagctgcgggtggagaaaggctttagcccggataccctgaagctgctggaggcgaaggggcagaaagtggcgctgaaagaggcgatgggcagtacccagagcattatggtggggccggacggcatgctgtatggtgcctccgatccgcgttcgccggatgatttaacggcggggtat

SEQ ID NO: 24127 - DNA, 726 bp, Klebsiella pneumoniae
ttgtcggtttataatgagattcggcagctgctgccgaatctgcattacatctatgctttcgataacgttgccttcccctatggcgagaagagcgaggagtttatcgttgagcgcgttgtggaaatcgtcactgctgtccagcagcgttatcccctggcgctggcggtgatcgcctgcaataccgccagtaccgtctccctgcctgccctgcgtgaaaagttcgctttccccgtcgttggcgtggtgccggcgatcaagcccgccgcccgtttaacggcgaacggcattgttggcctgctggcgacgcgcggtaccgtaaagcgtccttatacccgtgagctgatcgaccgctttgccaatgaatgtcggattgaaatgctggggtcggcggagctggtggagctggcggaagcgaagctgcacggcgagcctgtgccgttagaagagctgcgccgtatcctgcgcccgtggctgcggatgcaggagccgccggatacggtggtgctgggctgcacccactttcctcttttacaggaggagctgcagcgcgttctgccggaaggcacacggctgatcgattccggcgcggcgattgcccgtcgcaccgcctggctgttagagcatgaagcgccggatgcgaagtccagcgacgagaataaagcattctgcatggcgctgacggcagaaacagaacagcttttacccgttctgcgtcgctatggcttc

SEQ ID NO: 24128 - DNA, 1161 bp, Klebsiella pneumoniae
atggaacaggttgtcattgtcgatgcaattcgcaccccgatgggccgttcgaagggcggcgcatttcgccacgtgcgcgcggaagacctctccgcgcacctgatgcgtagcctgctgtcgcgcaatccgtcgcttgaggcaagcgcgatagacgatatctactggggttgcgtgcagcaaaccctcgagcagggttttaacatcgcccgaaacgcggcgctgctggcggagatcccgcattcggtaccagcaaatacggtcaaccgtctgtgcggttcttccatgcaggcgctgcacgatgcgacccgtatgatcatgaccggcgatgccagcgtctgcctgattggcggcgtcgagcacatgggccatgtgccaatgagccatggcgtcgatttccatccgggcctcagccgcaacgtggcaaaggcggcagggatgatggggctgactgcggagatgctggcgcgtctgcacggtattagccgcgagatgcaggatcagttcgccgcgcgctctcacgctcgtgcctgggccgcaacccagtccggcgcattcaaagcggagattatccccaccggcggccacgatgccgatggcgtactcaagtcctttaactatgacgaggtgatccgcccggaaaccaccgtcgagacgctgtccacgcttaaaccggcgtttgacccggtgaccggtacggtaacggcgggtacctcttccgccctttccgatggcgcagcggcgatgctgctgatgagcgaaagccgcgctcgcgagctggggctgaagccgcgcgctcgcgtccgttcaatggcggtggtcggctgcgacccgtccattatgggttatggcccggttccggcctcaaagctggcgctgaaaaaagcgggcttatccaccagcgatatcgacgtttttgaaatgaatgaagcatttgccgcgcagatcctaccgtgtattaaagatctgggcttaatggagcagatcgatgagaagatcaacctcaacggcggggcgatcgcgctcggtcatccgctgggctgttccggggcgcgtattagcaccacgctgatcaaccagatggagcgcaaagacgctcagttcggcctcgccaccatgtgtatcggcctgggacaagggatcgctaccgtgtttgagcgggtt

SEQ ID NO: 24129 - DNA, 1377 bp, Klebsiella pneumoniae
atgacagagcacaccaccaccttaaaaagaacgctcggcagttttcgtttatgggggatcgccgtcggactggtgatatccggggagtacttcggctggagctacggctggtcgcaggcgggcacgatggggtttatggtcgtcgccctggcgatcgccgccatgtactgcgcctttattttcagctttaccgagctgaccaccgccatcccgcacgctggcggccctttcgcctatgcctaccgcgccttcgggcccaccggcggctttatcgctggttttgccaccctgattgaattcgtcttcgccccgccggccatcgccatggccatcggggcctacctcaacgtgcagtttccggcgctggatccgaaatgggtcgcctgcggcgcctacgtgatctttatgacgctcaatattctcggcgtcggcatcgccgccaccttcgagctgatcgtcactctgctggccatcttcgagctgctggtgttcatgggcgtggtcgcccccggcttctcctggagccacttcaccactaacggctgggcgggcgcggacagcttcagcggcctggcgctgccggggatgttcgccgccattccgttcgccatctggttcttcctcgccattgagggggcctccatggcggccgaagaggccaaagatccgcagcgcaccattccccgcgccctgggcggcggcattctgacgctgacggtgctggcgatcggcgtgatggtcttcgccggcggcgtcggcgactggcgcgcgctgtccaatattaacgatccgctgccccaggcgatgaagacggtcgtgggcaacggcagcggctggctgcatatgctggtgtggctggggctgtttggcctcgtcgcctccttccacggcatcattatgggctactcgcggcagatctactccctcgcccgcgccggctatctgcccgccgggctggcctccctcaaccgccgcacgcgcaccccgcatctggcgatccttgccgggggcgtggtggggatcgccgcgatcttctccgactcgctgatcaccatcagcggcatgccgctgaccgcctgcatcgtcaccatgtcggtatttggggctattgttatgtatatcacttccatggcggcgctgttcaaactgcgccgtagcgagccgaagctgattcgtccgttccgcgccccgctctacccgctggcgccggcctttgccctcggcatggcggtgctctgcctggtggcgatggtctggtataacctgctgttggcgctgattttcgcggcgatgatgctcggcggctacctgtggttccgcaaaaccgcagcggcccgtgaacgggcgccagtggatcctcaactgcgcacggtctcc

SEQ ID NO: 24130 - DNA, 735 bp, Klebsiella pneumoniae
atgaaggcgcttcgtgagccgctgtggtggcttatcgcgctgtttatcggcctgctggcagggctgccctacagcgcgccgctgttcagtcggctgttcccggaactgccgcggccggtctaccagcaggagagcttctgggcgctcactctcgatcacggctggctggtggtggcgtccagcctcgcggcaacggcaatcgggctgggggctggggtggcggtcacccggcccgccggcagcgcgtttcgtccgctggtggagaccatcgccgctatcgggcagacctttccgccggtggcggtgctggcgatggcggtgccggtgctgggctttggctggctgccggcgctcatcgccctcgcgttgtatggcatactgccggtgctgcaggggacgctggccgggctgggttcgataccgccgggggtgtcaggtgtggctgaagggatgggaatgaccggctggcagcgtctgtataaggtggagctaccgctggcggccccggtgatcctggcggggatccgcacctcggtcatcgtcaatattggtaccgcgaccattgcctcgacggtgggggccagtacgctcgggacgccgatcatcatcggcctgagcggctttaataccgcctatattgtacagggggcgctgctggtggccctggcggcgattatcgtcgaccgcgcgtttgaacgtctgacccgctggatcagccgacaccgccacgcacaa

SEQ ID NO: 24131 - DNA, 1863 bp, Klebsiella pneumoniae
atgagcaaaggatcgacaagcagtgacgccccgtttgggacattgttaggctatgcacccggtggcgtagcgatttattcatcgaattacagtagcttaaatccgcaggactacccggatgacgcgacgtttcgcagctacatcggcaatgagtatatggggcataaatggcagtgcgtggagtttgcgcgccgctttctgttcctgacctatggctttgtcttcaccgatgtggggatggcttatgaaatcttctccctgcgtttcctgcgcgaagtggtcaatgacaatattctgccgctgcaggccttcgccaacggctcccgccgtccgcctatcgctggttcgctgctgatctggcagaaggggggcgagtttaagcacaccggccatgtggcggtgatcacccagcttgtcggcaataaggtgcgtatcgccgagcagaacgtgattcactcgccgctgccgcagggccagcagtggacccgcgagctgaccctcgaggtcaacgacggccggtacaccatcaaagatacctttgccgataccgaaattttaggctggatgatccagaccgccgataccgaacacagcctgccgcagccggtgctgccgggcgaggcgatggccatcaaaggcgcgcggctgccaaacaacggccagtttcgcggtaaatggctgaacgagaaagacccgctgcagaaagcctacgtggcagccaacggtcatttcatcaaccaggatccctatcagtatttcaccatcagcgaaagtgccgaacaggagctgatcaaagccaccaacgagctgcacctgatgtatctgcacgccaccgataaggtgatgaaggatgacaacctgctggcgctgttcgatattccgaaaattctctggcctcgtctgcgcctctcgtggcagcgccgccgtcatcatatgatcaccgggcgcatggatttttgcatggacgagcgcgggctgaaggtgtacgagtacaatgccgattccgcttcctgccataccgaaggcgggctgatcctcgaacagtggctgaagcagggctactacggcaccggccacaatccggcggaaggtctgctcgatgagctggcgggggcgtggaaacacagccgggcgcggcccttcgtccacatcatgcaggacaaggatctggaagagaactaccacgcgcagtttattcagcgttcgctgacccaggccggttttgagagcaaaattctctttggccttgatgagctgcgctgggacgctgccggtcagctgatcgacgccgacgggcggctggtcaactgcgtctggaaaacctgggcatgggaaaccgccattgagcaggtgcgcgaagtcagcgccgaggagtacgcggcggtaccgattcgtaccggacatccgcagaatgaggtgcggctgattgacgtcctgctgcgtcctgaagtattggtattcgaacccctgtggacggtgatccccggcaacaaagccattctgccggtgctgtggtcgctgttcccgcatcatcgctatctgctggataccgattttgaggttaacgacgagctggcgaaaaccggctatgcggtgaagcctatttccgggcgctgcgggaacaatatcgacctgatcggccctcaggatgaacttctggataagaccagcggccagtttgtcgatcgcaagaatatctaccagcagctgtggtgcctgccgaaagtggacggtaagtacattcaggtgtgcacatttaccgtcggcggtaactacggcggtacctgcctgcgcggcgattcgtcgctggtggtgaaaaaagagagcgatatcgagccgttaatcgttttgaaagacaaagca

SEQ ID NO: 24132 - DNA, 1923 bp, Klebsiella pneumoniae
atgactgttcagactcaggataccgggaaggcggtctcttccgtcatcgcccagtcatggcaccgctgcagcaagtttatgcagcgcgaaacctggcaaacgccgcaccaggcccagggcctgaccttcgactccatctgtcggcgtaaaaccgcgctgctgaccatcggccaggcggcgctggaagacgcctgggagtttatggacggccgcccctgcgcgctgtttattcttgatgagtccgcctgcatcctgagccgttgcggcgagccgcaaaccctggcccagcttgctgccctgggatttcgcgacggcagctattgtgcggagagcattatcggcacctgcgcgctgtcgctggccgcgatgcagggccagccgatcaacaccgccggcgatcggcattttaagcaggcgctacagccatggagtttttgctcgacgccggtgtttgataaccacgggaggctgttcggctctatctcgctttgctgtctggtcgagcaccagtccagcgccgacctctccctgacgctggccatcgcccgcgaggtgggtaactccctgctcaccgacagcctgctggcggaatccaaccgccacctcaatcagatgtacggcctgctggagagcatggacgatggggtgatggcgtggaacgaacagggcgtgctgcagtttctcaatgttcaggcggcgagactgttgcatcttgatgctcaggccagccaggggaaaaatatcgccgatctggtgaccctcccggcgctgctgcgccgcgccatcaaacacgcccgcggcctgaatcacgtcgaagtcacctttgaaagtcagcatcagtttgtcgaggcggtgatcaccttaaaaccgattgtcgaggcgcaaggcaacagttttattctgctgctgcatccggtggagcagatgcggcagctgatgaccagccagctcggtaaagttagccacacctttgagcagatgtctgccgacgatccggaaacccgacgcctgatccactttggccggcaggcggcgcgcggcggcttcccggtgctactgtgcggcgaagagggggtcgggaaagagctgctgagccaggctattcacaatgaaagcgaacgggcgggcggcccctacatcgccgtcaactgccagctatatgccgacagcgtgctgggccaggactttatgggcagcgcgcccaccgacgatgaaaatggccgcctgagccgccttgagctggccaacggcggcaccctgtttctggaaaagatcgagtatctggcgccggagctgcagtcggctctgctgcaggtgattaagcagggcgtgctcacccgcctcgacgcccggcgcctgatcccggtggatgtgaaggtgattgccaccaccaccgtcgatctggccaatctggtggaacagaaccgctttagccgccagctgtactatgcgctgcactcctttgagatcgtcatcccgccgctgcgcgcccgacgcaacagtattccgtcgctggtgcataaccggttgaagagcctggagaagcgtttctcttcgcgactgaaagtggacgatgacgcgctggcgcagctggtggcctactcgtggccggggaatgattttgagctcaatagcgtcattgagaatatcgccatcagcagcgacgacggccacattcgcctgagtaatctgccggaatatctcttttccgagcggccgggcggggatagcgcgtcatcgctgctgccggccagcctgacttttagcgccatcgaaaaggaagctattattcacgccgcccgggtgaccagcgggcgggtgcaggagatgtcgcagctgctcaatatcggccgcaccaccctgtggcgcaaaatgaagcagtacgatattgacgccagccagttcaagcgcaagcatcaggcc

SEQ ID NO: 24133 - DNA, 2286 bp, Klebsiella pneumoniae
atgaatcagagtctgctggtgacaaagcgcgacgggaccaccgagcgcatcaatctcgacaaaatccatcgcgtactggattgggcggcagaaggactgaataacgtttcgatttcccaggtagagctgcgctcccatatccagttctatgacggcatcaaaaccgcggacatccacgaaaccattattaaagccgctgcggatctgatctcccgcgacgcaccggattaccagtacctcgccgcgcgtctggcgattttccatttgcgtaaaaaagccttcggtcagtttgagccgccggcgctctacgatcacgtggtgaagatggtcgagaaaggtaaatacgatcatcatctgctggaagactacacggaagaagagttccagcagatggacggtttcctcgaccactggcgcgacatgaacttctcctacgcagccgttaagcagctggaaggcaagtatctggtacaaaaccgccgtcaccggcgaagagtttatgagagcgcgcagttcctctatattctggtcgccgcttgcctgttctcgaactatccgcgcgaaacgcgtctggactatatcaagcgtttctacgacgcggtgtccacctttaaaatctcgctgccgacgccgatcatgtccggcgtgcgtaccccaacccgtcagttcagctcctgcgtgctgatcgagtgcggcgacagcctggattccatcaacgccacctccagcgcgattgtgaaatacgtttcccagcgcgccggcatcggcatcaacgccgggcgcattcgcgcgctgggcagcccgatccgcggcggcgaagccttccacaccggctgcattccattctacaagcatttccagaccgcggtgaaatcctgctcgcagggcggcgtgcgcggcggcgcggcaaccctcttctacccaatgtggcatctggaagtggaaagcctgctggtgctgaaaaacaaccgtggtaccgacgccaaccgcgttcgtcacatggactacggggtacagatcaacaagctgatgtacacccgtctgctgaagggcggcgatattaccctgttcagcccttccgacgtcccgggcctgtatgacgccttcttcgccgatcaggacgagtttgagcgcctgtacacccagtacgagcaggacgacagcattcgtaagcagcgtattaaagccgttgagctgttctcgctgatgatgcaggagcgcgcctctaccggccgcatctatatccagaacgtcgaccactgcaacacccacagcccgttcgatccggtagtcgccccggtgcgtcagtctaacctgtgcctggagattgctctgccgaccaaaccgctggaagatgtcaacgacgaaaacggcgaaatcgcgctgtgcaccctgtcggccttcaacctcggggctatcgacagcctcgacgagctggaagagctggcggtgctggcggtgcgtgctctggatgcgctgctcgactatcaggattaccccatcccggcggctaaacgcggcgcgatggggcgtcgtacgctgggtatcggcgtgatcaacttcgcttactatctggcgaagcatggcaaacgctactccgacggcagcgccaacaacctgacgcacaaaacgttcgaagcgattcagtactatctgctgaaggcctctaacgagctggctatcgagcaaggcgcctgcccgtggttcaacgaaaccacctatgcgcagggcatcctgccgatcgatacctataagaaagatctggacggcatcgtcagcgaacccctgcactacgactgggaagcattgcgcgaatccattaaaacccacggcctgcgcaactccacgctctccgcgctgatgccgtccgagacctcgtcgcagatctccaacgccaccaacggtattgagccgccgcgcggccacgtgagtatcaaagcgtccaaggacggtatcctgcgccaggtggtgccggattacgaaaacctgcagaacgcctacgagctgctgtgggagatgccgaacaacgacggttatctgcagctggtgggtatcatgcagaagtttatcgaccagtcgatctctgccaacactaactacgatccgacgcgcttcccgtccggaaaagtgccgatgcagcagttgctcaaagacctgctcaacgcctataaattcggcgtcaaaacgctgtactatcacaacacccgtgatggcgctgaagacgcccaggatgacctggccccgtccatccaggacgacggctgcgaaagcggcgcttgtaagatc

SEQ ID NO: 24134 - DNA, 624 bp, Klebsiella pneumoniae
atgaagattgtggaagtcaaacacccactcgtcaaacacaagctgggcctgatgcgcgagcacgacatcagcaccaaacgcttccgtgaactcgcctcagaagtgggcagcttactgacttatgaagccaccgccgatctggagactgagaaagtcactattgaaggctggaacggtccggtggaagtcgagcagatcaagggcaagaaaattaccgttgtgcctatcctgcgcgctggcctcggcatgatggaaggggtgctggagcacgtgccaagcgcgcgtatcagcgtagtcggtatctatcgcaatgaagaaaccctcgagccggtgccttacttccagaaactggtgtctaacatcgatgaacgtatggcgctggtcgttgacccgatgctggccaccggtgggtcgatgatcgccactatcgatctgctgaaaaacgccggctgcaccagcatcaaggtgctggtgctggtggcggcaccggaagggattgccgcgctggagaaagcccacccggacgttgagctgtacaccgcctctgtcgataagggactgaacgagcacgggtatatcattcccggtctcggcgatgccggcgacaagatttttggaacgaaa

SEQ ID NO: 24135 - DNA, 825 bp, Klebsiella pneumoniae
ttggaaagcctgttaaacctacctctggctggtgaggccagagtcaggatattacaaattactgatactcacctgtttgctgaaaagcatgaaacgttgttaggcatcaatacctgggatagctatcaggccgtactgtcggccattcatgcctcacagcgtccatgcgatctgattgtcgcaacaggcgatctggcgcaggaccactcctccgcggcctatcagcattttgctgagggcatcgcgagttttgctgcaccctgcgtctggctaccgggcaaccatgatttccagccggcgatgtacagcaccctgcaggaggcgggcatttcccctgccaagcgcgtgtttctcggcgatcgctggcagatcctgctgctcgacagccaggtgtttggcgttccccatggcgagctgagcgacttccagctggagtggctcgaacataagctggcggaggcgccggagcgctataccttactcctgctgcaccatcatccgctgccggccggctgcagctggctggatcagcatagtctgcgcaacgccggcgcgctggacagcgcgttgagcgcctggccgcgggtgaagcatcttttgtgcggccatattcatcaggaactggatctcgactggaatggccggcgcatgatggcgacgccgtcgacctgcgtccagtttaaaccgcactgtgccaatttcactctggatacggtgtcaccgggctggcgctggctggagcttcaccctgacgggacgctgaccaccgaagtgtgccgcctggaaggcgccgcgtttcatccggatattgcttcagaaggctac

SEQ ID NO: 24136 - DNA, 963 bp, Klebsiella pneumoniae
atgcgcatcggacaccaccagctcagaaatcgcctgatcgcagcgcccatggctggcattactgacagaccattccggacgctgtgctacgagatgggagcgggtttaaccgtttccgagatgatgtcttctaacccacaggtgtgggagagcgacaagtcccgtttacggatggtgcatatcgatgagcccggtattcgtaccgtgcaaatcgccggtagcgtgccggaagagatggctgccgccgcgcggattaacgtggaaagtggcgcccagattattgatatcaatatgggatgcccggcgaaaaaggtgaatcgcaagcttgcaggttcagccctcttgcagtaccccgaccaggtgaagtcgatcctgacggcggtcgttaacgcggtggacgttcctgtgactctcaagattcgcaccggttgggaaccggaacaccgtaactgcgtagagattgcccaactggccgaagagtgtggcattcaggctctgactattcacggacgcacccgcgcctgcttgtttaacggagacgctgagtacgacagtattcgggcagttaagcagaaagtttccattccgattatcgcgaatggcgacattactgacccgcttaaagccagagctgtgctcgactatacaggggctgatgccctgatgataggccgtgcagctcagggaagaccctggatctttcgggaaatccagcattatctggacactggagagctgctgcccccgctgccgctggcagaggtgaagcgcttgctttgtgcgcacgttcgggagttgcatgacttttatggtcaggcaaaagggtaccgaatcgcgcgtaaacacgtctcctggtatcttcaggaacatgctccagatgaccagtttcggcgcacattcaacgccattgaggatgccagcgaacagctggaggcgttggaggcatacttcgaaaattttgcg

SEQ ID NO: 24137 - DNA, 1308 bp, Klebsiella pneumoniae
atgggaaacacaacgataccaacgcaaagttaccgcgccatggagagcgggcagagtaagagctacattattcctttcgctctgctgtgctccctcttttttctgtgggcggtggctaataatctgaatgatattttattgccgcaatttcaacaggcctttaccctgactaacttccaggccggattaattcaatcggccttttactttggctattttattattcccatccccgccgggatgttgatgaaaaaattcagctacaaagccggcatccttacgggtctgtttttatatgcctgcggcgccgcgctgttctggcctgccgccgaagtgatgaattacaccttatttctcattggattatttattatcgctgccgggcttggctgtctggaaaccgcggccaacccgtttgtcaccgtcctcggtccggaaagcggcggtcacttccgccttaatctggcccagacctttaactcattcggcgccattattgccgtggtatttggccagagtcttattttgtctaacgtcccgcatcagccgcaggaggtgctggataaaatgacgccggaacagctcagcgcctggaagcacagtctggtcctgtcggtacaaaccccctatatgattatcgtggccattgtcctgctggtcgccctgctgatcgtctgcacccgcttcccctccctgcaaagcgatgaccacagcgacagcgcgcagagcacttttttcgcctcgctgacgcgcctgatgcgcatccgccactggcgctgggcggtactggcccagttctgctacgtcggcgcgcaaaccgcctgctggagctacctgattcgctacgctatcgaagagatcccgggcatgacggccggtttcgccgccaactacctgaccgccaccatggtctgcttctttatcggccgttttaccggcacctggcttatccgccgcttcgcgccgcacaacgtgctcgctatctatgcgtttatcgccatgctgctctgcttgctctccgccttcagcggcggccacgtcggtctgctggccctgaccctgtgcagcgcctttatgtccattcagtacccgaccatcttctcgctggggattaagcatctgggccaggacaccaaatatggctcgtcatttatcgtcatgaccattatcggcggcgggatagttaccccggtgatgggctttgtcagcgacgccgccggcaatatcccgaccgccgaactggtcccggcgctgtgcttcgccatcatctttatttttgcccgtttccgttcacaagcggcgacgaac

SEQ ID NO: 24138 - DNA, 1272 bp, Klebsiella pneumoniae
gtggcaaagaacattcaagccatccgtggcatgaacgattatctgccgggcgaaaccgctctctggcagcgcattgaaggctcactgaagcaggtgctcggtagctacggttacagcgaaatccgtttgccgattgtagagcagaccccgttattcaaacgcgcgatcggcgaagtgaccgacgtggttgaaaaagagatgtataccttcgaagaccgcaatggcgacagcctgacgctgcgtccggaagggacggcgggctgcgtacgtgccggcatcgaacatggtctgctgtacaatcaagaacagcgtctgtggtacgtcgggccaatgttccgtcacgagcgcccgcagaaaggtcgctaccgtcagttccatcagatcggcgccgaagtgtttggcctgcagggcccggacatcgacgcggagctgattatgctgaccgcgcgctggtggcgtgagctgggcatctccgagcacgtcagcctggagctgaactccatcggttcgctggaagcgcgcgccaactaccgcgacgcgctggtggcatacctggagcagtttaccgataaactggatgaagacagtaaacgccggatgtataccaacccgctgcgggtgctggactccaaaaacccggacgttcaggcgctgctcaacgacgcgccggcgctcggcgattatcttgacgaagagtcgaaagcccactttgccggcctgtgcgcgttgcttgacgatgccgggatccgctacaccgtcaaccagcgcctggtgcgcggccttgattactataaccgcaccgtgttcgagtgggtgaccaccagccttggttcccagggcaccgtctgcgccggcggtcgttacgacggcctggttgagcagctgggcggtcgcgctaccccgggcgtgggttttgccatggggctggaacgtcttgttttactggtccaggcagtgaatccggaatttaaagccgatcctgttgtcgatatatacctggtagcctccgggaccgatactcagtctgctgcaatgcgtctggctgagcaggttcgcgatgcgctgcccggcgtgaagctgatgaccaaccacggcggcggcaactttaagaagcagttcgcccgcgctgacaagtggggggcgcgcgtcgcgctggtggtcggtgaatcagagatcgctgacggaaacgtggtagtgaaggatttacgctcaggtgagcaaactaccgtaacgcaggagagcgttgccgcgcatttgcgcacacttctgggt

SEQ ID NO: 24139 - DNA, 1461 bp, Klebsiella pneumoniae
atgtatctgggtatcgatctcggcacatcggaagtcaaagcgctggtcattgatgagaaccatgaggttatcgccagccatagcgcgccgctgagtattcagcggcctcatcagcactggtcagaacaagcgccggagctatggtgggaggcgacggagtacctgatggccacgctacgggaaaaatgcgcccagcattggccggctattaaggcgattggcctctccgggcagatgcacggcgcggtgttgctggatgcagaggggaaggcgatccgtccggccattctgtggaacgacacccgctgcgccgcagagtgcgccgagctggaggcgatggcgccggagctgcatcaggtggcgggcaacctggcgatgccgggctttaccgcgccgaagctgttgtgggtgcgccgtcatgagccggaacactttcagcgcaccgccacggtgctgttgccgaaggattatctgcgctaccggatgaccgggaagaaagtctccgatatgtcggacgccgccgggacgctgtggctggacgtggcgaagcgcgactggtccgacgctctgctggacaagtgcggcctgtcgcgtagccaaatgccgacgctggtcgaaggctgcgagatttccgccacccttgacccgcaggtggctgcccgctgggggctgaacgcctcggtggtggtggccgggggcgggggggataacgcggtcagcgccattggcgtcggcgcggtctcgccgggagatgcgtttatttcgctcggcacctccggggtgctgtttgtggtgaccgacgcctatcgtccggcgccgcagtcggcggtacatgcgttttgtcacgtgctgccgaacctgtggcaccagatgagcgtcatgctgagcgccgccagctgtttgcagtggttctgccgcctgaccggcaccacggaggtggcgctgctggcggagattgccgagctaagcgaggaggataaagccaacgcgccgttcttcctgccctatctctccggggaacgaaccccgcataacgatcctgacgcccgcggcatcttctggggcatgacccatgccagcctgcgcgcgcagctcggctacgcggtgctggagggggtgagctttgggatcaacgacggcctgcaggcattgaaagagagcgggacgccgatcgcgcagtgctcgctggtgggcgggggcgcccgcagtccgttctgggcccagctgctggccgatattctcgctatgccggtggtgacccacaaaggcggagagaccggcggcgcgctgggcgcggcgcggctggcctgcctggctgcgggcaaaccggttgccgcggtgtgtgaaaaaccggaagtctggcagacctggcgtgcggatcccattcgccaccacatcctgatgcaacgctacgcgcagtttaaagccctgtatttaaacgatctgcactatcgacagcac

SEQ ID NO: 24140 - DNA, 420 bp, Klebsiella pneumoniae
atgaagcgttatacacctgacttccctgagatgatgcgcctgtgcgagaccaatttcgcgcagttgcgccgcctgttgccgcgaacggatgcagcgggtgagaaggtaagctatcaggtgggaagcgcgcagtatcggttaacgatagttgaatcgacccgctacactactctggtggcaatagagcagactctgcctgcagtgagctactggagcctgccatcgatgaccgtccgcctctaccatgacgccatggtggccgaagtgtgttcgagtcagcagatctttcgcttcaaagcgcgatatgattatcctaataaaaagttgcatcaacgcgacgaaaagcatcaaattaaccagtttttggccgactggctgcgttactgtttagcacatggagcgatggcgattccggtttgt

SEQ ID NO: 24141 - DNA, 1422 bp, Klebsiella pneumoniae
atgcaagatagcgtcaaccagcccggatttttattccacgattatgaaaccttcggcaccagcccttccctcgaccggccggcgcagttcgccgccatccgcaccgacgcggagctgaatgtgctcggcgagcccgaagtgttttactgcaaacccgctgacgattatctgccgcagccgcaggcggtgatgatcaccgggatcacgccgcaggaagcgctggccaaaggggataatgaggccgcgtttgcccgccgcatccacgatctgttcacggtgccgcaaacctgtatcgtcggctataacaacgtgcgctttgatgacgaagtgacgcggaatatcttctatcgcaacttctatgacccttatgcctggagctggcagcacgataactcgcgctgggatctgctcgacgtgatgcgcgcctgctatgccctgcgcccggaagggatcgcctggccggagaatgacgagggtttgcccagcttccggcttgaacatctgaccgtcgccaacggtattgaacaccagaacgcccatgacgcgatggccgatgtgtacgccaccatcgccatggcgaagctggtgaaaacccggcagccgcggctgtttgattatctctacagccaccgcaataagcgcaagctggcgacgctcatcgacgtgccgcagatgaagcccctggtgcatgtctccggcatgtttggcgccgcgcgcggcaacaccagcctggtggcgcccctggcctggcatccggaaaaccgcaatgcggtgattatggtcgatctggcgggcgatatggcgccgctgctggaactggatgccgatgccctgcgcgagcggctttacaccccgcgcgccgagcttggcgatctgccggcggcgccgattaagctggtgcatttaaataaatgtccggtactggcccaggccaataccctgcgcccgcaggatgccgaccggctggggatctctattcagggctgtctggagaacgcccagctgctgcgggcgaatccgcaggtgcgcgagaaggtagtggcggtctatgccgaagccgagccgttcgtgccgtccgaaaacgtcgacgcccagctttacaatgggttctttagcgatgccgaccgcgcggcgatgaaaatcgtgctggaaaccgaaccgcgcaatctgccggcgctggatattaccttcgccgataagcgtatcgaacgcctgctgtttaactaccgggcgcgcaacttccccggcacgctcgatgaacatgagcagcagcgctggttagagcaccgtcgtcaggtgtttacgccagagtttttgcaagcctatgccgatgagctgcagatgctgtatcaacagtatgcggatgataaagagaagctggtgcagctgaaggcgctgtggcagtacgcacaggatattgtc

SEQ ID NO: 24142 - DNA, 1746 bp, Klebsiella pneumoniae
atggtgctaaagaaaaaaacgaagtccgccgccagtttcaccccgattcgcttcgggttactgtgtgtggccattctcggttgtctggggctgctgctggtccgcgtgggctggctacaaattatctcccccgataacctggtaaaacaagaagatatgcgctccctgcgcgaagaacccgtagcggttgagcgggggatgatcagcgaccgggaaggacggccgctggcggtgagcgttccggtcagtgctatctggatcgacccgcagaccactatggagaagggcggtgtgggctatgggccccgctggcaggcgatggccgaagcgctgcacctcaacctcggagagctggcccagcgggtacagagtcatccccacgctcgctttctctatctggcgcgtcagatcaatcccgagcaggcagagtggattgataaactgcatctgccgggcgtctacctgcgcgatgaatcgcgacggttctacccggcgggccacgtggctgccaatctgctgggctttaccaatgttgataatcagggcatcgaaggggtggagaaaagctttaacgcccagttgaccggtaaacccgggcgacgtctggtgcgtaaagataaacatggcaatgtcattgagaacattaccgaagtgccgccggttccggcgcataatctgcagctgagtattgatgaacgcctgcagacggtgacggaagacgccctcgacaacgccgtccgctggaacaaagcagagtccggggcggcggtattgatcaaaattgataccggcgagatcctggcgatggccagctatccggacttcaatccgaacaatcgcgatagcgcgacgctggatgattttcgcaaccgggccatcagcgacaccttcgagcccgggtcgacggtcaaaccgctggtgatcatgactgcgctacagcaggggattgtccagccagacagcgtggtggatacccatccgttcgtcctcgatggccatcgtattcgcgatgtgggctattatccggagctgagcctgaccgggatcctgcagaaatccagcgataccggcgtgtcccacctctcgctcgccatgccggtgcagcatctgatcgatacctataaagctttcggctttggcgaaccgacggggctggggttgaccggcgaaagcgccgggctgatgccgcatcgccgctactgggggcaactggatcgcgccaccttcgccttcggctatggtttgatggtcaccccgctccagctcgcccacgtctacgccaccatcggcggcttcggcattgcgcgaccactgtcgattacccgcatcgatccgccggtgatgggcacgcgggtgatgccggagagtattgtgcatagcgtggaacatatgatggagagcgtggcgctcccgggcgggggcggtaccaaagcggcggtacgcgactaccgggtggcggtaaaaaccggcacggcgaagaaaatcggcccggacggcaaatatatcgataagtatgtggcctataccgccggcgtggcgcccgccagtcgaccacagttcgcgctggtggtggtgatgaacgatccgagcaatggttcctattacggcggcgctgtgtccgcgccggtcttcagccagatcatgggcgatgtcctgcggctggagaacgtcatgccggacggcatgccgcaaggggcggagaatctgatcgtaatgcacgatagccacccacaggggccggcgctg

SEQ ID NO: 24143 - DNA, 900 bp, Klebsiella pneumoniae
atgggctccagcaaaaaagggatgctgaacgtactgattgccgccgtgctgtggggcagttccggggtgtgtgcgcaatttattatgcaggaaagccagatgtcgtcgccgtttctgaccatgacgcgtctgctgttcgccgggctgatcctgctgatgctcggctttgttcacggcgaccgcattttccgcgtgctgcaaaaccgccgcgacgccctaagcctgctgtttttctcgctgtttggcgcgctaaccgtgcagttcacctttctgatgaccattgaaaaatccaatgccgccacggccacggtgctgcagtttctgtcgccgacgatcatcgtcgcctggttcgccctcgcccgcaaagcgcgtcccacaccgctggtgctgggagctatctgcacctcgctggcgggcacctttctgctggtgacccacggcaacccaacgacgctgtcgatttcgccggcggcgctgttctgggggatcgcctcggcgtttgccgccgcgttttataccacctatccttcaacgctgattgcccgctacgggacgctgcccatcgtcggctggagcatgctgttcggcggcgcgatgctgttgccgttttacggcggccagggcaccgattttgtggttaacggcagcctgctgttagcttttttctacctggtggtgatcggtacttcgctgaccttcagcctctatctcaacggcgcgcagaagattggcggcgcaaaggccgggatcctcagctgcgccgaaccgctgagcagcgccctgctgtcgctcctgctgctggggatcaccttcacgctgccggactggctgggcactctgctgatcctcgcgtcggtggtgctgatcgccatcgactcgcggcggcgggtgagatccgcc

SEQ ID NO: 24144 - DNA, 1620 bp, Klebsiella pneumoniae
atgcgcgttaatcatggtttaaccccgcaggatctcaaggcttatggtatcaatgacgtccaggatatcgtccacaaccccagctacgacatgttgtttcaggaagagctcgacccgaacctggaaggctacgaacgtggcgtattaaccactctgggtgctatcgccgtcgacacgggcatttttaccggtcgttctccgaaagataagtatctcgtgcgcgacgacaccacccgcgacaccgtctggtggtccgataaaggcaaaggtaaaaacgacaacaagccgctttcgcaggaaacctggcagcatctgaaagggctggtgacccagcaactgtccggtaaacgcctgtttatcgtcgacgctttctgcggcgccaacgccgatacccgtctcagcgtacgtttcattaccgaagtggcctggcaggcgcacttcgttaaaaacatgttcatccgtccgagcgatgaagagctggctgaattcgtgcccgacttcatcgtgatgaacggcgcgaaatgcaccaatccgcagtggaaagagcagggcctcaattcggaaaacttcgtcgccttcaacctcaccgagcgcattcagttgatcggcggcacctggtacggcggcgagatgaagaaagggatgttctcgatcatgaactacctgctgccgctgaagggcatcgcctccatgcactgctcagccaacgtcggcgagaaaggcgatgtcgccattttcttcggcctctcaggcaccggcaaaaccaccctctccaccgacccgaaacgccgcctgattggcgatgacgaacatggctgggatgacgacggcgtgtttaacttcgaagggggctgctacgccaagaccatcaagctctctgaagcggccgagccggatatctatcacgccatccgccgcaacgccctgctggaaaacgtggtggtacgcgccgacggcacggtcgatttcgatgacggttcaaagaccgaaaatacccgcgtctcctaccccatcgaccacatcgacaacattgttaagccggtgtctaaagcgggtcacgctaccaaagtgatcttcctgacggccgatgcgttcggcgtcctgccgccggtctcccgcctgaccgccgaccagacgcagtaccatttcctgtccgggtttaccgccaaactggccggcaccgagcgcggcgtaaccgaacccacgccaaccttctccgcctgcttcggcgccgccttcctgtcgctgcacccgacgcagtacgccgaagtgctggtcaaacgcatgcaggcggctggcgcgcaggcttatctggtcaataccggctggaacggcaccggcaagcgcatctcgattaaagatacccgcgcgatcatcgacgccatcctcaatggctcgctggacaacgcggagacctttaccctgccgatgtttaacctgcagatcccgacggcgctcccgggcgtggatacccacatcctcgatccgcgcagcacctatggttccccggagcagtggcaggaaaaagccgaccagctggcgaagctgtttattgagaattttgagaagtataccgatacgccagcgggcgccgcgctggtggcggcaggaccgcagcgc

SEQ ID NO: 24145 - DNA, 1614 bp, Klebsiella pneumoniae
atgaaggcttcagagcacccgcctcgcgttcgccaacgcgccttaccgttaaagctgagcaccgccgtgtccttgatgatcggcagcgtcatcggcgccgtgctgctgctggtgtatgccttgtggtatatgcagatcagcaacgccacccgcgacggtctgaaagagaccgcgctggcggtggcgcgcaccatggccgatatgccgcaggtgaagcgcggactggaggcgcccccgcagcagcagatcattcagccgctggcgcaggccattacccgccgcaacgacctgttgtacgctatcgttaccgatatgcagggtattcgctattcgcatccggacagctcaatcatcggcaaaccgttcatcggccacgatattcagccgacgctgcagggaaaagagaatgtcgccatcaaccacggggtgctggccccggcgctacgggtgtttacgccggtgttcaacgaacggcatcagcaaatcggcgtggtggtggtcggcatttcactgagtaaagtggacgaacagatcgccaacagccgttgggacgtgctgctgaccatcctgttcagcgcgctggtctgcgcgctgggcacctggagcctggttcgcggcctgaagcgcgtgctgctggggctggagccgcacgaaatatccacccagtttcagcagcgtcaggccatgcttcacgccctcaaggagggggtggtagcggtcgatgcccatggcgaggtaaatctcatcaaccccgcggcggaagagatcctcttttccggcccggataagactctcgttcacagccccctgctcgacgatctgcagaccgtactgcagagcggcgagccaatgtacgaccgcgaactggggtgcaatggtctgctgctgatcggcaatacagtgcccattcgcagccagggtgcggttgtcggcgccatctgtaccttccgcgataaaactgaggtcagccaattgctgcagcgactggacggcatgatgagctatgtggatgccctgcgcaccacctcccatgagtttatgaataaattgcacgtgatcctcggtctgctgaatatgaaaagctacggcaaactcgaggaatacgtgctgcagaccgcccaccgctaccaggcggacatcggcgacattcaacatcgcattaaatccccggtggtggccggcttcctgataagtaaaattcagcgcgccacagagtgcggctttaccctgacgctggcggaggagagcctggtgccggattgtccgaacgagaaacaggtcacggtgctggtgacggtgctgggcaaccttattgagaacgcgctggacgccatgagcggccaggcggagggtgagatcggcctgctgctgcactaccaggacggctggctaagcggtgaagtgagcgacgatgggccggggatcccggagaacaacatcgacgctatctttaacaaaggcttctccaccaaaggcgagaatcgcggcgtcgggctgtttcttgccaaccagcagttgcgcgagctcggcggtaccctcgccgtcgaatcggaacccggcgtatttacccaattttttgttcatctcccctgggatagtaaaaggaaacctgcg

SEQ ID NO: 24146 - DNA, 1344 bp, Klebsiella pneumoniae
atgacgttaatgcaatttagcgggctgctggtggtctggctgctgtcgacgctgtttatcgccaccgccacctggtttgagttccgtcgggtacgctttaacttcaacgtttttttctcgttgctgtttctgctgacctttttcttcggcttcccgctgaccagtattctggtgttccgctttgacgtcagcgtggcgccgccggagattttgctgcagacgctgctgatcgcggtgtgcttctacgcagtctactacgtgacctataaaacgcggctgcgttcggcatcgcgtgaggttgcgcatcgcccgctgtttaccatgaaccgggtggaaacccatctggcgtggggcattttgatggggctggcgctgctgtgcgtcggcatcttcttcgcccacaacggtttcctgctgtttaagctcaactcctacagccagattttctctgctgaagtgtccggcgtggcgttgaagcgcttcttttacttctttattccggcgatgctggtggtctattttctgcgccaggattataaggcgtggatcttcttcctcgtcagcacggtggcctttggtttgctgacctacgccatcgtcggcgggacgcgcgccaatattatcatcgccttcgccatctttctgttcatcggtattattcgcggctggatcagcctgtggatgctggcggcggcgggtgtgctgggtattgtcggcatgttctggctggcgctgaagcgctacgggatgaacgtcagcggagacgaagcgttttatacctttctgtatctcacgcgcgacaccttctcaccgtgggagaacctggcgctgctgctgcagaactacgacaagatcgatttccaggggctggcgccgatgatccgcgatttctacgtctttatccccagctggatgtggcacggtcgcccgacgatggtgctcaataccgccaactactttacctgggaagtattaaacaaccattcggggctggcgatttcgccgacgctgattggctcgctggtggtgatgggcggcgtctggttcgtaccgctgggcgccgtggcggtagggttgattattaaatggttcgactggctgtatgagctgggcaaccgggagagcaatcgctataaagcggctatcctgcacagtttctgtttcggcgctatcttcaacatgatagtgctggcgcgcgaggggctggattcgttcggctcccgcgtggtgtttttcctcgtgatctttggtatctgcttgctggcggcgaaactgctgtactggttcctggatagcgtgggactgattcataagcgcgtaaaaccgctttcgcaaccgcaagtc

SEQ ID NO: 24147 - DNA, 900 bp, Klebsiella pneumoniae
atgagtatcgacctgagcaaactgctgaccgagcgacgtaacgccaacagcgccaacattgacaccctctccaccctcgagatgctgacggtgataaaccaggaagaccagcaggtagcccaggcgataacgccctatctgccgcagattgccgaggtggtggataaggtcgcggcggcgctgcaggccggtggccgcttgatttacattggcgcgggtacctcagggcgtctggggatcctcgatgccagtgaatgcccaccgaccttcggcacccgcccggagcaggtggtggggatcatcgccggcggacataaagcgattctcagcgccgtggaaaacgtggaagacaacaaagcgcagggggcgatggatctgcagaacctgaacttcagcaaccgcgatgtgctggtggggctggcggccagcggacgcacgccgtacgtcattggcgccatggaatacgcccatagtcagaatgcctttgtcgccatcgtcagctgtaacccgcatggcgaaatggcccagctggcggacgtggcgatcaccccggtggtcggcccggaagtggtcactggctctacccgcctgaaagccggcaccgcgcagaagctggtgctgaacatgatctccaccggggcgatgatccgcgtcggcaaggtgtacagcaacctgatggtcgacgtcgaagcgaccaacgccaagctgattgagcgccaggtctctatcgtgatggaggccaccgactgcgatcgcgccaccgcccagaaggcgctggaggcctgcggccgccactgtaaaacggcgatcgtgatggtgctggcggacttaagcgccgcagaggcgcagtcgctgctggcgaaaaacaacggctatatccgcaaggcgctcagcaacacc
